United States Patent Application Publication US 2007/0054278 A1 - sequence listing, part 28

SEQ ID NO: 94071 - DNA, 77191 bp, Homo sapiens
accactcagtcaatgtggatcatgtgtctgttggtgaatgccccagcctcccatcttagtgtgggaggcttgctgtttctgaggcttagtgtttctgaggcttgctctgcatgatcctcagaaggtctgcagtggcgtgagcccagttgcctgcagcagtaactagcacattaacccaccctttgttggctcctctctcttttcattctcttcttccaaacaaacagtctgcacccaagtctttgttacagggtttgctttcagagaaacccaatctaagacacactgaaaattctggactgccttcacacagaggaaactcagtaaaaagaactaaatttactgtagttattgcttcatcagctctaacatcatggtgtcacctgtgagaagtaaaatcaagtcagccaaatttctgagcatctactaggttctgggaaaactagtagataaatgtaattcctgccatcaaggaacacacagcctatcagacaaactgctttcccaagcctgactatagcacaagacaatttggttaaagatctccattattccctttctccaaactacatgtgagtttctgtaggaatatatggcccagtgggttatatagctatacaaattgggcctgttgcaaaatctaatgtggaccccattctctctttgatgtaagcctagactctcattgtttataagtgacagaagttcaactcaaagtagcttgagccaaaaagcaaggctttagctaaagtagctggaagtcaaggagtgcactcactggcttcaggcatgggtggatcctgagtctcaataatgttttcagggttttgtctgtcttcagctctcacttctgattcctttggtttggcttcactctaagtcaggtttttttcacatgagagaaaaaaatggctcccagtgggtcttggcttactcagtccttacatctcatgacccgagcaaagaagatgtcctctttttcctagcatccatataaaaaggtcttatagcgacaatatggccctgcttggattgtgtgcttatccctgaaacaatcacagtggcaaagggaatggggaattcttgtagggctgagtcatgcccgtcactcactgggaggggtaaacctcattactagtgaaacaggggctctgctactagaagcaaaacacaaaatagtcacagcaggtggacagcacactaaagcgaagcacagccctttatagatcccaaggctaccgcaagaaatattgtcctgttttctttgggagtgggtgtctccgagcaaaatgagattcttgggtggagagtaggtattgatttatttggatttacgcaaaacaagaagggggctgcctcaggttgtactttctggagctctggctatttacaatggaggcttctacagatgctctggccaaggcacaggtcctgcacccactctgaatggtgggcaccctaggggtaaatgagttgtcaaagtctttcctcataaggttatccatggctggagccactggaaaatcagaagagggagcagtggggtggcrtcaccarcagtaaggtcttcattcttgggcgcattcctgagtggaaaatgccctctgctctctgccactgagttggaagtaaaggcagcttccccaaccctgtaaaatgttgggaagcagaaagaggagctgcaagttggtcctctgccttggatgccagaggagcagctgacaaaagcctgtggcagggctctctgtgaatagcctgtatgatgctggttgggaagcctcagagctgagacccccctcaacagtgtgctggctgtttcaaaaggctgtttccgcactggcccagcccacagctgtatatgggcttgcttagctccagaatgggcaaagctgaagcctctctctttgatccttgccacatacctttaaccaaaggcaaagtactttttaggccagtggcacacataatgcctgatctttgtccatgtttagaccaaagcctttcccatcaacagtgggccgcagtgtgtattctgccaatcgccaattcctatattggcttttttttcctatttctactctgcatgtggctctgctgactgcaattgcaaagccttctggcaattccggattttaaggaatcaccagtcaaatcgtatagattcaacttcttttctttcaccaccttcccttttcccttagcttgtaattagccatttttcctcatagttttgaagtctccttatttgaaattcatcattgagttagtcctgtgggagttactctcaattacaaattgaagactaattgtgccgcaatgactgttgctctaagacgcctccactgtaatcgctccytaaattaactctcgcctcttatttaacactaagttaaggctttaaaatragctgtgatttgtagtaggcagcacagcagttgctgaattgtggagtcacacctataaataaataaatataagtatatatacacacatacatataattttataaattcccttgtcatttaaattctggattatttttaaaatgtgaaagtaaaatttgcttaacagaaacagcataattggcttttttttttttttcttgagacacagtctcactctgttgcccaggctagagtgcagtggcacaatcttggctcactgcaatctccgcctccgaggttcaagcgattctcctgccctagcctccagagtacctgggattacaagtgtgcaccaccaacgcccgggtaatttttgtatttttagtggagatggggttttaccatgtttgccaggctggtctcgaactcctgacctcagatgatcaacccgcctcggccacccaaagtgctgggattataggtgtgagccactacacccagctagttttgcttttactgtcatgtacaattaaattttttccttattgccagtcttttgttctgaaaaatagtttctgaaaagcttaaatcactacactcctgcccccacactctcttgttttatatcgccttgatgtattttcttacgcagtgtgcctctttttttttcaagggtaggatggggtgggagagagaggtctgactcctgatcaaagggggttgcatgattccctgtattttgcgtttccatccaatcattgcgaccctgacaatcaggtgacaagcagcaagctggtaagaattcatcagaaattaacccagagaaggggagctataaaggtagtgcccacaagaggaggtgaggccctggcccaaatcaggaggccacagtggtgtcagcgcaggtgacacctcaaagcgtcagccaaggattcaaccccttgtagacatggtctttaggacacttccattaggatttgacgagtgacttctgcaagtttgacgcaaacttaagcaaaaattcagacttcaagttatgaatatactttttgttctctagcaaaatatggctatgtaattttaagtataaattaaaaagtaacttaaaagacatctgaaaatggtcttttggccttaaccaaatgatgacaatataaacagccatgagttttggcttcctccaaaaggacaggcagaggctaagcgcatttggtctgcagttcctgccacctgtcctgcctcaactctctggttacagcacaggcaatagctcgagagagactggtcttaaagccagttatcagatgccaagggaaagccaaaaggaaatgaacaaaagaagtataagaaacatataaaactgtcaaacttctcaagtccaggctagctgcttcctagccatgccccaagccccaccactccactggtccactgcttggcctccttccctgccagctccctgcctgtcttttcctcatgggtgtcatcttctcacctacaggcaagtggagctcttaaacgactggcgaagaaggttcttatgttcctatctcatagaatgacctatgggcatctctctgagaattttcgctccgactggatgttctccatccctcaccccatatggaaaactaattcagagttagaaatagaaagatgatttccttgagctgccaccacacccagacccaaccccagccctaaaaggaatgtgacttatatggagttaccaaataatagatcaaaactcctccagtctgtctgctgcccacctctcgcaatagaggcaaatatccttgcccatttagttccaaaattaaactttacttccatattataatcaccactcattgtgcacagattatttggacactgtagaaaagtagagggaagggggaaactcaatcatagtttcacacttagagacaaaactggtacactgacttccagtcattcctttatataaggtgtaaattttttccaacatactagaaactgcttccccctaatgaccagagatgcaattttaatttaacattataacatacatatttctcttgttaatataaatttgtaaatgcacttaaccgtattatatttatataataatgaacatactaatacattaataattatagtatataaacatatatttataaatatatttataaatataagcttgtaaatatatttcatatctttgtaaatgtatttaacagatgtatgataattcactggatatagcatagtttacttaacctaaatgagtcaaaataagggaatctctttccaatttttcactgttattattaaggctgtaactaacataaatgcataaacatttttaggtatgtaggctagtttctttacaaaaggctcctagaagggatagagatgggtcaaagggtataaactttttaaggctttttttttttcttttttttcttgagacaggctctcgctccgattgcccaggctggagtgcagtgctgtgatctcagcttacagcagcctcaccctcctgggctcaggtgatcctcccacctcagcctcctgagtagctgggaccacaggtttgtgccaccatgcccgggtcatttttttgtatttttagtagagatggggttttgccatgctgcccaggctggtcttgaactcctggtctcaggcaatccacatgccttggcctcccaaagtgctgggattacctgcatgagtcattgcacctggcccttttgcaggcttcttgaggctcattgccaaagttccctggcctttttaaagggacagtaagaaaactgttctgtggcagtcacagaggctctgtctgatatcaggggaagggtttgcctctcagctaattggaaaccaaacagacaaacatttttatatactgaaaaatggctcaccagtggtggccttcatgaagaggtgcagcctgcttcatccattcctgaaggcaaattaacatcccaaggatgtgtttgtaggactgcaagattcccccagagctatcttccaaatgctaaaaatagttttttaaaaaaattagtgtcagtgtacatgaatgacaattctttggttaagtgtcccagatatctggagaataggcgtgtttgtgtgtgtgtgggtgtgggtgtgtgatgtatagaaacacaacacacaaatacacacacaatcagactccaatgaacacaatgaagatgcttatcatatatcttcaatgaaggagatttaatttctccattttcaacacacacaattttcagtcacatttcctttagttgggataggtgatgtcacctgctgtcactgcagaaataaaggctcctctccccctttgtaatatacattgatgagtggaagcatcggcatttgctaacaaattactatacctgctgcttgctgctatttcctcctccatctgcctcccagacagacattttttgcctatccaaatccatttgaattcccagttcaaagaatctttgttagatggccaacgtgttcccaagagcattgggaggaactaataaaagacacacacatttcatatgtggtggcatcatgccagagtgatactgccagcattgctttagcgaatgctgatggccagcatgcccgccgacacagcaggcagccgaggtaatgcatattcacaaggtgccttaatcccttgtgaggtgtactgagtgcccactgggtagtttgtatctctgttaagagcataccggtcgcaactccaagggaagtgagcatactaaaatattgtaatcggattcctagggcactgtttttctcctagctcagcgattagagatttccccgtggaaatgttattcacatgaaagccttcaaatataaaatattgtactagaagagggaggggttacgtatagatgtacagtcagtccagaaatgtgcgactatctttctgcatgcttatttacgtgcacacacacgtaccacaaattatatgtacatccccaacaaatgtattcgagaaaaagacagcaatgccgttccactgtttgtgcacacatgcagaggaaatggtccattccaagactggacagatacctctgaaggatcctttagcttgggtctcaatcatatgcataaagaggcttttcaccgagtggatgactaattcattcatcttgatcgataattagaactgacaaagaacagatcaacacaaatcacgagggcaaaaacatctgggacgcagtttaatgagaataccccaaaacctctttagtagtaattgcattgcaagcaccaaatagctttcgcggttgtttttgcaaatgatacaaattagcacccaagatctgaaaagtttactgactctaaaaacattggggaatttagcagggccctgagtaccttggccaaatatacgtactaacctagatacattctggcatataaatttgggggcttcttgcaatgcgaaaaaaaagttaagattctgaatcctactgctgtttgcacttggaactcccaggagggcaggttcatctgtgaggcagttttcctctttccccgcagaattccttaccaatttcacacaaataccctgagaatttttaaatatccaagatgcttaaaatctgcaagtgtagatccttttccttgttgggaaatgtagacaccacacaaacaatttgaaggtttcatgggtacaaagttatacctaaaaagctcaggaaagctgtcataagatgtaacaattgcctatcttatgggatctaaacaaacctagagaaacaataagaagagattttcaaagcagttgactctggttttgacttgtttccttcttcagtcacctctgcctaagtccagcaagaagttaggaaaaggtgctaatcatataaatcctgcagagggaaatttcagacaagttaaatatgccaaactgaaacaggaaggcttcattaaaaaaaaaacaaaaaaaaaatgtcacaatgaagcaatgcctttctcaatgcttacaatgctctttctctccttttatgtagttctcttcccttcttcaagactttcctggcagcggcacaccgctgtggactcagggttccaactcttacagtatttgcttgcactacgcttggtcgattagcctattcgatttccacttattcatttctgccttgtaagcttagaatatgttcaatccatgtgtgtccatggcaccccatctttttgaatcgtactcccttttatcaaacattttctacctgtagttttccatgtgggagtgtcccaaggtcagcaaggcaggcacattcggtgaaaagactacagaaaagaggtggttccgaaaaacggaaggacctccaaaagtcatgcgcccactaagatgcagtgagaacttctaagcatgctaccgtggctgatgacatgaaacagttacattgttaagacagacaaacaaaaaaccctgctgtctgtcttttggagttctctagcaatacttgtgaaatgatttgagataacaccattttaggatcctcatctttttgtagaaaagtaagggcttattgaaacatagtcatcaggccccattgstgatggttccagctgccttgttggagataatggaaatgagaaattacatccacattatatatctgcaaaagcttccagaagatatttcagagtcattctagggaagaacagaaatggacacatcatattgtagtgtttcaacaaatcccactccccacagtattttacttcaagtaaaatcgaataaacgtaaaattaatttagaacaatattcaataaggaaaatgtcaccaaaagagtttaaatgaacattaaatgcacctggaagtggaagggaagtcctaattttctttgccttggagcctcttaagaatgcaggttggacctcatgttggaatgtttccaggccttttttactytttcyttaacaccagctactaagtcccagttgcccctgtgactttcgtatctagcatgtgaagcaacttctgtaagcaaggagcaatattatgatatggacataaaatttgaaatggcaggtaatgaaatggcttgtgaagtggtatagttggaaataacatttcsaaatttaattttttttttttttgagacagtcgcgttttgttgcccagaccggagtgcagtggtgtgatcttggctcactataacctctgcctcctgggttcaagtgattctcgtgtctccgcctcctgagtagcggggattacaagtgtgcaccaccacttgtaatttttttttatctttagtagagccggggggttcaccacgttggccagactggtcttgaattcctagcctcaagtartccttgctccttggtctccctaggtggtaggattacaggaatgagctactgtgcctggcagaaatgtctctatgaacactcagtagccacctgacctataacagctagcaaggggaggggaaactatgggacaatctggctgccccacttttgtatagcctatgagttaagaatgattttaacctttttaagcggttgaaaaaaatcaaaagaagactaatattttgtgatatgagaaaatcacatggaattaaaacgtcagtatccatcaatacggttttattggaatataaccacaccattcatttccatcttgactgcctgcagagttcagaaattgtgatgagatgttatgrtctgcaaagccgaaaatatttactatctgactcatcctagaaaaatcctgagctagaagaaagcattgctgaagcaccatgagggttgtagacaagataaatgtatagtttacagataaattcaacattttctctggaacaaaaaagaccacaccctttttctaaactgataaacagattttttaaaatgttaatggaagttaacagggcataaatttacatgcttccatgccccgttctcagcctctgttacggcattcactgcattgtaaaaattgtaggtggtccagtttggttattttgccttcttaattacaatttgataaatatttgcggcaccactcttccaatatactttttaatccaggttaaatatttcacttagtagcacaactaaaggaatcccaaagtatccaagtaataattaagtattttaaagaagagatcaagcgcaaaggtgtagaaaattccaaggagacagcactaacagtggctcagtaatgagaagcaatctggaaaatacagtctataaacaagtacctgcctgcttaattccccactcatttacaatattccaggcagagactttaaatggaaagactgtcttattctacagagaatctaatgaatttagcacttagaatgaattcatctgggaggggtttaaaaggaacttttagcttgtcaaatttattgttatcaaaaacctagtaaaaagtaaagatgtattttacatcacacggtgtgtactacatcttgttaatgtaatgtaagtagacatgttctcttcaaaaaatcaaaaacgtttgttttaggaaatgtttaaaatatcctttagtgggcaagactgaaaacactaaaaataatttgaaattcaaatctggacaattctctcaacattagggttatttgagccagatcatttgaaaagaaaaatgacaaagaattccttttaatcttcgaaacacaattactgtatagtgttagagctggttgataagaagagatatcttagcttagacaatactgtaattacaacagcacaattccaattcaccagaacatccacaggccttcctcttaaaaacttgcaactgctgtactccacgacaaaattctgtatgtgtgggtttgttattaactctaggtttgaattagaattccctatcttacagcttggagctaaactctgtttacaaaacagtatttacacttgactaattttgcagatcaaactaattaaatcaattaaactggtgattaaccaaatgaaggctgattgcaaaaattagtgggtttattttggaggactggaagtaagctaattactgcagtgattacttgaacctgtagtactctaaatgtggtataaattgaaacctcatcgtgaattagactgggaattcattacagtttaaagcactgttaatactattcagtctgttcctccttggggaaaatttcctctctctgtgttttgtatactgataaacaatcacttgggttatgtgcattttgtggtgcaaccagtaaaataagagatgctgaagaaaaattatttacgtttagagtgataaacaccagtgcctgtcaaactttaatgtgcatatgaaacacctgaggatcttgctaaaaggcaggttataatttacgatgatgtgggtggaagtggtagttggggttgcagtggaagcacagtatgggaggtgtgtgttcatgcgagtgtgtgtgtgtgtgcgcgcgcgcctctctgcatatgagtatgcatgtgtgctaagattctgcctgtctatcaagctcccaggtgatgttgatgctgctggttcttggaccacactttgagcaacaagcacatacattgaagcagactgttgaacagttagattttgatgcttcaggatgggatatggagaccaagctgtcattacattccctgatgatgaaatctgacccactttcagtagcaatgcctgagcaggtagcctcggcaacaactgatgcagtaatggctcctactgatgggtccttatcagtggcttttctcatggtcttctcatgcaggtgtgttagtaacagattatttatgtccatacataatgcattctactaattggtttttaaagcatataattttaacaaaatgtgaatgtggctgagcatgtggtctacattttgctgatttaaatatcactgagctttctgctgttttgccttagctttggatttatgagatgttatttacaataatacaagagaggctttgrgttttgtctaaagacacagttaggtctaggagagagatgttgatttttatgcaaaatttaaagggatgcaagcaatttccttttgtagccatgctggaggagatgtaggcatgttatttccagtgtttcagttattttcaatgtttcagctcttttcatgttattttcagtgttgcttccactttaaaaattgggggaaaaagttaattttctcaattaatcaatgaacctgtcttgacatttggtttcctgcatgttgtgggttcatagcaagaaacaccttatccctacaggaaatcccacaacctttagcaatgactattcattgccatttgataagtagtacccccctgtgtgccaggggctagagagtgcaaatatgaacaaattaggaccacagactgtgttttaataaagacagagctcctggaaagggaaggcccttctgaagagtttccatctggtgcaagaacaatagcgtggctacacaaacagctttacgttagaaacaggtcactcagggctttgacaagctgcctgaaagttaatcagaaacacttttggttgcaattcttgttgaaatgcttcttagattatttttttcatattagtcttgtgaaagtatttgaattttttctttatgctcacagacgtttgcaagctgccagctccccagtctggatgtgaactagcatcacagaatctggtgggtgaagatggagaaggtgcagggggttgaactgagtctttatagatcccagagaaagagctttaaaaatgaaactcagattgtcctctttcttccaaaacttaaaagtagtaaaaacaaataaaaattrtaggctagaacttctcgagtgaggtttcatgatgccaagctttggagattttgtcaagttgaatcagttgaaggaatttagcataaaaattgaagagttttcttgccttagcaaaaatcatcagaatatttctgttaattaccaactgatgatctgcagaattcctaattatagaagacaaaaacaaatgatcacatttgtttttgagagactgtgtttttgagagacttgtttctgagagactgtgtgcaggtgacagttgcttccgtgaacttaccatggtctgagactgcatgtttggattttgtccactgacctggagtggatctatcttttcagggcaaaatgacagtaactgaaatatatatatttataggcattcaggtgtgtgtaccagtacatagctctcctctcctagatacacacagcaggaatcctagtgtctgttacactctcaggaagttgatttaatactttacaatgggaaggatacttgtctagaggtccgcatgctcacacagacctgcccagtgcgttcatttcctgtaggaaaagctaacacaggcccaattatcagatgcttgtygatattagggagaacttctcagttaagatagcatgaggccctcttcccactgtaaggatagccttttcacagaaggcttcatggacataggcatggacaacaatgaccaggattcttgtttttgaaattttctatgattcttctaaacccttctctacatacctcttcctcctaacgggatgcaatgacattaagtaatgacttatcaactataaccccactcctagtccatctttcggaaatgcatcctaaatcaacttgaaggcaatgggaagagatggaagggacctgtgcactttgtgactacactgagcagctgctgatggagctgcccaactcaggatttcctcatcatgtaacactttttttttttaattaagccacttgaattaaggttcatgttctgtgcaaataaaagcaacaggatggccaggtacagtggctcacgcctgtaatcccaacactttgggaggccaaggtgggtggatcagctgaggtcaggagttcgagaccagcctggccaacatgatgaaaccccatctctactataaatacaaaaaaattagctgggcatagtggcgggtgcctgtaatccyagctacttgggaggcagaggcaggtgaatcttttgaacccaggaggtagaggttgcagtgcgccgagatcatgccattgcactccagcctgggcaacaagagccaaactccatctaaacaaacaaaataacaaacaacaacaaaataaagataaaaataaaaaataaaaataaaacaaaacaaacaaaaaaaccaggagcttttcttcttgacaaagggactacttcttttccttatgcaacccaaaactttggacacttcctgcatttgtgctggatgaacactggaatttttatattgccaattaattccatgtctctatttttcagatgaataaatggcttgaataaatgaatccagaacttagtagttacacaaaactgtaccagaactctctcaattattgtcagccaagatggccttttccccaaaactggatcatagttcctgggaaaacttttctctcaaaagctgagtggattgagccagtgttcccacatctgycttcccatgcagagagtccaggtaaagaataaatgtatttcgtttagatgcaaactcctcttacctgccccgccccagtttagaattaaagcctatttaagatttcatccaggtcacttttccatactccgcccttttgttgggtacagcatttaaaatgttaagccaatttgcatttgattatttcattatttcagaaagtacccactcaaggactgaattaccaatgagatgttaacataaactaggtaaatagcacaaggtaatttacaatatggagataaatggacatacccgtagactagaataagaagcatgtaaccagttaatgaaatttatagtaacttacagtgggaatatttaacattaagagtgcagtctcaactaacctggaagttggggtgattcttttctgagtgttcttttggggtctaacttatgcagggtagtcaatgtattagcccaacttgcagtgaaatggattaatttgtcctttaatattgcatgatttcaggtgtgaaaagaagcagagagaaatcctctttccttgagaccttgaggaagactgacatgagcttttgaaagctttcctaagagtttatatagatatatttatgcagcattcttgaacaccttatatgtgagaggcatcaagcatcttgtcaggtgctgaggagtttgtgaagatgcattagacttagattctgcttccatgaggatccagataagacactgacttaaaatagtgacagaaaaagagaaaagtgactccasaatgttgctccttgagaaatgtgaggggaatgacgctgctgagggaaacagggccatggggtgggaagtgtttctgtccttagatgaccttggatcttagggtgttgaatttcagatgttgcaggacagatctgtggacatattttatgcagctggagaccatcaggcaattagaatttttttttttttttttgagacggagtcttactctgtcgcccaggctggaatgcagtggtgcaatctcggctcactgcaacctccacctctcaggttcaagcaattctcctacctcagcctcccaagtagctgggactacaggcgtgtgctaccactcccggctaattttttgtacttttagtagagatggggtttcaccgtgttagccaggatggaggctttttgaattttacatagtactccaattgcatttattttaataagttttctctacattaataactagaccatccttaataggtaaggctttttgtttagaaattcattatagctacatactaataaaatattaggagtgacagggggtgcttttcaagtcaaaactggaaggaaacacccagcagatcactttscttgccccttgtttgggccagttttaaacacaacgttgggaaacaccacagcccagtggaaagctcactggcttggatatcagaagatgcgaattctttttctgaccagtaacgtgacccttggaaaagtcacttagtctttttgcaatattgttttctcatctgtaaaggtagataggactcattaatcacaaagtctcttctagatctttctttccatgatttctrttgtacattgttgatcactccccaactttattttacccttgacatctctctccatcagaggtgttttaaaaaatgtgtacaattttttagcttcccaaaacataatcattattttcccatttgtttcttttaattttactttaagttctgggatacacgtgctgaacgtgcagctttgctacataggtatacatgtgctatggtggtttgctgcacctatcaacccgtcatctakgttttaagcccctcatgcgtttgtcctaatgctttccctcccctttctccctattccccaacaggccccggttgtgatgttcccccttcctgtgtccatgtgttctcattgttcaactcccacttatgactgaraacatgcggtgtttggttttctgttcctgtgttagtttgctgaggatgacggtttccggcttcatcaagtccctgcaaaggacatgaattcattctttttttatgacttcctagtattccatggtgtaaactgttttaaatttcatatggaaccaaagagcctttatagccaagacaatcttaggcaaaaagaacaaagctggaggcatcacgctacctgacttcaaactatactacaaggctatagtaaccaaaacagcatggtattggtaccaaaacagatacatagaccaatgtaacrtaacagaggcctcagaaatagcatacatttgtttcttactgagccctaaaatgatgaccttattgataacacctccattcrgatgaggaaattgggacataaagagagtaaagggcttgcctaaggttcccagctggtgcgtgtcagagctgggactcataccaggtcctcttcctatctcacccctctacacacacaaatctttccaccccaaacaaatgtcttcatttggtccgtgcttgaatagactttaaaagaaaaggtcttrtaaagacataattaacatttgggattaattgcagatacaaagatatttttaaactttttcttccgaaataattttctatttacagaaaatttacaaaaatagtacagagagttcctgtatacctcttaccccgcttctcctaaatgttaacatcttatacaaccatagtacatttgtcaaaactaagaaattgacattggtataataatattaaactacagacttaatttggatttcaccagttcaaattttaatggactaattagagtaaattgttgagttggaatagggtcatagatataaggtcttgtggcccccatcaaataatactatgcacagatgtgtatgtacagctggccttacagcagatacagactactaacacaaaagcatcctcgtctttgatgagaaagtcaacagacttgggaagctgcgattatgagaaaaagagtggccacagggagcattgataatccaaaatccaaaatccaatgtccaagaaacatttcagattctgtcttttatggacaaggtgctcacagtcaccatccatcatttcctaagtacaatcttttcctggaagatattgcagtattattcaaaacatgccaaagtgggcaggagatcccaagagtaattgtgagttatgaggtcatggggacctcattgcaaactatttgcaaaacttaattggggtaataaataaactaagcatgtaaattagattgaagactactgtgtgaattagaaggaggccattagcctgcctagtcaaaatgccttcttcctgttctgtaatatttgctgagttgaactgttaatcgaaggagcattaaattcagatatcctaaaatttcagaactaaagtaacttggaaataaagccatttaatgagatcctttctggaccaaagagtaagctttactttttatgattgggtacttaggtacttctcaaagagaggatggtctggcattcacgtccaaatccatatgcctcccagggtgtgaattcatcttagccagtgtacttagaagcaaatgtagaagaaaaaaaaatgaagctcaaaaggaataaaataaggaagccatttccaatcgacaaaaacaaacaaatctgtaggttgaaatgagactgtcccctcctccttttctttttttggtttctgaaaccaygtggtcaaaaataacttcaggcctgacctttctcttcatatatctgaagaatgagtaaaggaamctcttggaggtaaatataaatattaagaaagaaaccaaatgcccaaacactgcatctaatcatcggcctaagtcaagtcttatagcagctttttttttttttttwaagcagttgattgaatgaatacaaatgcctctctgttrtcacttgggatgccacttgatatatcccattttctagactctaattattccatttgtagacatgaatgccatttagatgtgagctaattcagcatggtaactcaattagattcgtaccgacttggatttatgaaacatcaatgggttcttggtgagaccaatgggactgcgggtgattcatcctgaagtctcaccgacacagcctctcaggagcgcaattaaacatgccagccatgaggatgttttttagctggaatgtttcacaattaaaataaaaaagattcctgtgtttctctgtgcacatggcccagcagaaaagaaagacgtgtaataacaaggactgaagtttccctttaggttgtatgttatctccagcaaagaaggctccttcacttggctgtgttccagcacctgtgtggccaaacttggttgttgacctaagtggcaaaggccgtggcacttcacaatttgcctcacattcaagggcactcaataaatgttgattgaacaaaattgctaagttcatcttagagcctgtatctgcatcttgactctcagagctgaaaggtagatgctaataccacattagatttgtaaaaatataagaaatctcaaagtgatgaaaattatgctgtgttttcagcctaaaagtgtggcccgtggtgagaaaatgggggaaaatatgtgaaccargattgtcccctgacagtacttttagcttgtaaaagtactcttttcaaaacaaatgattttactgagcagttctgtgctgggcttagacatgaaggcaagctcctgccgtgttaagggccgatgcctggcagagatctgcctcacactcctttttcactgtgggagtgtttgawgatgaaaggacccacgggtccttaacccggggcttggcacaggaggcatagttagaaacactgtgtgaattcacgaaacaacataatgggcatgaactcactctgtcaatgatgaaacactttggaaatgtctgttgtcattttcctaaatcaagtcttagttaagaaagacattactttgttattccaagatctggatgagggacaacacaaaggggaaagagattcaatgttatcatctctctctttgttgctttctctcagtttaatactccactatttatttctactgtgagattattattatttgtagaatagtagtagtagtaaaagtagtaacagtgagtagcaggtagtagtggccgtagtaatacttggtcaagtattgtaagtaacatttgcttttcgtgttagaattttcaaagtgcagtccacataacttgtgtcatttcatccctacaacactcctgcagaatagacatcatttcctccattttatagctgaggaaaccgctcaagagaggtggttttttgtcttgcctaaaatcatgcagctaaatctcagtgaagccggtatttcaaccttgtcttttctctgtaaattcttctcatgtggtatatatagaagaaggaacatgaggtttagatcaaaaaacactgttttactttctggttttataattttgaatgtttcatgaactgatagataaatctagcctcagcacattatgawtctgaggacattcttaagtttgagttggctaaaacttccaaattgttttttttaaaatcattccccaagagtgtcagcttatactagcatagcaacaggaggtgggaacaccaggggatgggaataacgttgtctggagagaggagcttctccaagcctatgcacctacgtttctttaatctcaggggagccttcattaaattggaaacaaaggttagaactcccttgtattgtttttggggcaactcctttcttgcttctaatttccaacagtaatggtctctgcaaagactttttgaagaaccacctaaaagagagggggcatgagtttatttgtaccacatcagcatcagttaacacatgcataattcactgtaatcttgtggtatcctcacaaccaaccaacccaccttggctccttttcattccaggaaatgccatctcgggcggcagaggggaacatcagaatgaccagtgctggggtcaggagctgccaagtctcccgcatcttactctgccactgacccctggggatttagggcagctgccagctggctgggcagccttaggcaattcacccaactccttgagacttattttcttcatctgtggcaaaagtgctcccctcaaaaactcttggaagcattaaataaaatgataggtgtgaaaatactttgtaaaccatttaacctatgcttcctgcccttttttcccaagggacactataccataaccckctatatcttttttttttagatctacccgtgttaaatgcaacatcttagaaacttacaatgtactttgacatattaaggactctgagcccggacatcatgggtcacatctgtaatcccagcactttgggaggccaaagcaggacaattacttgagcccaggagttccagaccagcctgggcaacatagtgaaaccctgtctctacaaaaataaaaaaaatgagccagctgtggtggcatgtgcctgtagtcccagctactcaggaaactgcggcaggaggatcccttgagcccaggagtccaaggcygcagtgrggtaggatcgtgccactgcattctaacctgggtgacagagtgaaaccctgtctctaaaaataaataaataaataaataaataataatctgagaagtcctgagaaataaactctgtggaaatgtgttcagtgcaaagtttcacaagctatttgaccacagatttgtttttgttgttgttgctgagatggggtcttgctttgttgccctggctggaatgcagtggcatgatcttggctcactgcaacctccgcctcccaggctcaagtgatcctcccacctcagcctcccaagtagctgatactacgggtatgcaccaccatgcccagtgaatttttatatctttatttggtagagagagggtttcaccatgttgaacaggctcattcttcatttaatacctaatgtcaagttgtgctgcagtcagctttaaaggcctgaatccacacaagtcattctcagggctttgtgagtggcagggtgcccttcttgccacctccatctgcctcagccctcttctgtgttgacaggttcccccaaaggttagcaaagatgacctccagcagcccaagacttctgctcaggaatctagcaaaaagagcatctcttcccccaataattctagaaatggtgccaatctcattcataaaccctgagttgtgctcaatctttaagcaatggctgtgggcagggggaaggaattctttcactggtaaggcctagatcacatgctcacttctggaaggaggaaaggtcggtcgtatctaatccaggtggactgaaaacagaagtggatctccaaaagaataatgttacaaaatgggggtattggcggtagtgaaggaattccagacaggcaaaaaacccaggagcactcatatcacttctccatcattcctcttcctagggcagaggtttttaaactttggtatacataggaatcccctacaaaatttatggaaaataccaatttcagtgccttaccctacttctaagattctgattccatattctgagatattgcctggaaatcagtcctttctgcaagcaccagatacaggtggtccaagtatcatattttcaggaataagggcaataagaaaaacacatttctagccattctcaatctttgctgcatgtcaaaataaacatttttttttttcttgagacggagtctcactgtcgcccaggctggagtgcagtggcatgatctctgctcactgcaggcttcgccccctgggttcacgccattctcctgcctcagcctcccaagtagctgggactacaggcgcccgccacctcgcccagctaattttttgtatttttagtagagacggggtttcaccctgttagccaggatggtctcaatctcctgacctcgtgatccgcctgcctcggcctcccaaagtgctgggattacaggcgtgagccaccgcgcctggcgaataaacatttttttttttttttccaaatcagatgcctgagcactacctggcaatctttcaaagcaacatttgcaagggtaaggctggcaaagtagatgtggatccacaggtatttctaacgggccctaaagcagcgattcttgacatttactatgtatatgaatgagctgggatcttcttaaaatgtagattccgattcagcagttttatggtaaggcctgagattctgcatttctagcaagctctgaggcaataccactggtgctagtgcatggaccatgctttgagcagcaagatactacaggctgagggccaccctgtgtattcgatttgcacatttcaaggtgtgtctgaacgggccaaccagcctgccagggtgcataaaaagacctgtttctaataggatttattcatagtgatatttctcactttcttccaagatgtgtagagcttattttactttattttatttttatttttcctagaaacagggtttttccatgttggccaggctggtctccaactcatgacctcaagtgatccgcctgcctcggcctctcaaaatgctgggattactggcatgagccactgcacccagcctagagctcattttaaagtagttcaaagtgaacacagtccagcctctaaaagctggagtacgcatgtgtacattttttatttaactaacactttggtgctccaggtctcacctagactctggaaagacaaagaaaagtgagacaggatctcttatggagctcacagtgggggtgaaccatcatcctggttcgctcagaactgcaagtgtgactttagcagtcacactttatcagggaagaaagacatgtaggccaattaactatatacaattagtgagggcagaggaggagtgatatggcttggatatttgtcccctccaaatctcatgttgaaatgtaatccccagtgttggaggtggggcttagtgggaagtgtttgggtcatggggaggcagccccccacaaatgtctttgtgctgtcctcgagataatgagtgatctgtcatgagatctggctgtttaaaagtgtgtgacacctcctccttctctctctctctcttctttctctctctttctacacctcaggtgattmacccacctcagcctcccagagtgctgggattataggcatgagccactgtgcccagccctgacttacatttttaaaactccactctggctgctgtgttgagaagcaactgtgtggtaggggaagggcatgaggaggaagactggttatgaggctgttacaagagaggatgggagctcagacaaggctggatgcaggggagtgggtttctctctgtgggtttccccagtccctggagagtcgaggccctttcaacctctggagaactgacttttccaactacttgggtgatctgggcagatttatcaccctcccaaggcttcattttcatcatctgtaaaatgcagacagtcatatctgccttttctgactcatgaggttcttgtgagaattgaatgagatcaccgctgtggaaagcatagagcaaagcaggaaagaaaacaggtatgagtcaaaagccaccagcgagacctctaatctggcaataccaaaagagaaatgctgctgtctcgtcattggctcagaccattcatgaaagggtgctgccgaatttaaaggttaaaccctaaatcatagattgagaggagacattgatgattatttggtcaagatccacatctctcagataaaaggaaactgagatgcagaaatgaaggttgctttcccgagacaatgcagtgagaggtggagccacgctagagtctcagttcctggtcttcctctgccatgcggcccatctcaaagtcctgtcaaatgtctcagtctcaaaaactaaccaaagcacaattaagataaaaggaaaaagaaagctgggtgctgtggctcacgcctgtaatcccaacactttgggaggctgaggcgggaggatcgcttgagcccaggatttcaaaaccagtctgggtaatgtagtaagaccccatttctactttaaaaaaattaaaataaatacataaattacaaaaaaagaaggaaaaggaaaagaaggcgctcagttatgaggtgtacaacagctttgtagcttgcaggtgcataatagaatttgatcttcccaatgactcctggagttttcaaatactcccattttacaaataaggaaacagagatttgggaagatcagccaaatgatcccacattacacagccagcaagtggctaggaaaagattccagctcatatctctggctttcccctgcatttaatgaaaacctttggagagagctgaaattggcttaatttcagagagtattatctctattgttctaattattctccctgagtcctacaggagaggattggaaagaatgttttttatttgtgagtgtagtctagtgcttattagaatttctgagctttcacactggaagtttcaacaggcttactgtgatgcttttgaagtgctgagtgtaaatttaagtctsaaaaacattctcaagccaagtgcactgatatatttttagataatagcaggaaaagttatgtaagtggatgytttacagagggacacacactgagggtcacatgctgcagttttctgaactgtaaaagcaaagagagaatgtatgagatgaggaagggacccgattttggtgcagagaccagaggcaaaactgctgttgaaaaagcaaacctcaaagacccatccttgctgttcatctgggatatacgctatgtcctttggttttaacttctaagtgatgtattcatttgaatcaagagagctacaggaaggttttaaaaagcagaacggttgtgctagaacacagaacacaggggaaggaaccctgagtttgaaatgtccgtgtattcttggggyctaaacatggctaacataggctttgaatctgcccaatgaatgcaggttccctccccgtgcgctttcccttgacagcagacacagaggcccgggagctgttggcttaccaacccctagtccgttggtcagatattgggggtcctcaggccatgagcctgtggggtgagtccccagggccctccatgaccctgagagctataatcccctctgaccccatgctgtgactgtgttgtcactactgaactttatcctgtttctgatttgaaccctaatcccagaaagactgaagtcccatcatgaatgcagcttaatccttgccaaacccgtccctgtgaggcccagccatctcactgaccccaggcatacctctccaggtaccaccccacactgccaccttctggcatttctgatacgttcactctcagccggctctggccccaccctctccactttatggctacactctgcagagagatagaatgcctgcccacgccactctagccctttgggacrtaggtgctggttgcagcctaaagtagggttagctccttcagtcactcattatcccagtagctaccctaaagtttcatcagtctcatgttccaagctgcatatattgaggcaatctcaagattagtagtaattagtataattaacattcattgaatgaaggttttattttagctgtttgaccttagacaagttacttttacctctgtgatcctcattttctcatctacaaaatggagtcgtaatagtacttactttattctgaaatcattagttgagtggctacatgtgtgaattatagttctattttaatttgtttgcttgttttgtttttttgagatggagtctcactctgtcacccaggctggagtgcagtggcatgatctcagctcaccgcaaactctccctcctggattcaagggattctcatgcctcagccttccaagtagctgggactacaggcaagcgctaccatgcccagctaattttgtatttttagtagagatggggttttgtcatgttggtcaggctgatctcgaactcctgactcaagtgatccacccatctcagcctcccaaggtgttgggattacaggcgcgagccactgtgcccagccatagttctggttttaggaaagtgtatgtaaagtgctttgcaaagcctggcacctaaccatacaatagtggtagtatgtgtaaatattaatcatccagtagtagtgtgtaccaggcacttttccagggggctttgtatacattacattattaattctgaatacttgaaagtaaagaagtattatacccattttacagatgaagctgaaacttaaggcttctaagtaatgcctcaaaaccacacacttggtaagtgggtaaatggctggaatttgaaccctggtgcgtttgactccaaggttgacctcttaagtcataaagatgtggatgacaatgaaagctctgaatgacagctcattataacaatagaacgcttgatggtcagggatcctctgtgattaattgcctcaggaatggaacaaatagtgagttttgcaaatagtaaatacttcagcagtgcagagaaaaagaccattatttccacaggcttaataacaaaaagctttaggagagaatttttcgctagctttttatcaaaggaatacacgtatggtatagaaaaaattcagagacttactttactcctagctttattttactcttttatgcttttgtttttaaatctatttctaactcttcttgctacctcacatgctgccagcattactctgtactgttgttacctttggtaaaataatctattcatagccgttaggattacaaatgcagacatcctctgacccagcttttaagactattttttttttaaataaaacaccagtatatatatggaagtacgtttcttgtagcattgcttacagttggcaaaacaaattcaaatcaagacaatgcccatatatatcaataagaggatacttgtataaattgagactcattgattgtaggagtcattatatgcctattacaaagaatgaattagatttctctacaataatctgaattaaaytgtcttcaaatcttaacagcttagaatttgggaaccaaatctactttaataaaaggtgaagtaacatagggaaaagtaaaaacgtgtgtttgtagttgatccaaaaagacattggcacgagctcaataccgggaagacataactcaatagtaccttgtatgaaatgggtaagggcgtggtagctcattcctgtaatcctagcactttgggaggctgaggcaggcaggtcgcttgaggccaggaattcaagaccagcctggccaacatggcgaaaccccgtctccactaaaaagaaaaaatgataataacacaaaaattagtctgggrtggtggcacgcacccgtaatctcagctacttgggaggctgaggcaggagaatctattgagcctagtaggtcgcaccactgaactccagcatgaacaatagagagagaatctgtctcaaaaaaaaaaaagaaggaaggatagggaatggaagagaagggaagggaggaagaagggagggagggaggggaggaggaaatgggtagagggcttttgtagattgtaaactgaatataacctaaaggtgtccaggcaagaaagctaatgggtagtttaggcaggtctagaacttttagaagaggagggaagatcatcctgctattctgtatgttgaccccatcggagaatcacgttcagtttaaaacaaacatgttcaccaaggtaatgaggctaaaatcatgccattggagaaatagctgaaggaacatacttctttcttctgaagaagagcagacccaaaggacactttggtcttttgtccccaaatttcatgtcacatggaagcaaaatattagactttttctatggagcctgaaagctaaaaccaggacaagtgagtgggtagaagtcaactcaggagagaggtttagcccaaaataaggaaggcattgcgagctatcagagcttgccaagaacggtataaaatggcttgctctagagattccctggaatctccagatcagccattggatccaagtccaagaggcttgttgtgtcttaagcaagtaacctctggagtctcagtttcctcatccataaagataagcaaatctacattgcccagtttatagaattgtacagaagaataaattatataacatatgtaaaagtactaggcaatcaggaactattattactgtattgtcatgatttgcaaaattaacaaggagcatgatttctttggtcctggaaaactaggactaccaaagacaggaccattctgagaatttaatcttagacttctaagtactttttagggtatagaagtaaatttaaaaaaaaataccatcctctgtaaaaagcaggcattgttagcttttcagaaaactttttggagcctaaatttacttttccagataaaagaagtagaaaaggaacttgggtgtgatgaagcattggcccaaaagtctttcttaagtgtaactttattaattaattaaattaattacttataacaaattgaacattcttagttgctaattacaaaagcagagagggctgtacttgaagatggaggagctgagtaaagactggtttaaggactcaaagatcgttagcactggatgggatctcagagaagactgaatgaaaaagaaggatcagtaacgatgtaaagtcgctcacccataactttattgctcgtagcagccctggcaatgctctcctaaggctcatgctttggtgtcctggatttgatttctaggcaggatcagaggagaaagtaaggtaaggaggaaaaagaagggaaatgtagaaaaagagttctttgactgaaaaggaatcatttccattacccacccccaccaaagaatctaacacatgcataaatatgtgtgggaaatgcttgctttttaatggaggctatcacatggaaatggccactatttgaactctattctaaggagaaaaaagtattaaaaggtaaaaaaaaggttcatgttccaaaatgtttattacagtaccattcccaacagtgaagaatcagaataaccctagtgttcagtaaacaagaggatgtttaagtaaattatgacaaagcctaccaaacattatacaaccagtacagatggtgtcaccacgattgtgaaatacaataagcaaatgctttgttctagtgacaaacggagggaagacggtgttgggggcacagtattgattggagagaagatttcaagtcataatctattgtactcgagaagggaaagaaaagtagatttgtagatataaaatgaattaaattagtaaattataaaaagatgtgaattccaagaagactttataaagagacagacacattaaggagacatgtgcagagctggaatagtttgtattcttttgacctcaggagtgagaaagctaagaacagcgtaggggctacctgagtggggttacagcttcaagataggccatactgagtgctccccactcccagtggcttggacaaagaggtactcgccttctaatgagaaataccacgtgcaaacttggtgaatggtaattaaagataaagccaccttgggtccagggaggagtgtacgggagactagtgacataagaagaacatgaggatacttctgggttcggataattcccaacttcatacacacaattttataactcggaacaaagcatgtacatatgtgccaggagacagcagacctgtggtttcatttctcccttagtttagttgcaacatatcagatattttcccctgcacctggccttacctgctcagatgcatggaattgccacctggaaggcaccttttttaaaagccccctcccatgtaagccggcaggggttgtagcaattgtaacagcctattgaatggattgatcttcctgttcttcccattccccaggacggctgaggctgcttggaaaagaaagacagccaagaaccaggagttaacaggtacaatgtaaatcacagtattattatcaaaaccatgtacatccaggaaaaagaaaagacaggtaaactttttttattattatgctttaagttctacggtacatgtgcacaacttgcaggtttgttacatatgtatacatgtgccatgttggtgtgctgcacccatcaactcgtcatttacattaggtatatctcctaatgctatccctcccccctccccccaccccacgacgggctccggtgtgtgatgttctccaccctgtgtccaagtgttctcattgctcaattcccacccatgagtgagaacacgtggtgtttggttttctgtccttgcgatagtctgctcagaatgatggtttccagcttcatccatgtccctacaaaggacacgaactcatcctttattatggctgcatagtattccatggtgtacatgtgccacattttcttaatccagtctatcattgatagacatttgggttggttccaagtctttgctattgtgaatggtgccgcaataaacatacgtgtgcatgtgtctttatagcagcatgatttataatcctttgggtatatacccagtaatgggatggctgggtcaaatggtgtttctcgttctagatccttgaggaatcgccgcactgtcttccacaatggttgaactagtttatagtcccaccaacagtgtaaaagtgttcctatttctccacatcctctccagcacctgttgtttcctgactttttaatgatcgccattctaactggtgtgagatggtatctcattgtggttttgatttgcatttctgtgatggccagtgatgatgagcattttttcatatgtctgttggctgcataaatgtcttcttttgagaagtgtctgttcatatcctttgcccactttttgatggggttgtttgattttttcttgtaaatttgtttaagttctttgtagattctgggtattagccctttgtcagatgggtagattgtaaaaattttctcccattctgtaggttgcctgttcactctgatggcagtttcttttgctgcacagaagctctttagtttaattatatcccatttgtctattttggcttttgttgccattgcttttggtgttttagtcatgaagtgctagcccatgcctatgtcctaaatggtattgcctaggttttcttctagggtttttatggttttaggtctaacatttaagtctttaatccatcttgaattaatttttgtgtaaggtgtaaggagagatccagtttcagcttcctacatgtggctagccagttttcccagcaccatttattaaatagggaatcctttccccatttcttgtttttgtcaggtttctcaaagatcagatggttgtagatgtgtggtattatttctgagggctctgttccattccattggtctatatctctgttttggtaccagtactatgctgttttggttactgtagccttgtagtatagtttgaagtcaggtagcgtgactcctccagctttgttcttttggcttaggattgacttggcaatgcgggctcttttttggttccatatgaactttaaagtagtttttttccaattctgtgaagaaagtcattggtagcttgatggggatggcattgaatctataaattaccttgggcagtatggccattttcatgatattgatcttcctatccatgagcatggaatgttcttccatttgtttgtgtcctcttttatttcgttgagcagtggtttgtagttctccttgaagaggtctttcccatcccttgtaagttggattcctagatattttattctctttgtagcaattgtgaatgggcgttcactcatgatttggctctctgttattggtgtataggaattcttgtgatttttgcacattgattttgtatcctgagactttgctgaagttgcttgtcagcttaaggagattttgggctgagacgatggggttttctaaatatacaatcatgtcatctacaaacagggacaatttgacttcctcttttcctaatcgaatactctgtatttctttctcctgcctgattgccctggccagaacttccaacactacgttgaataggagtggtaagagagggcatccctaagacaggaaaacattcccatgtcaacagtgattgcctttggaaaacgtcgacatgggtgaaatgttttttccttctttttacatggctgtgaatttcccagattttctttgaggaaaaaaaaaatagctattataattcataaagacttaaaaataaacctaagattaatgtagagagttcatcatttggtggtggaaattttcattcacttttaatttttttcatattatgagagtgatgcatgtttattgcagaaaattcctggtattaagttagcctctagcttcacttcactatgctacttctattttttccttcagtttatcagaaatcctttttagaaagagaagagctaagaatccatcaattttccattctttgtatttactttattctacattttttgcaacatcaaagcgaataaagaaatattaacacctggttaaaggatgttaataaatcctttctttagaattctttaaagaaattcttttttctttagatgtaaagaaaatatcttccctcgcccatccccacccagataatctgtgttaatatattatttgtatcttaccactctttctctattctcacaagaatataggggtattttttccaatttaaaaaatgttatatactaaaatattactcacttttttctsttaacaattcatatcttagatatgagacagggagatatagtaacttgaccttgacagtctgagcccttaactgctacaaacagctgctcctgacagaagagaaggctaagaacaaattcaagggaggtggtcagtgaagacctttttaagagaaaagatgacaaagggcactatatcctcagcgatttgccctgtgacttctaaactccagcagtagttgttgacttcacaagcctttgctgctgaagactctcgccccttcagaaagaggagcaaccttctcgtattacgtctcaggcatgctgaaggtgctctgaagatggcgtggttggtcagtgctttgggcataacccacctgtctaccttttggacattttgcctgataagtatggtgcatcttgtgtattttgatttataagtgttgctggttgttgactacataccgagcacccttctggttcttggagtatcaacatttcagcccacagactctcttgagttcaggcgattctcaacatcatgatagacaattttataaccgtgaaaaaaaaaaaagtacctatgtgccaactgaattggaacattaagtggctcttttaattaaaattcagacaggaattttagatttgttaccaaataaccatcgataatgccaatgaatagttcattctgaattgatcctaacctgtaggaaattgccatttataattcacaaatcactttcttccgtatctcttcctatctccattccattttcacttttccactctcatttcattaccatcattttcttgcctcttgatttaaaaaaaaaaaaaagaaagaaaaagcaaaaccaagaaaagcactttgttcattaactactgcattatgatgagaggtatattgaaattctgattttcacgtatataaatataatcatagaattggtacttgtcacctgagttccatttcattcaacaaacacctggggaggccaatatgtgccctgaagttcttaggagttgggaatacaaagagcacatgcagtctttccctggtaggaacataaatagattatagcattgtgtgcaaggtataatagaagtgtgggcacactatgaggaagcacagaaaagaaaatgatgagggaaggagacatgagggaagactttctggaagaagtgtttgcttagctgggttttgaaggatraataagagtttaataggccaccaagtggaaaaggaaagttacttgtggcaaaaaaccaaaaccaaccaaataaaaaaacagcatttgcaaagccacaaaggtgagaaatagcatatttgtctgccatttagtgactaatggagtgtggtgggcaaatgaaggaggaatgccaggtgagaatggataggtttctagaggataggctctaaccattcgagcatgattttaattttttttctttctttccacttgctatgtaccagacactgttgtgttttacaaataccgattcatttaatctttataacaatttaggcagatcgttgttctacagcattgaaataagggctgacctcaacaatctggattgactggttaaaaaaaaaaaagcacacacacaaaaacccatggtaaatgtcatattacagaactagactcaagaactttgaaatacatatgtaatcccttctccagcaataagtcctcatgccgaaaggagatttcggcttgattctggcgtaggtgaaagggattgctatggacaattactgtgcacctgggccttatgtaatttaacctcaacatcgtcctggggtgcatggtggtctccgtcttttctacatgaggctctgaaagatcaggtaagttacccggtaaagtgaaggtgatgaaatttgtttaactcaacatctgaggtttctcctttccacaccttccccagagaaggaccagagaatgccaaacaccaaaatttttcctcaaactacttcaacctagtacggatataggtaagatctatatgggtgctttcctgacaatttactatgtactgtggggaagagaggtgagagaaaaggctatacatatatcctctgggcacttggtatttaaaccatgtatctgatgacgcccattaaatgtttacagaagatagtgtgctctttccttctgaagctccattatgaaagagacctttagatgatgacaatctacgacatagactaccttgttccctcaaccaaccaaattctgatagattcagggcagaataactaaaattaagcagttctagaaaaattgggatacatggccatcatgcccttaatagtttttcttttaaattcaagaactttgaaatccacatccatagcatgttttggttttgtttccttggagttctatataccataccttggtgattgagcagcacagacgtatataacattctttcctcacaagttgcacttccgctttctacatcctccttttccatttcagcattcctctttcactccaacctcctctactctgattctcttatctggtattctcttatatgaccctgttacagaaaaaggggactggaacataactcgccttaaggatttggtgaataatggtgacctcatctgggatcccttttcaaagtatacaatttgcatttttttaaagccttgagacagtggtgtttatctcaaaggaatgactgttcaatggtagaacttccaatgctcttccttgagagatataacagtgacaataattactggccttttgtgctggtctctcctgtgactggcctagcgctaagctcttgcacgtgtggctaattctcacaacaatctgcaaaggggacatgatcatccccaatcagaaaaggaaactactgttcagagasatgaaattacataagctactcactaaggccaagggagattagagcctaggtgtgtttggtgtccaagccccaggcttttctggcactctgattgcttccctaaaaggagatgacagggtcctttagtccagtgagggtctgtttggtgatgaatggtttcctccaagtcctccacctggggcaggtgcacacattcctggtcatgaaagggaaaagaggtaggactctgcagatttctctagaacaagcaccccagattcctgccagcagagccagtcacttctgtggtctacactttgcccagtacccagggaggttttctgctattcacatagggtttcacacatagaaggattttctcaggtgaaagaaacagaaggcaggaccagggacccaggacttcctgtgacatctttactctgacctgcagcaatgaactgtttcatggtgagtggtctctacarattgccttcaggtgttagtttaagagagcagataaaaaagaaaagttaaaaagattttgaaggtttattaaaagggagcacttgatacacatcaagtccaataataatgccctacaaacctgtcagtttgtagtaaagtgacaagaagtagctgaggggaatccttgcccccatggtttatggttacagatttgattcactttgatgaatcaactagtttgaatgattagaaaaataaactgaaatctttgccctgattcagaatttccaaatgcccctgtaggacaaaaaagagtttttttcctgtgtctatttaattttgcaatatgcaaagtggtctccataaagcatcttgtcctgaatttagcagagctttcaacaaatttcatgacctgttctaattgaatgattaatgttatccatttaaatattgtagatcttttcttgtcctagctaaacttgcctaaagatagggactttctccattataaatgtagattcccaaacaacacttagaaatggaagagaaaaaaaagtgtctacaataaatattgcaaccaattaggcttcatcatagtaatttctccagttttgtaatgtttgtttactgggttttgtagggaaactgataccatttctgagatccagagtcataaagcctccaccctctcgttttccagcaatgaaaagttgtgagaatgggaaatattttcttccttaccacaccccccatgtcatttacaaattagacattcaaagatccagacccaaacatgtaaatctgtttgtacacattcaaagaatgctcttagacatttcctaaaaacccacacattaatattgcttacttttcagcaggggtaaatgagggtctcagagacctccttagaacaggctggagttaaagaatattgcatgtttttcattttactgtgatgaatgcaaagctattaaataaccttttaaagagttggtgtaattatctgtaaacagtaatgttacaaaaaaaaaggtcaagttgtcctgccattagatgtttatggatataaactggatttatgtttccataaaacaggcaccgactaactagattaattctccacaaactaaaccaactgtagtaatatttagacacaataaaatgataccaattaaaacaattttattttttgtgtcatattgattaatggcgcactaaaattaaccagagaccttaaactcagaatggttggcaaaaggcatccacatctcaatattattaccaacaagaagagcagttaagggagatggctgcgcaatagtatgaatatttaattaataattagtcatgtaatttctcctcaggaattattatccctcaaactggtttgtgaatttaattattagcggcctttttgtttccatgtcccctcattactgtcaggattgatgtaacataaacttcattaaaaattaaagcaagagtcttaattacaaggctaccctgactgaagttagaattagccaagtcagtgatgtgcaaatgagtgcattatttaagaaacatgctggaagtagttatgctaatgtagaaggttcgcagtagcagaccttttcacttgcagttgcatattcattaaatgcactatgcaaatttaatgtagcagtcttagtaatgcgttgttaatttattcagatttattgagtacgacttgtaaaaaaaagtacaaatttaattactgtatctagtagggatgatattaggagatagcagaggtttagaatgtgttgaactggattactgcagtttgatggaagacgtggtatcaaaggacacaattttgataactgggcttgaaagaatatttgatttacttatggaatgatctaagaaatcactaaaattgcacatgttccttcccaataggaaagtaaaaaagtctcagttgtattaacttaagagctaaagcagtgctgagtccacagcctaatggtcgtaatggctctacagagaccagtaaaggttatggattgagatccgtgtgaagcaaactgtctttgtggaaagttcattggtggctgcctgtgtctccgcagtgcgctgacgactgacgggtggaccaggtggagcgacaggaatcctccttgctctccagcggaaaggccttggcgcccctgcagggtgctatcttttacagtgggtggatgcttaggctcagggaggccaaacccaggaccatgtgaagaaattgtgttctttaaaagacataacagaaaccatgcctgcacttgacacccttgtgttgacatttctcgagtggacacgccggactgccctttacacagcttacctcatctacttcaatggaaaacctgccgtgtaggttttctcactgccacccccgccccccgccccgcccccaatttcacaggtgagaaaactgagactgacagtggtagaataactgatgcaggtggaagagctgggatttaagtctagcccagcgctcctcgcacagctgatttcagggttcctctccctaccctctgtttgttctgccatctctttcttcccccactgccttgacctttgattgctcccccatcctttctttatctcttttcctttgcttcagaattctttctcatcttccagctctctgccactatttcagcccttccttcccttcttctttccatttctccctcctcactgtccctttctttcttcccctccctttgtcctcttttccttttcctcccactcttccattgtcccttaatgtttcttcctttcactccttgatacacacataggtgtgtagatattatattattttattttattattctttttttaggtggagtctcactctgtcaccaggctggggtgcagtggcacagtctcggctcactgcaacctctgcccccccgggttcaagcgattctcctgcctcagcctcccgaatatctgggactacaggtgcatgccaccacacccggctaatttttggatttttagtagagatggggtttcaccacgttggccaggatggtcttgatctcctgacctcgtgatctgcctgcctcggcctcccaaagtgctgggattacaggagtgagccagcgtgcctggcagatattatttcacttttcagagacagggtctcgctctgtcgcccaggctggagttcagtggctcaatcatagctcactgaagcctcatatttttagactaaaggaatcctcccaccacagcctataatttaaaactggtaatggctggcatttttttttcctaaacaaatgctatacacaaacatacaagttaaattgaaataagactgtttaaaattcgacaaagcaatccgggacatgccccctacacccctcacattaagattggtggtgggcatggaatactatgcagccatagaaaaagaatgatatctggcctggcacagtggttcatgcctgtaatccaaggacttttggaggctgaggcaggtggatcatgaggtcaggagttcaagaccagcctggccaatatgatgaaatcccgtctctactaaaaatacaaaaattatcagggcgtggtggtgcacacctgcagtcccagctacttgggaggctgagacaggagaatctcttgaacccgggagacagaggttgcggtgagccgagatcatgctactgcactccagcctgggtgacagagtgagtcagactcagtctcaaaaaaaaaaaaaaaaaaaaaaaagaatgagatcatgtcttttgcaggaacatggatggagctggaggccattatcctcagcaaactaatacaggaacagaaaaccaaataccacatgttctctcttataattgggaactaagcgataagaactcatggacacaaggaagagaataaaggacagtggggtctacttgagggcggaaagtgggaggagggaagggagcaaaaaagataactattgggtactgggatcaacacctgggtgatgaaaccatctgtacaacaaacccctgtaacatgagttcacctctgtaacaaacctgcacatgtaataaaagttaaaacaaaaaacaaaagattggtggtggggaacaaaactgggagcattctctttaacccaaacctcagaaatcactgtgcatgtcgctgctagcagcttggctggcttagtagacccccacccatcttttaagaattttaagtttcttgttttttatagtcacaaaaatgagtcctgtgcatttttaatacaatttatatattttatcttggtttggaggggctactgcttcaaactggttaatcttttggagaaaaatcaatacacgttctactcagctccagcaatgaacaggctaaattattattaaccatgttgagtgcctggttctcggcgcccatctttggaggtattccaggctctctgatatattcaggcagtctgacctatacgtattgatctccatctgacagagagagaggttaaccaactcgccttaagataagcatatgaattgaatactgactgaaacttggtgcctatataaagaatctttctgaattattaattaatcagcatccaaaaaattaggtggcaaagcaaatgttcagggtttcctgtgtgaaccttttcatcttatgttccacaataagattgatctaaaggccaatcaatcaggtcccagggtgatctaactctagccacccctctctgctgctgtccactgctctgttaatgcgtgccattctgccttgggtcgtgcttaactgtgtgtgtgtgtgtgtgtgtgtgtgtgtgtgtgtgcgtgcgtgtgtatgcgtttctgctactgagttgcaaactgctgagaacacctgtaatttcatagcatctgctggaatttttgctgcaaaagtttggtattttggactaaccttacttgtctttgggtagaggtatggtgtgttggtaaatgcttgacaactagctctctaaaaaataacaataaaataaattatctttttcaaaagctctggtttgtagtgtttgctgatttccttggtattatgtttccactctatcaatttcaagttacaatgacaacataatgtcactaaatgtagagttgggaagagataagcaggcacaccattatacagtacatccacccactctacagataagatagatgtaaataatctcaagtgcatggataatagtaaaatgtagtaaaataaatagaaagtgattagtagttttgaatatttgttatatttgtttttgatgtaatttgtttaattgtgcatttatatagcttttaataatgtctaggtcttacaatcagctcacacaattcttcaacattaataattggctccagctcaccagtgagtagtgggaagaaaaaggttcattgctaagaacaccaccacaaccaataacaraaaaaactgagtggtactatttctaataaagtgatgttttattatttatattagggggaggcaacctgaccccaaaataagagtgtgagctggctcgtgctaagagaatatctgtratttcataatatctgctgggatttttgtgcaaaaagttggcaacttggagcagacagctttctattgaagaaggaaacgttttttagtgatagcagagatgtgagcatgtctacagcctggatctatgggacaaaagggaagagggaatcaataacaagttattctatatttagcaaaagaatgtatgtggtgctggtaccacatacaccaggtgcaatactaggtgctggggatgcaataaaggtgacctaagtctcctggtctggggatcaagggttgactccctgggaaggagaccatgaagatgtccagatgtaagggggagtagagttgggcgcagaacctggtcctgagcctaaaaagagctcagtctgggctgggtgcagtggctcacacctgcaatcccagcactttgggaggccgagatgggcggatcacaaggtcaggagttcaagaccagcctggccaatatggtgaaattccatctctactaaaaatacaaaaattagccgggtatggtggtgtgtgcctgtagtcccagctacttgggaggctgaggcagaagaatcacttgaacccgggaggcagaggttgcagtgagccgagatcgcgccactgcaatccagcctgggcgacagagcgagactctgtctaaaaaacaaaaaacaaaacaaaacaacaaaaaagagctcggtctgtctgctgcacagcgaagaagcctggtggctggtgtgcagttggcaagtgggaaagggctatatgacacagctggtgagtgtcggcaggtgccaagtgacccagtcccttgtgggctgtgttgagggtttaagactgaattggaaacaccttctgaggccatctgaagttaccccctagttacattcaccacccatgctggaagacccttgcgtatttgtcccacctgtgaggcagtaagctccagaagggcaggtatccagagggctagcgtagggtctagcccatcacagcagctgaagaaagctttatggaagtgaatgcatggatgtgtgcctgccctcatgcccccttacaggtttgagtatggggctcatgctcctgactgagccagacttgagacctgctggagaagctcaaccccagcacttccctgctgtagaggataggaagccaggagcagaaagtccttcctgggcctctagtcccagaggggagctttttaaggtcaacaaatttaactcgagtcctcatgggaactgtggtcactatgacagactcagaggagactgggcctgtggaggtgagccgtgtccckgggagaagtgggagctcttgcagcttggagtgtaggtgcactcccctatgcttcacctgttcctaaggtgtgtgtgggatgatttcagtctaccttaagactcttatgcccttcccccacgaattggctcttgaacctactgctgaaggctgaaattgcacctttgagaactgagggcactgaatcttgtgggatgtaaattccctaaactaggaagaaataactataataaaagtactttacatgtattgatctctgcctctatgacaggtgtcatactagcagctttatatgctttatctcatctactcttcagaacaataccatgacatagacatcgttattattcccattttacagacaggaacactgaggtattgaaaggctaaacaaattacctgagaatatttcattggtaaataatagagcagggaccaaatcaagtgtttctaatataaagcccacacattaaaagctgggtctatctcacactgtgctgccatttaatttgggggccagaggaggtagcaagaaggtcaatttgatccagtattcccaaatttccctgaggaacagaaccatgtggggacacttgttaatcatggtgctttccaggctcattctatggagtttagaactacccaactctgagatgaggtcctggagtttgtatttaatgtgattgctttcaagggagcttggaaaatgctagtgggagagaaagacctacatgcattgccctcaggrctgaagcatataaaatgtgggccctaacacctgatctctctgcaaaggaagaaccggttttaatctacctggaaatattaattcaaagattaatccaagaaatcaatttgtcaaaggcatgcgtgtaggcagggagaaggaaggaggtgaaggatgaccagaagacagcttactggtgagctgtgtagcaacagtacctggggacggatttgcccatagaatgtccagtgtatttgtcttatacaaattattcaattttcctaagccttggtttttttaatctgaaaaacagtgagaatactatcacagtgataaaaataagtgaagattaagtgagagctggcctggaacagggcagtggtgagagtgctgactctggccccatactgcccaggttcctgtcttaggtacatcactttctctctgtgtgccttcatgtgagttatttaacttcactgtgcctcaatttccttttgtgtaatgagttatgaagtaaaaataagacttacctcatagggttgttgaaaagatttattgtaaagtacttagcacagcactaggtacacattaggtgtactgataatgtctgctaaattactattacactgcttcgcacctgctaggtcctaatgcacatgatttttcctccaaatgatggaactgaacctaacagccaggtttctggcatgggatccttctacccactgattctgtagtcacaggtgaaaaatacacattggctcttcagcaatgattttagagaacacagcagagaccacccaagaattgtttcaacctttgactcattttgctcctgaggctgagatgtagggcgcacctatcgcactgcaggaagatgaggaaatagattcccccattgttatccttgttgagcaagtcatttctcctctctgagcttggtttcctcatttaaaaaaatattcctcccagctccgaaatcctatgattcaatgaaaaatgctccttgacctaaccttcaaatgtcggccactttgccggaaattcaggaagtgggaagaaatcaccaaggagattgggtcgttatgactttcttctcagcaactaacctttttacttaagacccctcagtcatgtcgatttccaaatgctcgtggctttgcttagcttgtccttctgcgatgatggtcttaatcataaattctaattggaacaggatccacctcaatttattcctaatgcctcagaaaagcagaactgtttctaggaataaattgagatggattctattccaattaacagtttgactcagtcaaagtgttgttaacccactgctgtcctctgataaccatccaattcatggatggcaagttgctggcctagccagaactagcaagaacaagagctatctaaagatagtcaccactttgacaggtgtagacaygattctcttctctccaccctactcctaaccccatcttagcwttttaaggggcaccatctgttagtttgctttgagctgtgattggattggactactctctctgaattgcaagtaagacgttctcatcttattcagacagatcctgtatcagtcagggttctccagagaaacagtaccaatagcatttgtatgtacatagagatttatcttgaaaaactggcttatgtgattcgaggggctggcaagtctgaaatgtgtagtgctggcctgcactacacacttctatgttacagtattgaggcaaaattttttcttctccaggaaacctcagtttttgcttttaaagtctccacttgattggatgaggcccacccacattatctaggataatattctttactcaaagacaactgattgtaaatgttaataacaaaataccttcacagaaatayctagactaatgtttaggcaccacagcctagccaagctgacacaaaaaattaatcatcatgagttccatgaattattttcacagaatatattctactgtattcatgaaatatgttgatgaaatgtacatttaatccccagcagaaacttgccaagtctgagactaggtgtaaagaaaagcagcaggcatgaggcattgtgactctcagggtctcccagtaccacccagcacagagggttcagtattgacatcagtgtgcccatgccacacccttcaccttgtgcctccaggtatgtttttcctaaggcaggagtcaagatgccttgctgggcaaaagcagtgctgctgcactttgaaggtccagttatgtcaggctcatagcaattcctaagcccgcaatgcaaaaggaagggagagtagacacgagctgcagatttctataaaccagaaggtaaatattcatgattaaacacccagcctggcacgcacacttgggagattttggccaacacagagcctcagaatttccatttccactgggcaaacaggaatatgagatggtgcaaaattgatgtatgaggaaagcagagcgattgggcatttacatctatttaattaaggaacacgttgtaacctctatttacttctgtttaattaagggattgctcatttcagagaagatatcatgctgggccttctactacttttgtgattcaacgcccaactaaggatgtatgggaaacrgtttggtgatcttagctcagtccctaatggtgagagcttcatattacaaagccaataaaccatgctgccagacttgcaaaaagagagtcaagggacttatcaagaaaatgatctcttcaagacacaggaggcaatccatgaraatgtatgttattctaraataattctgatcaaaatttagaaacataatgaattccttgtggaataaccaaccacatttaagtaggaaaagaaagagccaaggaaaattaatagagctttacaggctcctaaagtatatgaaattagttaacatattggtcaaacactaaaaatgccccttcaggcaatcaactgaccctgcccagacagrggcaaaaatggttagacagaacacagagaatgagggaattcatttttctatatacatgacagctgctgtcttactggggtgttgattactttttttctcctcaaagaaggtgtttcagaactaagacaactcattatttcgtctgacatttcatcatcctctctggaattgccctgagaaatgcctccagagtaactctattcttctaagtcctttgcatcatgactaaggagaatgcaggaagagctatccaagaaagaaggaggaaatagccagtaattctagaaggcgtagagtggagagaggaaagtttgagatctccatccatcttattggcccctggatatctagctagaccccctctctctattaaacatcactaatgtcctattacctggctaacaggataaagtaattcgtgggtaccagcctccttggcatcctctctttatccccaggaagcagaagtgccttttaagagtggtctcctgaagataacactctccatcctcatttaactcaaagcaaatgatggaatgacacaaggtgaaatactgcctttattgctggttccttttgagcatgtctagattttaactcttctggaacaggggccacaccttatatgtatatgaagacctcctggcatcttaccagggctttgcacattgtgagcactgaattaatacaaaaagaatgagtgaatgctttgcttctgtaaagctgacttttttctctttcttaaactcaccatacatttttctctcacttcctggaatgcttccctactkgctcttcgccatgtagccaagtcctagacatttgccaaggtcaagaacaaacccttccactttcacaaagtcttccagactyacctggccctagcaagaaatccacctccaaagacctgcatccctgatgactaatttttaacatcctkgttggtaaggaggatgtggtgtttattagttgtcttttaaaaatatgtcctatatctccaactggatgccaacctctgygtgtgaccaatctctggatacttcccactccacattccagcaaacacacagtctctgtggcatgatgcctggtccataatgggctctcaatcagtgatcatgattggtgatgggttcgatggttctctgacaggctgtattataggttcctcaaagacaaagacccatctcagcttgttcaatattaggttaccagtacctattacaggatatgttcaaaaagtatttgctaaatgaactgttgtgtaaatttatgtttgtgatgcaatgccttgccacaagaatctaatatcatgccatgaatgcacgtcagagttactggctcatagtatgtcaggcattggaggaaatagctatttaaggacataacttttcttccctaaaggggaattgaattgaaactaatacatagtgtctcaagacttctgagtacagagtagattcaagaaactttttttgyctgttacctgaggacaccaggctggatgtggcaagaatgaagaggtaactaagactcagtccataccctaaaagaacttaatgtctagtagtggagttcatcaaggaagcaaaaaaagttacaaagcagaatatgatatgttttaagaaggcaacaagcgtagctcatgcctgtaatcccaacactttgggagaccgaggtgggtggatcacctggggtcaggagtttgagaccagactggccaacatggtgaaacccagtcattactagaaatacaaaaattagctgggcatggtgacttatgcctgtcatcccagctacttggaaggctgggacaggagaatcgcttgaacccaggaggcagaggttgcagtgagccaagatcacgccattgcactccagcctgggcgagaaagcaagactccatctcaaaaaaaagaataaataaataaaatttaaaaaaaaaagcaaagaacagtgaaggaataaagcatgacaatagtggtagctattattttaggtttgggttatggcagcacctcacctatggtatcaatttctacatcagttaaggttaagytaaactgctataaccaaatgaccaaaagagaaaatggctgcaaaaatataggccctatgttgcccaggctggtctcaaacccctgtgctcaagtgatcctctcaccttggcctccctaagtgctgggattacaagggtgagccaccacacctggccctactcatctttaaagcccaactcaagggtgaccacctatgagacaacgtccctggttctctcttttcctttcctcgcctctatgcccacagcactttgtttgaaatgctgggaggacattccatagcatatttcagttagttgttattccatactacatcaaccataaactacttaaaggcaaggacaaggtattattcatcttcattctttgttcttggtccacacctggcatggarcaagctgcctgtaaatagttgttgaattaaatgagtgtctgttcctgggtccaacacactccctgtacttgagggagcagagccagttgggtgaggggagaggtgtttctgatggcagcctcttctatgtaattatcccttcccagtgaataatggggcctcagctctgtgtctgattctttgatgaaggtgaaactatttaatcaggtttggttgctcatctcatcatcttcccacatcacgcccttcctgacgagctcattagctggaagaaaaattgatgacctcgttagttctgcacagtggttcacttaggacaaattggagcttcagaatgttgctcaactctgacccatggtgggacaaggtctcatgctcaggattgtttggatacaccatgcccttggtgcctttatgtgacagtttgcttggaaactttctgcttgaaatagtgtgttttccaatgtaaatattcaccttttaagttcctcctcattctgctcagtgaggagtacaccactccctcacagtgccaaggctggatttaccttctctacaccccaacccccacctcaaattctttgtctctctcacccactgaaatcttatcatcctccaggtccagtttactttctgtccccctcttcatccaggaagtattctttatccaggaagtgttcaatgacatccttggggacataatttagttgaatttggaagcagcacctgttgggatcgcaactaaaggaccaggggaggaggaatgattcaggaccatggacagaatctgagacagtctggctgtggctgggactgctggcccctgtaagcttggccaagaattaaaatactgaatccacagaagyggaagatgtggtcaattccagtgctgtccaggggccccatttcattaagcagagcatggtggccagaggaggcaggaaggtgagtggtcctcggggtgaggggtagaagttgaaggattgtgagcctagccgatgctccattccttctgtctcaattgttctttcttcctctctagctttactctatttttctgacaaactatttggttttcaaaatccagaaaggctgtatttctctagaaaggctttcctgccttcctccctgatgttaccagccactcctatctctgtgttagctcttcatcctgaacacgtttaatgctgttcttggcacacactgtgttgtaattattgattgaaaggcaggtttcttctgcgttccagagtgctcttgaaagtacagattttgtttctttcatttctgtatcctgtatgtgctctgtgccaagcatgagcctgctatctaatagatggtaaataattatctgttaaatgaaagaatgagtgaatggtgggcctcccsctcgcaggtatggggtgtgctcctggaagaaggagtgagcataggcccaataaagcctcaagacccctgctgattggctgaaagtccaaggcccagctttggtaatactggcagagtggagtgtaatacagagaaactgaggcagaaggtcaatctcacagcctgaatcagcactgtatcttgtaaaaatgtcaacttgggttttgactgagtggttattaaatgtttttgacccacagtaagattgttgacaccaattcggctgcttctttacactgaggaactgtttatactgggttagctcctaaatagcttttctttttcatgttttccacttaaaaatggctttatatgctgcagcacacagatatatggctcgttgcagggttaaacccagacatctggcacatggcaggcttgcctggggccagttccctagggccatgcttgtctggagaggagatcagacaaaaattgtttgttcataagaaacaaaaatcaactyaaactaatgtaaataaaacagtgcaggaaagtctcccagatagtcactgggatggctctggtgacacaactgtcaaagtgatggacttccattctggagctctctattcacatgccacacctgcacatgactgcttctttttgcccaagttcctccttcaatgtcctaattctgaatttctggataaaggctacatctgtaagttagcttatcttkgttcaagaatttatcctagatccaagagtggaatctcaaagtaaaagaactgccctcctaaggattatgtaagattatcctagaagaaaagatgagaacttctctacttgcaaggaaagctcatttagaaaccgtaacttagacctgagttaaaagaaaggagctgggaccaaggggggtacaccaaaactacctaggagaacaagagcttggcaaaatttccagagaacagtaacaggttgtgcagtaaatatggaaatggcttcactttgtgaagtgctcttcagtttagagagagtacattcctactcactgaatgcccagtgagttccccaaggtcaggactgcgtctcatccaaatctgtatcccttcacatccccctcaccaggatacccactccattacaaggtaggtgtctgtcagatagtcaggcaaatgaaaacacttggtccttaaggcaatcctgtgaaacagacatgacatagcattatctcacctgatggtaaaggaaacggaagcttagagtagataaatgacatgcccaggattgtgaataatcaaaacagaactcagatacaggacttttgtctcctggtaaagtgattattccatgatgccataagaaaacatgaactaaccctaaaaaccagaaaatgtgagggagggctgggtgcagtggctaatgcctgtaatcctagcactttgggaagcctaggcaggattgcttgagcccaggagttctagaccaatctgggtaacatagtgggagcccatctctctatatataaaaaagagaaatgtgagagagaacgtagggagggggaataactctgatagatattactgttttgacaagatgctctttaacttcatttcaacccttatgttgtacacttagaatttaaattgtaaacttctacagcaaggactatgctgtcatttttttctgggtaaaggtgtcctaaaatgcctgtaaagcaagggcaggagcttagtttcattaaggcaaatctgccatccacctttccctgggcttgttacaaagatgcctctttaacacttagcaccagagtgtgacatctggttgcatagctttctagggaatttcagggactttgttcagtgccaattaagcccacctgttctatctcccccacaggagctggaacaggcaaaaagggttaatgtgcttttctaaagcaatactcccccagcacttatcaaatgccactctcacttcttcctgcttccacctaaaaatgttaactaggcaggaaaggcttgacattgacagagaggaatcaggactccattttgacaagctgacaagtggaggaaattcatatattatatggctgggagctatggctttctctctaatttattatagtggttcttatccatagstttcccctcccctagaaggacacccatgttcctgggcaaaggtaggaggcctgaagcacctttacatcctgctttggctgtgatgtttttaacaagccattgtcctggatccctttcgtagtaaaggctgtgtgttgctgggtgtcctgatctcttttcccttccaccctctcaggcattctgggctgttctcctgccctggagagagtttgctctttggacagagcacaaaacacccactgtgtatgtgcaccatgttggctgccatcctgagtatccatgtttcctgaaaacaaccttgagcgtttaactgcactcatatcccactctggactgctctgtgtgactttgcctgtcaccaaataggatttggggcaagtgaagcttctgtccccaaggtgtggagaactgttgctctgatctgcgattaggtttaaattgaagttacaaaacttcccttcttagtctgttcagactgctataacaaaataccataaatggggtggcttataaacgataggaattatttatttctcgcagttctggaggctgggaagtccaagaccagagttccaggagatttgctgtctggtgagagcctgctgtctggtgagagcctgctttctggttcagagatgtcctcttgtagttgtgtcctctcgaggtggaaggggctagctagctctctagggtctcttttataaaggcactaattcccttcatgcgaatcctgcctttatgacctgatcacctcccaaagacgccctgccttctacgccatcactgtattagtctgttgtcacgctgctaataaagacatactcaagacagggtaatttataaaggaaagaggtttaataaactcacagttccacatggctggggaagcctcacaatcatggcagaaggtgaaggaagaccaaaggcacatcttacatggcagcaggcaagaaggcttgtgcaggggaactcccatttataaagccatctggtcttatgagacttattcactatcacgagaacagcagggtaaagacccgccccatgattcaactacctcccaccaggtccctcccacaacacatgggaattatgggagctacgattcaagacaagatttgggtgagacatagccgaaccatatcaatcaccttcaagactagtatgtcaacatatgaatttgcagaggggcacaaacattcaaaccatagcccttcctaagacccaagaaaaaaggcagtggcagttagtgtaaggaagcatgtggaccggaagtagtactgaaagaagaaagccaccaagaatagaggttgccttaggagctaggcactttcccagtttcccagtctgatcagtttcgttcgttactgttgcctacaaggtacttcatgggattacctgctagctcatagatgaaccacctttgcgtcatattcttatttcttgtccastctgggtccacccctggacaagaaagagtccagcactgcctctttgtttagggggctggaaacagggaaatcctagctaacaagtgacaatggtatgacagacaccttaattgtcatgatcagagtagacagcccatgactcatgcagacagccagtaggggagaggtgtagttgaagaaggccactttgtttgccggtagatgccatatgagatctgggacttgggtggacatggctggcccataatgtaactctttatgctgccacaaaatagctgtagaatgctcctctctcttccaaatggccattgtgagtatttttggtaattcctttccccttcaagcctgccctttctgctcatttttagatcttacatctaataattatagtacctatctgcttttacttgtgcagctttttcgtctcctgttttgatagtacctcctagttttcctttgaggaaccacctcccacttgcagtccgtgtgctccaagaggagctggtcccattcccatgtccagttggttttktttttgttgttgttgttgttgttttaaattttactctaagttctgggatacatgtgctgtatgtgcaggtttgttacatagataaacatgtgccatggtggtttgctgcacccatcaacccatcacctaggttttaagccctgcttgcattaggtgtttgtcttaatgctctccctcccctttctccccaccccccgacaggcctcagtgtgtgatgttcccctccctgtgtccatgtgttctcattgttcaactcccacttatgagtaagaacatgcagtgtttggttttctgttcctgtgttagtttgctgaggatgatggtttccagtttcatccatgtgaaactgtttcaaccatgagttcaaaggacatgaactcatccttttttatggctgcatagtattccatggtgtatatgtgccacattttctttatccagtctaccattgatggacatttgggttggttccaagtctttgctattgtaaatagtgctgtaataaacatatgtgtgcatgtgtctttatagtagaatgatttataatcctttgggtatatatccagtaatgtgattgctgggtcaaatggtatttctggttctagatccttgaggaatcactacactgtcttccacaatggttgaactaatttatattcccaccaatagtgtaaaagtattcctatttctccacatccttgccaggatctgttgtttccagactttttaatgatcaccattctaactggtgtgagatggtatcacattgtggttttgatttgcatttctctaatgaccagtgatgatgagcttttttttayatgtttgttggccgcataaatgtcttcttttgagaagtgtctgttcatatccttcacccactctttgatgaggttgtttgtttgttttttttcttgtaaatttgtttaagttccttgtagattcagatattaggcctttgtcagatgcatagattgcaaaaattttctcccgtccaactggtttttgccatgtgaggacataacaaagaaatggcaactgcaaaccaggaagaagattgtcaccagacaccagatcggctgacactctgatcttggacttcctagccttcagaataagtgtttgtggtttaagccacttaatctatggtcatttgttacagcaacctgaactgataagtgtagacatcgagaggggagtctccctgttaaaatatatctcactggattccctgtttgtatttaggctccaagagtcctggtctcattgcctcaaaatcyagattgtttctgacgttgtgactggtgtgacatgatgacccagagctgcctccaagcagtgtgacttctattcttcaagtggaatgcagaagcaattagtcttaggcttgggagacacatggcctcttctcttcttttccttaagaatttcttttttcttggccttaaaaatggcaggatctagattaggggatgggtcaagggggatgagggcaaagagaccacctggccagcgtggagtctggctcatgactctaccagctcagttgccacaaggccttctctcctctcctgttccattgctcggactccttgtcaatatcctagtggcacagctacatgtgagtgccactctgctgacagtgcaccttgagaactccgacatctgtgccagggcattcctccccgatgcttccaaacctggaagatttttcctctccccaaccctgcactttttttgtctcccaggcctcccacagcattgcttctgctgagagctcctttcactcctggccccactcctcccaccagggctgaaagccaggggagggkgttggggaaaaattggcacaccattgtctgcatttctctcctctctcttgcctgtgtaccaaaagaaacacattttttttaaaagtcccattttttctccttcagccataataagccacataaacaaacaactcatgtaaataagcagccaaagttggttctcaggctgggatcaggcatagcagcttgctccctcatcccaaaaaacttcaacagcaagcagcctaggagcttgaagaaagtatttactttttagttaactacagcatccacttttcaaatttcaaaacgcttacataagttgcttattgttcacttgttaacaaaggaatcttttctacatcaaggcgagttctctttttcagctgtgagctaatttctctctctgctaaacaatgattccctgctctcactcactccctctcctgcttacagacactattaacatcccacaggaagtggtgtttgtacagtgctccttgattaacgaatccccagggaatgagccttctttataggatatggggctgggctcaaaaacacttcataaatcatgcagcatgagctgtccggactggtagcggcttgccggcaaccttcggtgcacagccactgtttggcacgtctgctggaggaaaacgagtaagagctgctcacctgggaggctgctctctgttctcacactttgcttttctgcctccttccatatctcataggtggggagggtactcattcttgttcctgctccttcctgctcccttgtcaatctcttcctcttccctatccagatccttctgttcccctcccccyagtcctcccctgccccatactgcaagaccagggaaaaacgaagctaatttatcctgaaggtttaactaaatgaagcatttgcagtttaagctgaattggagaaaaataagactcagccctgctaaagtaatcccaggcrccagttagatttcagcaaacacgtagaaagatatttcaggaagcaaactagcatgaagactcatcaactggccaggtgcggtggctcacacctgtaatgcctacattttgggtgggtggattgcttgaggtcaggagttcgagaccagcctggccaatgtggtgaaactccacctctactaaaaataaaaaaattagccaagcrtagtgacacacagctgtaatcctagctactaggatgactgaggcacgagaattgcttgaacccaggaggtagaggttgcagtgagctgagattttgccactgcactccagactgggtcacagagtgagattccgtctaaataataataatataaaacttcatcaactgataattaatgcagattacaaaaatttagatccttgtcaaggtcgctgggtggggctaggagggctggttcaagatgtcttcccctctgacctttgtcccttgtccagtggaggaagtccaaccgcaggggcagattttgtggggcttgaagaaagcttacacattcttgggtggggtggggtggggaaggggaagggccctgtgaaaaaacacaaaactacagacacaaaattaggcatgagtgggtatatacagctaaccctcaaacagtgtcgacccctgtgtaatacaaaaaatccatgtataactttygactccccagaaaattaactactaatggcttattcttgactggaaccttaccgataacataaacagtcaattaacatgtattttgtatgtttatatgtattatatactgtattcttayaataaagtaatttagagaaaagaaaacgttaagaaaatcataaggaggagaaaatgtatttactattcattaaataaaagtggattatgatcatcataaagggcttcatcatcactgtcttcttgttgagtaggctgaggaggagggagaggagaggttgatctgctgtctcaggagtagttgttcatctgtgagttttttcaaattgtctcaagtctccaaaaaattttccaatacattcattgaaaaacgctccacatataagtggcctgcacaattcaagtctgtgtttttcaaggatcaactgtatttatttagaataacaatataaataaaaataagcaacaaaatgttaaataccaacaaaaaccacaagcgtcacattgattaagctcatcactgtstgcttcatgtgtttctatattttctccccaatatttgccagctgcatacattttcattgccttctcaagtgacaattttgtaatattttctatatagaaaccacagagataattcagtctttaatatggttggtagaaagaatttcacttattgtctattttgaatttttttatctttataaattataattgataacatcacatagatttttagtattgtatktatttatttatttatttatttatttatttatttatttatttgagacagagtcttgcccggtcacccaggctggagtgcagtggcttgatcttggctcactgcaacctccgcttcctgggctcaagcgattctcctgcctcagcctcccgagcagctgggattatgggtgcacgccaccaagcctggctaatttttgtatttctagtagaaatggggtttcaccatgttggccaggctggtctcaaactcctgacctcaagtgatccactcgcctcagcctcccaaactgctgggattacaggcgtgagccactgtgcctggccttgctctagcatctcttgctctgcatctttataagccagcaaagtgagtaacagtagcattagcattcctgggtagtagcattcctggaagacaaccctataccaggatggcaagcaatatcttaactacatagaagagaccatgaactacattaatatgatccacagaacccaacttaaatggatctccaaatcaacttccttttagctggatcccccaagatgctcgtgaccactttaacaccacacatcatgaggggcagtaggatacagggaaaattaggttagaaacagtaagtgacttaaccacttgttatgcaaatgttacaagcacatatgaccatgggaacaaattgcaagagcccctcacaggatcttggaagggattttgcaagtgagggccctcaaagcttaatctttgttagcttcacagctaatcagccgctgcttaggaattgtgggatgtgggtaaaccaatcacctgcttcctccttgacctggaagccccctgcactaatgtgagtcagccaatcccttcctccagactgccaggccccacacggcctccccaccatcagacttctctgcctgagcccagatcaggcctccctcctccatctctcctgaccttaactcaacactgtttcctctcctccaagaayaccaggtgcaatttttttttcccatttgtttttattttcgggagtcatcagttgattttttttacattgcaaaccccattttatttctgtcactattctatctatcctatattctgcctatattaattctgcttctagatttgtttttttttttttttgacaaagaagttcccccaaaatgcatcctgtctgtttcatggmtgcattactttgtggaaatttagtagagctcttggctcctgatgctagggacctctgttttgctattatcccatagggtcattatttatctttgttttttgtttgtttgtttgtttgtttattttttgagacagagtctcgctctgtcgcccaggttggagtgcagtggcacagyctcggctactgcaagctccgcctcccaggttcacgccattctcctgcctcagcctcccaagtagctaggactctgggactacaggcgcctgccaccacgcctggctaattttcttttttgtatttttagtggagacggggtttcaccatgttagccaggatgctctccatttcccgacctcgtgatccgcccgcctcggcctcccaaagggctgggattacaggcgtgagccaccgcacctggccttatctttgttttaatctgtctctgactgaacgattagtgcagtgaaagagtcaggagtcttgcagtttcaagtgatgtatgtctcaaytcaacatagcttatgcagaatggaaaaatggttgtggttcatgtaactgagatgtccaagtttggttttgactacaaacacagtaggacccaagggcataaacagcattgccatctttttctttatctcttggctctgcttctcccgatggggtggccttactctcttccactgtagatgcgcattgaggtccacagttacctaggcactccaggcttacattatcatagcccatgatgtaagagggraaaaaaaagtctgtctttcttggtgtgttctattaaatctcatgaaatgactctaattagctcagtcttggtcacatgcccttctcttggcctaatctgaatagacagggtatggccagaccatgctcacttgcctactcctgtcttcagaaagctgggcatcacaattggcacttgctcttcagcactgataastggagtgcagagaagtcccccaaagaaacagggcggcatcctagacaaatcaaaatgacatacatgccctactcataggtaaagctaaatgctattgacaaatggaaatgttttcattaaacttcacataatttatttcttgcttccctaaatctgcaattttatttcatcattgtgaaagtcatttaaaattagcctgacatacagaatctttggtattctattatatgcctacatttcaattaggtccttgttgtaggtcagtttcccrggaaacagattctgagactctgagatttatgtacagagcagggaatgaaggaggcagaatcgggcaaaggagaaaggtaaactgccatgtagtgatattttgggagctttggaacatggatggtccttcagcattgtcccaattgaggtaaggaggttatagcctcctttgaccacctttgaatggcagctgccccaaggagcctgtggctgatgacagtttctggagaggactcagctgtgagccatcagtagccaacactcccagcagctgggaaagtgaattgctaggtcctgaaggggaatttgagtagcataccactgcatacacttcggtggattttcaaacagtggaaacaaggctcatgtaatcctaatatttaatttttttttttttgagacagagtctcgccctgtcacccaggatggagtgcagtggcgtgatctcagctcactgcaacctccgcctcccaggttcaagcgattctcctgtctcagcctccaatgtaactgggattacaagcgcccaccaccatgcctggctaattctttgtattttttttagtagagacaggatttcaccatattggccaggctggtctcgaactcctgaccctgtgatccacccacttcagcctcccaaagtgctgggattacaggcgtgagccacgatgcctggccctaatatttaaatattaaaggccaagtgtgggcagatagattctcatatatgttatcayttatatgtattaaagtgatataaaagaaaaattttatrtcttttaatatttttcttttaatactgagtcattcastttagaatctgtattttaaactctttcttccagtatgataaatgttctttgttgtttccaaatgcatgatgtaaattccaattctgatgtagcctatagaatctctataaacatgacttaaagatacaaagcaggccagtgtttatgttgctgtcttgtacgcagacctggaacccctgcctgcttggaagagagctaaatgtatggtagtccctcaaatcttgggctttttcagaccagggttggcaagataactgcactcaagactcccctatccttagtatgctttcctttcagcctcccggccttcctgacagctatcagcctagtcaattggacttggcaggtgcgaggaatccaatttagcatccctggtttagaccttgagcaatctgcactcacaattcacctacttagcctctttatccacatctcctagtttttgacctgttttggcactaattaccctcatccccccaattttagaataagaggcctttggacttgttcccttacatcaaatcctgggattkactcaacatgcaggttggattttcctccagttggcccatccaattataggcagatctcatgctgtctctgcaacactcttgacctccctaccaacatttctaatcaatcaggtgacttcccatttgagcggagstgtaaatgtgtttaaagcagggatcacatctggcattccaagggctagatctgttaagcagccaagttttatttgcctataccatgttttaaaaaaattgagccaatattcaacaatttggaaatttcatccacaataaaatccaatttctctcttctcttaaaaaaattggatgatccagcaatgcaaacaagcatttctacccagcaacacttggctgaagatgaagaactactgcctccagctcacccagttccacactcacagttgtgttatgcctgctctttccagtcacttgtgttgcctgcctgggttctgcagtttacaaccctggtttaaattagtatccctcccaggtgatacttgacatccagtgcaagttattggcagtaaagaagggccaaaagcctgatgcaatcaaaggagaggtaaagaagaaaatcaaaccctgggttttctataacatatttccagatgcagaaaaacaaggcttgtcttctttgctgatttcacagaacaaatggcattccatctgtgaaatgcactgtggttttcagcagagacagtccagagtgaatcatttgtaacctctgccacttgttacatatctgttaccaaggagtagactggggaaagtttaggaaactacgtggcatgttccgtccttctgggttatggatgctgccaagtgaaaatgtgagatgtgttgccaaagacaacacagtctttyatttgacacagaaaaaagcaacattctgatttccctgtcttaagaactgtttcctctacaatctggcaaggcatgcttatggaactcatggcaacctgctccaggtagacttttttcttattttaaggcttacagcagatgaagagaacacaggaggaaaggaattaaaaatgaattgcttcagagtagcggaggtactactggtgatagataggtgggaaaaggtgaatgggtttcccagtgcaacgtgagaaatattattttgtttatactccctatcaattttaaaaaggaaaataccttcctctggctcttattaatttttaaaaccaaaatacctccatccagatattctagtttaagtatgtcttcaaatcagttataatgttttcctgctttaaaaagtgggggttggggggacacgttaaactacagaagcatagttgtcggggggtggaggactgtcttccttgcaggattggggattaaggggctgatgcatttgcagacttcattatgttaagtactctgcttagaggttggttcaatctctgctccctccaccctacccccacgccttctcttggcacattacttcttgtaacatacatttcttaatttaatgagttcattagtctgttatagcttttccatagctagaattggccagagcagtgatgaatggtttatcaggaaagtagctcaagggtaggccttcatagatactgtgcagtaccttaatcaggaaatccaaagggctgctggtggggagggggagggaaggacatttggatcacgggagaatttcttcccctgggtctcctgattcagaaacattaaaaaatctaatgcagctttattctccatcctcctttaagctctaaatatctgtcttttgggcatgggctgtaatagactagggctttaggaccagtttctctgagaatcagccagtgttcaagaagggcccttgacaccattctgacttaatgctagacacatctgcagctacttggacaaaattgacattgtctggagtgcaaagcaattgcctagcacagcattagggagcatttactcttgagccgtgctaccagacagcaaatcttgacctttaggagttcagagattagatttcgttgttgcaggcgttgaagatattgttaggaatttcttgctattcaaagcagatttcaggggttacctatgggtttaattcatcacatcaatcattttttggaaggttcttttaaagccaagatagcttcaaataaaaactaggattacttttacattgattgtcggtagttggtgaggagcaaagggggaacactcttgagatgctgttaaagttttcgtatttgttcctttgctagcaggcattctgtggtattggggagaaaggcatgtttctccaataggcattcaaagcagttgctgcaggaacaggcaggaaatgagaataaggatttgactaccctctggtgtagatctctcaagccctttaacacmttcagtgcacagatctcctgcgggttatctcaaagtgcatcgtttaaaacaagacctgtttaagccaataggggttaaatagggcttattttgtwgaaccagcctgtataggtacccagtcccaccctctgtttgtgtatgggtgtgtctctgtgtgtgcatatatagaatgtgcatgtgtgcacacatgtgcgtatggacaacttcttttatttggaggtcagtttcccacccctcttgatcccaaaggtgtacggaaaagatttctgagggtctctgaaaaggaagtgctgtacagtggctggactccagccatgtgcttcttttagaagactttcacaatgatccttactgatttttatttaccttgcaattgctattcagaatttttactcagttctctaatccatagtcgatcaaataccttgagaccttatcttcattgtatctgttcacctctccaaatttgcttcttatttctcaaagagggagtttgcactagataatcctatagcactgattttattgcagctagaaggtgataggagcacttttcaaggtaggtgcagtagcaacaaaagaaacaactagagcctaggaagggaggggttgcatactctagcacaggtagcgagctgccaccccatggcataataatggggaactgagacatcaatgaatggttacctgcaagtcagcatgtttagcttaaaaagtcaggataatgggtaattattgtaaagtacattttagaaatatttttcgctagaattgtcagcatttaaaatttcattgctggaaagaggaagctccatgatcaatcataactccacagtaggttgttgcttgatgcggctgaatatatgagtctcgctctgtcgcccaggctggagtgccatggcacgatctcagctcactgcaacctccacctcccaggttcaagcaattctcctttctcagtctcctgggtagctgggactacaggcacctgccaccacgcccggctaatttttgtatttttagtagagacagggtttcaccattttggtcaggctggtctcaaactcgtaacctcaggtgatccgcccagctcgccctcccaaagtgctgggattacaggcatgagccaccacgcccagccgagattctttcgtgggaggtgcataccaggtgatgcaatgcactttgttgctgatacttcaacattgtgcctgtgcagcactctgtagaacttcaatgaggcaatgaaaaagaacccagttctcttccatyccaatgaaagatgcaattcccagggtattctccctgtcttttgcacaagacttcctatatgccaggcataacacctcatgaggtagcccttattgcctattgggcagagaggaaaaccaaggttcacaaagttaagtaagtcacctaaggacacataaccaccaaggcacatagctggaattcaaactcagttctgtctgatttaaaggtttttgctggcatcgctgagccaagcatggctcccacgtggctgagtaaactgagatacattcagctaaccggccttgaacaagttgcagaggatagccagagcacgtattttattctcagtccacttgcctttttctaaaccccacttccatcactctatgtagattccatctatattaatagccactgtgaattcataatttgccaagtgtaaatacatatgcatgcacaaatatgtgcgttgtaaagaatggttactaatcgcctttgctcccatggaaatgtatccatatgtgcattataaatatggctgagaatttctaccaggtttcagaaccagccctatgtagaattgttgatgctgcctatctgcgaactttctgcagatagtgatttccaggggagtgatttacttcccagcagacgctgagatagggctggatctcttagaattcatgggtaagaatgctgtttatttacaagacatgcagccatgaagccgctagagagtggataaactgaaagaaggtaattgggctgagcacaatgctctggaaatgagaaaggagtgaatgagctgatttggacttctttgaacttatttatgttaaaaatatttttattaaaaaggcaatacatctttattgtacaaaattgkaaaaagcaccaacaagcaaaaagaaataacattcactcacagttctattgactagagayagcaaaagcaaagaggttgggatatatccttccccatgtaaacctatgtggcttgcaaaaggattataatgtatattctgttttgtgaccagcttatttcacttaaaaatattgggatgacctttccatgtcattaaatattctacaacatcattttctatagctgcatggtaacttactgaatggatgtatcattgcttacgtttacttagtttaataacttacctaatgtgtttctatccacacaagatgaatggaagtctttcaatactattacccaaaacagtgttcccaggtcctgtcctccctcttcatgactaaatggcaaatgaaagcctcagatgacatcttttcaagccctcatggcaggccaggctcatggactgtgtaagataatatttgagcatgttcaaagaacccctgaaataagcccgggactgtggtgcttcccattccttccactcatggaataatcatcccttgtgtttcaaagtatctgtggttccagagtacttcctcctgtagtccaataattaccactgggtgctgtggtcattctaatcctccttccagaagggaggtgactgagtctcaagaagctgcagtaacttagcaaagatcaccccaatggtgaatctcagaactacacctgaacccagacttgtagattccaagttcactggaatttgtcctccaatgcaatgctgtgtggaagggggagaaaaaggaaagaacgaaacaaaaaaaggaaaggaaggaaggaaggaacaaagaaagaaagaagaaagaaagaaagaaagaaagaaagaaagaaagaaagaaagaaagaaagaaagaaagaaagagaaagaaagaaaagaaggaaaggaaaggaaaggaagggaaaggaaaggaaaagaaaggagggagggagggaaggaaggaaggaaaagaaagaaagggagggagggaaggaaggaaggaaggaaggaaggaaggaaggaaggaaggaaggtaggaaaatgataggtatctgtggctctggtagtcagaggggcaggtagggagggcaggaggttttcccagtccatcctgtacggacctgtctgtcttccacctaaaaagactctcctctcagaagtcgaggaacagagatgagcagctttttcaggtacaagcttcagaatcatagatctcaaaagacgaagctatttctctcccacttttgcagccaccaaataatcaactgcwtgtaccatctgcatgtattggtggttwtctcccctcacctcacactgtcctcaccctgctgtcctcaatatgaaaatgtttctggcataaaatacacatgttctatagatcagagcctgtccaagcagtacaccctgctgtcctcatcgcagggagacacctggatccatcctcactcctggagggctggcctgaacaacagtagttccctctgagctctgaggcctcctggaaccaggcacacaggcaatgggcaaaaccttcaaggacagcaattttcactcagccccttggcaggccatggggtctcagacttagtgaaggaacacagacctaggagtttctctgggtttttatctcattctaacgcttactaactgtgtgcctcatggaagccacaggatgtttctgactcccggttttcttgtccacagaaaggaggggaagattgagcagagtagttgtaaggatatgcaataatatcaataaagtgtatgtatatgcattaaatgcctgacatatatcaggaaccctataaatgttagctttcccatcctggagtttacgttagagagtgtattaaaaccacaggtgggtgttttcttcttaagggcctcgtctgaatctgagagcctatgaaattgggagtttatgagtgtaggggggcatggtgataaggtaaacaaaactcaaaggaaaaagctgatactttgaataatggcactctatctaaatgccttyggcctgtgaatggagtaggctgcttttctctaaagcagcagccacagcttggctggggaggcctcaacagtctctctagtttcatcagtgtctccaagacaacccagataaatagacagtgaaagcacaaattatttgcttgctgtggagatttggcatcaacacaagtcccctacctgcccccactctagtctctaaacacttctcatgtagaaaattaagawctgccttgccctataacttagtgaacttggtcagggtgatgggaatatcctgaagataaaagtgcacactctgttctagtgttgcctttggttagtgactccctgaatgagagtgaggtattaagaagctgtgtgcaacatgagccctgagagctgagtagccatactgtgtggcactgtggtcttggcacttcttggacagcatgtctcacctgctgatgaaactcctgagcaagaagatcaagaagcagaacctcaaaatgcacrccggaacctaaagttgccgggggcctcaaatctgaccctatcagaaactcaaaacggaggtgtgtctgaagaaacgatgggaggtggaaaggttaaaaaatcaaaacrttctgtgaatgtggggttatcagaagctcaagatggagatgtgtctcaagaaacagtggaaaatgtaaaagttcaaaaatctcctcagaaatccaytgtattaacaaacggagagacagcaatgcagtctcccaattcagaatcaaaaaagaaaaagaagaaaaagggaaaaatggtgaatgatgctgggcctgatgtaaaaaaaagcaaaaactgaaaacaaaggggawtctaaagaagaaagtgccaagactcccaaagaaacagaaaataatctggagaarccagataatgaggaagataaccgtgaggtgcccagcctgcgcctgagactgacaggagcttttgacgatacttcatttgcttctctatctaatcttgtcaatgaaaacactttgaaggcaataaaagaaatgagctttatgaacatgactgaaattcagcataaaaccatcagatcactcctggaaggcagggatcttctagcagctgcaaaaacaggcagtggtaaaccctggcttttctcattcctgcagttgaactcactgttaagttaaagttcatgcccacgaatagaccaggggtctttattctctcacctactagagaactagccatgcaaatttttggtggtcttaaggagctaatactcaccacatgcatacctatgggttgataatgggtggcgataacacatctgctgaagcacagaaacttgctaatgggattaacatcattgtggccacaccaggccatctgcttgactatatgcagaatacaccagggtttatgtataaaaacctacaatatttggttattgatgaagctgatagaatcttggatgttgggtttgaagaggaattaaagcaaattattaaacttttgccaacatgcagacacactatgctcttatctgccacccaaactcgaaaagttgaagacctggcaaggatttctctgaaaaaaggagccattgtatgttggcgatgatgataaagctaatgcaacagtggatggtcttgagcagggatacgttgtttgtccctctgaaaaaagattccttctgccctttgctgtccttaagaagaaccgaaagaggaagattatggtcttcttttcatcttctatgtctgtgaaatatcactatgagttgctaaattacatggatttgcccatcttggccattcatggaaagcaaaagcaaaataagggtacaaccacattcttccagttctgcaaagcagattcaggaatactattgtgtatggatgtggcagcaagaggactggacattcctgaagtcgactggatcgttcagcatgaccctctggatgaccctaaggaatatattcatcgtgtaagcagaacagccagaggtctaaatgggagaggtcatgycttgctcattttgtgcccagaagaaatggggttccttcactacttgaaacaatccaagtttccattaagtgaatttgacttttcctggtctaaaatttctgacattcagtctcagcttgagaaattaattgaaaagaactgctttcttcataaggcagcccaggaagcatataagtcatacacacgagcctaggattcccattctctaaaacagatctttaatgataagttgctctgtcatctggtttcaaggtgcctccctctgttgatctgaacatcaacagcaatgaaggcaagcagaaaaagtgaggaggcagtggtgaatttggctaccagaaaaccaagaaagttgagaagtccaaaatctttaaacacgttagcaagaaatcatctgacagcagacagttctctcactgaagacacgcctttctttcatcttgaataacttcgtcctaaaatgaattttttcccccttgaatttaaacaagatttctgtaaattgacttgggttgcaagcactgagcactgttacttctatcaagtctcttttttatttttgggatataaaacaggctttaaatttcttagttgcccaagggcaaagcaataaatctctggtctttcttgtgattatataatattttaaatatccccccaaccacatacacaccaatgtacattattgttttaatgtaactcctgtaaaaggtgacctagtgtaccaggcagctggtggtaatgcagagaagagtctaaggttatttttcatttttagttatttcatgaaccttgacagtatctcatgactcctcctgaaaatgctgcagtataaaagagcaaagagatttgggaaatacctaagaagcaccttaggattagggtggcattgcttttatagatttttgattttaaagcaatgagcctttctcaggtgttttgtataaagtgtcactagctgtcataacattcgacaggtggggggtaggaaaacggtgaaattgagatggttgagcctcatttccatcaataaaggtgtaatatagtgcttcatttccatcgatagaggtgtaatatactgcatttcttcatttggtaacatagcaaagactttaaaaaaacacaaagaatggtgatgctcctaattcggatttctttatttcaaggtggtttggattttggtaagccttttcactctacagagtacttagaagacaaggccrccaactaccttggacttaaagccaagccatcagatagtgcccagcacatattaatgttagcttatttttgagaaaaattacctcttctaggccccgaagcaaaaaaatgcatttgctatgaagattgaaaatgaacaaaattacaaaaaaaaacaccaaaattggtgatttagtcagatgggtttttttgttgtaggagcacttgatttcaagtgtgttttgtatagtatgtaactacaaaatagtacattttgtagcaatttaaaactaaagttgctagcatcattttgctcttgtgccggttaatcataggatcccattaaacgtaagtgcactgagaagattaaatgtagagggaactgtttggtaaagaacattccagtaggaaaagaagagaacaatcttcatttctgggcttgaccgtcatcaccctggctggacctgtcttttgtttccaaccttgactgtcgggctcctgtcttgggtttccaaccttgactgtcgggctcctgtcttgggtttccaaccttgactgctgggctcctggcttggtttcttggattcctaatttctggtgtgtaataactctctccgggatcatgttttccttttttatttcagaaataatgtttctaaaaagatgaaaagggaagaatatttaattactgagtagaagtaaacactattggtattttgtacataatctaatttttatatgcctgttcatgctctttaattttttttatcaaaaatgaagtaatcttctatctactacttgtaatcagcttgtttcataacatgtaaatttcctgtgtcattaaataattacatataaaaaagaagctatgttcattttttaggaagagagcataccgttccattcatccccagggtcagcttgcctccagcagctatggctgcgggatatcaacccaacaaagagaaacagatgcttcaaagaacccatatcacttgagggagaaggaggagaccccaaggaaaagcacccttcctatgaactattttttgatcctagagcaagggttggcaatcagcaagatagtaaactatcaaactgcttttatttgttatttgatttatttgacctgtcatatatttgattaatccacatgtgttttttgagcagctcaytggggtctggagagagaacattgacaaagtctctgccctcaaggagtttggagtctagtggaacagggctcctctgaaactcagggatgtacattatggtccacctggccatggtaggctgtcacatcactgtcactagactgtggtcacatcacttatcaccacactttatttattttattttttattctttttgagatggagtctcgctctgtcgcccaggctggagtacagccgcgtgatctcggctcactgcaagctccacctcctgggttcacgccattctcctgcctcagcctcccgagtagctgggactacaggtgcctgccaccacgcccggctagttttttatatttttactagagacgggatttcaccgtgttagccaggatggtctcgatctcctgacctcgtgatccgcccgcctcggcctcccaaagtgccaggattacaggcgtgagccactgcacccggctgccacactttcttgagcatggtgacaagtaccctggactcctgttgggccagggtcccataggggagatggaaggatggggccactcacagagtgtgcatcaaagagtttaaaggacaggtggtaaatcatttgcaagattcaaaaacttctgcaaagtaagtttgaaataagcaaatagaaaacaaaccaagtaaataatacagaatttattaatgaatctaacctgaaaattatctttttctgctgcctgtgcttctgtgctattatttaagggtacactatctatctgttatcctatgttaaaaaaacgtttggttctttcctctttgtccatctcatcctggacaatatttccaattttaaatttccattttactctgtttttcattcactagctcactctcatctaagctcagtagtgacagagcaaaaaattccaatctaacctcaagcttggtccccaacttcaggctctcccttgggagagactgtcccagtccctagagttatgacatggagaaagaaggagagaaaggaaaggcaaggtcatgatgtgtgtgataacaatatgaaccacagccccagttctccaatcctgagatccaaaagtctggcaagccaagcatactctgaagtttgtagcaaactcactggatggcaaatccggacctgagctgacctgagtctatttatagccttgcatttatcctacttaatatgaatattcatacatttcactaaagaaatattaatatgtttaattatgagatgctgccacataccctgttgggggtgttatgtaattatggaaaatgccccatattacctttctaaaagtcaaaaaatcctgcattcttaaacagattggtctcatggatttctttaaagggatttgggatctatactcaattttccccagtctgttctatgatcttacctttaattatctttcctagagacaatttttctttaattttttttgagaatacgaagcagatgattccctaaaattatttttgctcattaactgcatatacttcctcctgcaacaccccaaattagcttttatcttatgtatactatgcttagcaccttgggtatttttgtaattaaaaaaawtgttgctagatattttttatctttttttaacagctttatgggggcataatttacatgtaataaaattcacttgtgttgcatgtacaattcaatgacttaagtaaattttcacagttatgcgaccatcatcacaatctaactggagaagatttccattagccaaaaagaaacctcacattcatttatagtcaccccctgctccctggcaaccactaatctaccatcagtctcttttggagctaaaagagtctcaaaaaaatatgccatatgccaggcacagcacacacaaccctcataagggaacagaggctcctgtaactggtaaaggatgaagctgggatttgatccaggtcctcaccactccagagtttgtgatctttccaagggctgcctgaggagatccagagtggcctctcactggactggggcagaaatgcaagtagcccaggcacggatgttggatattggatgttggatgtggatgacccacagaggagtcgtgagcttgatgacctttaggccctagccagttctgagctcctgtgatactataaatccataaaatgcatccaactaagccagggacttactttaatgaatgataagaatgatgtgtcatgaacagactaattgcatataaaaggagcgcttctgaagtgtgcagcrtgttcccttaagcactttaaataccccccagagatgccgtttgcagtcataatttgcattatcaatgaagaggcagtttgccaagcaaaggggaacatcagcctaaccctcaccacacattccaatgtattgacgtccaaatcaaggagacattttgatagattcattttctcacctctttaaatgtgaagttggtacttttgatggaattgtcctggtatgctggtgttgcagctgcacaagactagatgatagaatgaaacaccctgtaccataattgaggaagcagctgttctgctattgttattagtattattaagaattaacaacttcctctgtgtctgttaagagaagtccattctgaaagccagccaagttcgcctgcagccctcccagccacgaattctgcatcatgtcacatagagattatctctcctctctgcggcacaggctgttgtctgctctgcctaccctccccaaatttcaggaaacatgcattctttctgtaccttctgccagagcaaaacaggcttaggaaaagacacatggtccatcactaatgccttggtatactatcaagatcactaaaatcctcaaatagagattccaggtccatatgttttaaactctgtagcaatttttcagtaaaaggtaatttaatttttcataaagatattacagggcacagataagagtttgtaatccatggactcttctagatgcttctaaaattttgttacatgtgatcattaacatgaatatatctttttggttgacaaaaagacttcctattttctatcacttaatcatcatgatcctatgaagatggcattattgtccatttttgttaaccttattaatatcagtagtattattaattgttaatgattaatttttttttagacagagttttgctctgttcccaggctgctggagtgcagtggcccaatctcagctcactgccacctccacctcccgggttcaagctattctcctgcctcagcctcccaagtagctgagactacaggtgcgtgccaccacacctggctaatttttgtattgttagtagagacaggtttcattatgttggccaggctggctcaaactcctgatctcaggtgatccacctgccttggcctcccaaagtgctgagattacaggtgtgagccagtgtgcctggccagctcttgtgatttttaaaatcttcatctttacttttaggacaaggaaaattaggctcagagatcttaaggaatttgcccaaggttcacacagcctgtaagagtggagtagatgttgaaatttcacctcagtttcctctgggacacattctccattccattacagcctgacgagcgtggccttgcccaaggtcacagagcaaataagcagcagagtggggaattgaacccaagtcctctagctgggttccatacctttttaatcaaactgtcgctgccactgaaataacagactacagaatcaaggacctgagctgaagtcgcacttgataacaaattgcccagacttggaattctttgcttctacccgacg

SEQ ID NO: 94072 - DNA, 46909 bp, Homo sapiens
acaacaacaactgggggtttatactactttgaagataataagctgagtgatttaacttggtgtaaagggggatacacatttctttttttgttttttttttaattgacataaaaagtgtatgtatttatggggtatagtgtgatgttttgatgcatgtagaggatacacatttctgtaaaaaagaggcaagaggcagagtttaatcaggagctagctagaccacatcagcaggcagagcaaagggaggaaaccattctgtttaaatggcaacatggtctcgaagagcacccaactgtggagtccagaggtactgctgcagtcttccatgtcatttctcagaaaattagggttctcaactcttacaaacatcaaatgccaaaataacaacaacaaaaaagtgaacttatacaagaaatgagactcatctttcattttaatataatttcagatttaaaaaatcataaaagcatacaaatataatattataatatactgtgaataactggttatttaaaaaaaatttgccaaagctttctttaaaaaaaaagcttacattcatcttttaatcccttggattgtatgccaaaaattctagtatttgaaaatgggccttaaatcaaaaaaggcagataatatcaactggcaatgttagtaagaccttgaaggattttaagcaggggagtgagatgattacattagaaagaatgctctagcagataacacaagcaagaaggaagaaagatctgtccacgataatgtggtggaaaaccaacagataagggcaagtatctggggcaaaactgataaactcacccaactgagaccaggagtcttagtaaagattgagttccctgtgaaggacagaaaacccaagataacactgtcttaaacaaagtagaaatttatttctttgagaaattcagagcagttcacatggggtttccatgatccccagagacctggctatttccagctcatggctccttctaccttgctgctccaccactctcagcacatggctccaacatcatgatacaacatggtagtcagagctctagccatcaatgtatcttatctacattccaggaaaagaatagagaaaaggttaaaaagaaaataaagttactgttaaggacacttcctgggagtcataattgacaattccacttacatgccattggacagaacttaatggtatggcctaactgcaaagaaggttgggaaatgtctacttccgggtggccatgtgtccagctaaacatggaaggttttactactaaggatgaaaagatatataggtattaggagacaactaatgatctctatcatgccagatgtataacctggagaggaaagaagaaaggcagattattgaggagtgtgtgagggcactgcattaacttgtaggactttgtaccttcagaattgttctttcccaaacacatctctacttctggccccacgccttgattcctgctaagtccacctgaaaaatctgcccacctcccactccccatgctcaatcctaccatttttcctattaatattcggctcatccttcaaatcccatctcaaatgctatgttaatcatgacgttattcttgactttctccaaagggatagaacttgtccctctagaatttcatgtatagtttttctagggccttagtctcctcttaacaccatgttgtcttaggtcattagtacagctgggtactagagtataaattatccaagaggtaagacagaaccttccccaattattttctaggtagcacagtgtagtagaatgcatctaataaatatctgcaaattacatcgactatttcaagaaaggaaaggtatatgtaaaggaaggggagaaaacaatgtaaagtctttttgcccttttaagggaagcatttgtgcaacaattgaaatttcccgtaaatgcatttcaaaacatatctttgctaatgttgccattcctttttagaggcctaatttggtgtgacttgttttgctgtacaaaccgtggttgcttctcacttcccaggttgtcctaaaagctcttgctaacacaacaaggaaaaataacattacagtggttaaaatagacaaaagccaacagcaataatcatattagctaacatgtaacaaatgcccaatctgtttcaatcacagtgccaagcagttcccatactttatctcatttcatcttttcaacaactgcacgggccacaggtgcctcaattatcctgaggggattgagggattaagtaacttttccaggtgaatagcagggctggaattcttcctgttcatatggctctataaatataggtattatttcttttcataatattttatatagatcatcttttcatctttaagtctcctttggtaactaaaccctgatattacccttcttttattattattattactattatttgtagagacagggattcaccacattgcccaggctgaactcaaactcctgggctcaagcaatctgcttgcctcagcttcccaaagtgctgggattaccggtgtgggccactgtgcccagccttacccttcttttatagatgcagtggaaagcctcattttttgaagcattctcaattccccattggatatcaataatactccaattgcttgtaaattgcaaattttgtacattctatatttggggtgagtggtatctcagaaaacaattcctactgtaatttattttttgatgaatatattaatggaggaatttatttgtggttgtgtgtggatatttttatttaaacacaagtggcataaactctgtgggttcctggtaatcaataatagaagatgatgataatgacgttcttattaaaacaaactatcctttctccatactagataaataagatgatttgactgtgtattatttgactaaatgaattctatgttatctattgtatttgtcaccctagatttggtgacctcaaaaaatgtttgcggctctgtgtggtggctcgtacctgtaatcccagcactttggaaggccaaggcaggtggatcccttgagctcagaagtttgagaccagcttgggcaacatgacaaaaccccatctctaaaaaaatataaaaattagccaggcgtggtggtgggcgcctgtagtcccagctacttggaggctgaggcacgagaatcgcttgagtccaggaggttgaatgtgcagttacccatgatcatgccactgtatccagcctgggcaacaggacatttgccaaaaaaatccgaaaatgcaaatgttgatgacaaattcttacaccctatgaattaggacctatgcatgtgtaaggtattagatttcatagtttgggattttttggttttattttgttttcctttggcttgcaggggccaacacaaggatatccagaaatatagcagttttttgttgttgttgctggagctaaatttcgtcacttttgatagagaattgaaccataccagcatgctaaacccatcaactatccctcacacctctgaaatctttactttcttcttctctacctttttgcctctgagtcgatccttctgcagaaactttcctcttctccagaagccctttcacctgtatatctaaacatgttaaagttttctcttgccttaaaaagcaaacattaaaaaaattctttctcggccgggcgcggtggctcacgcctgtaatcccagcactttgggaggccgaggtgggtggatcacgaggtcaggagatgcagaccatcctggctaacacggtgaaaccccgtctctgctaaaaatacacacacaaaaaattagtcggtcttggtgacgggcgcctgtagtccttggaggctcaggcaggagaacggtgtgaacccgggaggcggagcttgtgtgagccgagattgcgccactgcactccagcctaggcgacagagcgagactccgtctcaaaaaaaaaaaaaaaaaaagctttctcaatgctgcattcctctctagcttcccctttatcttcccttctcacattggccaagcaacttgacagtggtttatgcttcacctccctcttctcttcattgctcaatccactactctctggcttccatcttcaaccaaatcacgacagtcaacaaaatcaccaccttccccattctcaccccactgccaaatctagagaattttcacttcttacttcggtggtcctcgggactgcatctggcattgttggttggctctttctggtttatttcatgggtttctcttcctctagccctttttaaaacaataaattctggtgttctctcagcttccaacctgttttcattacccttctctttacacactcttcttgggttgagcttacccactgtcataatttcatccaccacgttatgtgacgtggtcatgtctacctggcacttccccagagctgtggacttaaatatccaagtgactcatggacatctccacttccactcccataggttctcaaatttcatatgtccaaaattgaatttagcatcttccccttaaatctgtctgatttagtttgaatatatgtccctaccaaatctcatgttgaattataatctccagtgttggaggtagggcctggtgggaggtgtttgggtcacgggggcagagccctcatggcctggtgctgtcctcgccacagtgtcttgtgggatctgattgtttaagtgtgtggcaccggcgccgcaatctcttgctcttgctcgggccatgtagaggcctgccccttcttcaccttctgccatgattgtaagcttcctgaggcctacctggaagcatactggagctatgcttcctgtacagcctgcgtaactgtaaaccaattaaaccccttttcttcccagtctcaggtatttatagcaatgcaagtacagcctaacatactgtcctcttcatatagactactacctctggttaatgactagccagccactgaagccgaaagcctgggccaccttcgtctcctctcaatctgtgaatccacttatctaagtattccttctattcattccttcctctctatcctaacttactacttacctatgtcaggcccccagcatcttctgattgagccattttaatagtttcctaaatctcctgctaatggttttgataccgcattttataacatgagtctgaccatgctttatcagtcgcctgctgaaaactcttcagtgggtcccccattaatgcacccaggattaaaaggccacctatttaaggtccttcgaaacctagcctcttccaatttttccagttttaattttgaggccccaccctaaaggcaaggcatccttcaatcctccttcacctgccacaaaggccccagagctgagctagatgtcccagctctgtactcccattgcgaccagtgcataacttttatagaaattcattagtttctaagatgggaatgttggctttctccgtttgagagatgcaggttctggggatatacataataaacactgaaactgacaaaacaactgtttaaaccttgaattacttacagctaaaaacaaaaaacaattactgtgcctccccgtcggggaatcgaaccccggtctcccgcgtgacaggcggggatactcaccactatactaacgaggaaccgcacgaaagaaagccttctgataggccttttctacgtttttgctccgccccgccctcgctatatgcaaacaccaatgaacctgattttcttacgtttgccaccacagcttccacgaaagttgaacagagccaaaatggtagtgttcagttttatctccccctccattctcatcatttcccttcggccacccttctaactgcccctactcccctcctcttcttcagctccaggagcacgcttggtccccctcaacatccctaacacacacgctcccaggtagccaagcgcccgcttgccgcgcggcaccatggaacttgtagttccttcacccatcccccaacgctcgtctgactttaagaaacttcctttcccggcgtgcaccgcgaatccctcctcctcttctttacctctctccctyctcctcaggttctctatcgacgagtctggtagctgagcgttgggctgtaggtcgctgtgctgtgtgatcccccagagccatgcccgagatagtggatacctgttcgttggcctctccggcttccgtctgccggaccaagcacctgcacctkcgctgcagcgtcgactttactcgccggacgctgaccgggactgctgctctcacggtccagtctcaggaggacaatctgcgcagcctggtacagtggggcgcctgcccagtgcccgcctctcccgggctccctgcccctcgaccctagtccttgcgggctcccggatctccggctcaccccgccgcggcccctgcctagccccacgtccccgtctgctcttctgtagcctccatccaactcatgttgtgcacttcagcccccagatctctcacagcaccccttctcaaccccgcttacgcctctgcatcccttccctcagcccccacttatacgtatgtctcctccgcccctcgcctggatcctctctccgaggtccctgggcacatccagcgcctcgtccactcctctcaactcacccagcccttaggtgtcatctttgcagtagcccccataattttagttcctggctctaattactccatggcctccccattgcttcggcctgcggcccagaacccccttcttcaggccccagacttttcccagccccctgggcaccttcctcagtcaacaatctcacccaagtctcagatcccatgtcctgtcgatccctgatcccacggttgcctcccgggaacacttatttcaatccacaggtctgcagggcaccacccatccgtctccctcctagttccctggatctccctgctagtcgttctcaagcctcttaggatttccagccccggccgggcaggcctcttctttccgccctactttgaaactaacagtccctgcttgctaactctaggcgcagctctctctcttcagggtcctttctactttttaatcttatcaactttcttctaataatttaagaacggatgggacgttcaaattttctaaggatgattcaatacgcttttttaatagttggttccaaggagccaagtagttatttcacttagaaaacacatacttctacaaactctataaccattggaatgaagaaaggttgtagattcatggaatattattcaatgattttatctgtatcataacctatatttaatgttcttgctcaaattgcccaatagtatttggtttatacctttcatctgaaggtacctttcacctgaagaatttcatagaagatcattttaaaaataagagggtcatgaaaagacagccaaattcggcttcttcaccagggcaggatgctacatgtgtattttacacagtgtagcatggtgaaatctactaaagcacatcaataagcaatcagatcagatcgggcagataagaattggtggctttcaggcctctttttcctacttgtrtaggaaggatctgmattttgatttcattaatatgaactaataagtacttactttcttactcttcatccctcaacattttgctaaactgattgatttgaaaaataggtcgattcctctatgtactgataggtaatcaacaaaagtaccataagaaagaaaattaagatattataagcaggaaggcatctatttccttgcagatcgcactttggtcttcttgaagtaccatgctatctttaattgcagtagcaactttgcctgggcagggctgaagtcctatttcaatgcagtttcaaaactaaacaccgcatgttctcactcataagtgagagttgaacaatgagaacacatggacacagggaggggaacatcacacaccagggcctgttgggggtaggggcctaggggagggatagcattaggagaaatacctaatgtagctgacgggttgatgggtgcagcaaaccaccatggcatgtgtatacttatgtaacaaacctgcacgttctgcacatgtaccccagaacttaaagtataataataaaaaaagaaaaaccacactgtgagactgccatatttgaacatgwgtttatacrtcctacattcaaaagtactagagatttaaaaattaagcaattcaggacacttgtgttcagatgtgaataattgcaaaccaaaaccgaggtcgctagtggaagaaatttaaagaggtttttctaatatatgaacagcaaattcttccttgaatctttagctgcaacatatatttcagaagaaatattccaattggtttaagatataataaaaccttgactaagccccaaacccactcaaagctcttagttaactggaaagttcttgttcttcacctttatttaaaaaaattaaattataaactatgctgataaaagtaaaagaatgaaaatttttatagctttttgctgcttaatgtgacctcacacttacctttgttttgtaaaataaaaacttaaaaaatttattatttgaagttcaggtgtacttcaaatgtgcaggtttgttacataggtaaacttgtgtcatgagggtttgttgtacagattattttgtcacccaggtattaagcctagtacccattagttacttttcctgatcctttcccttytcctaccctccaccctccagtaagccccagtgtgtgttccccactgtgtatccatgtgttctcatcacttttgtagaataaaaactttatctctgttctataagtaagcaagagtcaggatgtttaaattttgaaaagaatgtcccaatctaaaaatctgctcattgtttttacattccccaaatctagagaaaagtaagattttaaaatagtgatttctggttggcatgtctgtttagcaarttagagcctggaattataataatgttacatgttatacaaggaaggcaatttatggtacaaaataacatgtttataattgtttgcttatttatgacaaaagccttagaccaggagcttatccttattaattagttaattagtatttatttaaagttaacttgtttctttcctccactagattgtggactcttgaatgtagagactgtgtttcataactctttgtatctcarcttcctagtatagtctatgtctggcatgtagaggacattcaaaagtttgattaatggatgatttcaattagaaaacagtgcctaagcttaacatgggctacattgataatagtgccagctgtatttcagaggtgagatgggaagacccagtgccagtgcggaatcaggagagacgtcatgtcttcttttcctctccgttcttagagtttgtgatgttgaggaatgctgaaggagacttaatcggacaaattctaagctttctaaaattcttttcmagttttgggttatttacactgaagtttgatcctccaaatttatgataactttcatacatttgtttcttttcactgaaaccttcagaaatgtttaggtgttcttttggttagtggctcaagaggttttagtgccatggccaaggcagaagccagcagttaacaataggtaattctgactgcaaaccatcttgttttcactaagtaaatgtctcaactgggaatcaaatcaaggtggttttttagttttagctttgtgtttcacacataaacctattttttttcatcatatccctgcacatagcaagtagaaaatgtaaatttagacatcataatgaggcataaagctttttttaaaaaaactctgctttgttctagaaaggactgagactgcttgaagcaacatatatagtataagattaaaaataattaaataatttgcaggaagagagaatagggataggagaaacaaaacccatggcataaagccctctatactttaaaagaagtgggccacagggttgacatggagcttcctaccagcctgtgcaaaaaaggaatcagatayctattccatgtcaactgaccagctactgagaagtacaactgctttttagggggatggagggtattgttcaaagaggatactgtgaaacatataaattatatcctataattagtagagctgttgatgcttaacacgtttcttaaaaagtactaaatccaacttgtcaacaatccagttttctttatttttctttcttattacagtttttgactattttttaaaaataacatcgctgaaatttgaaggggaattttaaaaagtagtttgcaaatgatagttgagacttaggacttgagataatacagcttaaacattgcattttttgttttctcttggtctaggacctgcttcatgcattaattgacacctagtgtttttgaggcagagtgctaaaccctgggaatacagacctaagtaacattctctgttttagaacccttagtctaatggaaaaagaaatcattataatgcagtacagtaagtattataggaaagggtagggccaagagctataacagacacaggggatatcaaaacgtttcacaaaaaatagttgtcactatgacacttctgattctgaacagatttggaaagtttagccaatatagaaaacagaatatgttccactgggaaatgacccagttaattcatctatataagcatgtgttataaacacaagatactcaaatcaagtttttaaaacaagttagctattctgaatagctattcagaactaggtactagactatgaagagactagagaggtrctagaatatgaaggagtaaccctattattttaaataagatataaaccgtatcttctactaatttagagtaaggataacaaatgaggtacccccaaaagaaagtacccaggggcagctgggaartggctggttcttggcctcacatgtagccaggtcagatttcagaaaaggaaaaaaataatgccagaggtagggagatctggtagaaagcagttctrccagtccagggcctgacctgggttagtagtggaaagaaaggaaaagtatgaagacattgtgaaagaacaacttttaagtggctgtgtggggttgggaaatgggatcaaaccttaggtaactggaagagttcttttaacagaatcaagaaatctggggagaaatctgattcagggagtataaaaatcatttytggaatttttagaagcctattcaatgtgtggtgctatgtcccatggaaatgttgagcaggcgattcgactgaggtcctggggagggaatacaactgtagaactagaatggcaggcatcttcacagagatactarttgaagatgtgggcatgagtaagagctagggagtgaaggatatggcaagaaaatcaaaggaccggggctggaacattgggacatatccatatttttgaattggaataaaggaggggaaaggaaaaaaacattagacaaatagagaaccatttatgatgtatgcgtacaggcaaagaagtgaaggaaggggttttaaccagatgacatagtccataagggctgtgagtagacagaggtcaaggttattggacagaaaagactttgttgatcggggtgggggctgccctttcaatagcaagaagccagatggaagaaggggaaagggaggatgattaatgargaagtagaagtagtagtcatagcagtcaaaaactcccttggagtttaaggaaggaaggaggaaaactagaatatttagtgggtagatccatcaagtagaattttgtttatgttgttaggaaacagtcttgtggcataggaaggttcaagattctaggacaagagattagttgagagataattaaagagtatgatttgtagggctcaggattttggggatagaaaatactctgacacttgatgtcactccttcatgcccaaagcagttgtcyttaattggccatggcaagtagatatggcctcccaatcctctgcagaatcatttggtctgagttrccataccaggttgggctttttctagatatacaaccacagtgatatacagtttgctgatttgcttaacgaacatgaagtttgaaagtacatgagttctaggaggaaatatattgtgtaatgtattgaggagccagagtgaaagaaacttaagttatagataaagtttttcataatagagaaaattktaggagtcagaagcaaacatattttgatttagatttgacttttacttaaagcccaaaatttgtgtgactgtcctagggttatttaacaatatatatgcaaatcttagaacccaaaaattttcaagatgcttagagtcccaaaaaatgagacctagactagcttttgactcttcarttcttctaatttcactctgtattttactctccataagcaactagttgttgtagcctatatctaatatgarttttttctggtaaatgaaactattttcttactatttaaaaatattaattttaggttttggatacaaaggaccttacaatagaaaaagtagtgatcaatggacaagaagtcaaatatgctcttggagaaagacaaagttacaagggatcgccaatggaaatctctcttcctatcgctttgagcaagtatgaatgttatgatctttctcttttacagctaaataatggggaaacatattcttaactaatttaaatattttttctttttaaattttagtttgtaaatatgtaatgattggtacactacttatcctgatcttctgttcagattaaagttgatacagcagttaaaattatatatacttaagatactaaaaatgttgtttgtatataatacaacaaggactttgggaactgttagtttctaaacgattcatccttttactaatatctagagtgatggtgggggcatgccatcataagaaggcatttcaagataacctgggcagctttacaagttgcaccctccttgcccttgccccagaggccagctgcatttattaatgggacaatgataatgccaaagatagaactgttacagtgcagcaatcttgggataagtgctttaaatgcattcttgtrtctaatccttacagtaaccctgctggtataatctacacttaaagatgaggaaagggaaccttagagaaataacttattcaagaaagtggcaaccagaattgtcacactgggagtatatgccacctcttgaggggaaagagggtgaaaactattggcctagaacaagggtgatctaccccagttgttcagaggccagtgttttcatgccttctctttccctttaagagaagggaaacacttaagtctagcttgtgaggtagatggtattcaccccattctacaaggaaactgtggcatagggagrtcaaataatttccccaagtttacagtaccagtaagtgatagagtcaggattcgaacaccagcagggctgctggtctctaaacctctgctgtttccttattatcagtgcttctcaaactctctggggtaaaggaccaatttctatcctcttcratctgtcatagactgatacttttgtacaatgcaataaaaatgaaatatgaggaagaagagatgaaatacaagcacacattttttattattagattcaacagacaaaaatgactctaaaagttttgcaatgctgactctcaacttctggtcttgtcttgtcctgggccggtaacagtttgcagactagcactgctctgtgtcatgctgtggcacctgctgctgtggtagttgaagccccaaaaatgatttcttttactttttcactctaataaaatattaaatgatatcacagatgcaaagtacgtgacacacaacggggtagtcaaccactgttagttgccattaagccttcgctagcagttagcatgggagaggtaaaaggacccacaggctggcaattaggtaggaaaactgagaggagacttacccactgaggatgtggcatacctagagcttactgccaatcagtgatgagaatgcatactatgttatttatattattcagtgtatgtattatgagtttaaattttcactagatggaatcatactctactaatatatttatgtgtttcatacagaaatcaagaaattgttatagaaatttcttttgagacctctccaaaatcttctgctctccagtggctcactcctgaacagacttctgggaaggaacacccatatctctttagtcagtgccaggtaaaaaggattccagaatgatttctgatgcagaaaatttcagcacctatggttgaatgaagcaaaatgaacagtggttttatggattatgtaggttttacctaataaaatgtattaattgatcttatagaaacatataagatgaattatatattttcattttatctttcactattaatacactcatgccttactttaaataagaagcttctttcagtttggaaatatgtccacctagattggrctctctaggcctgacttagaacttagcagagagtaggtactcagtaaatagtcataaaatgaaaggaaaaattaataaataatatgtactggttatgaaaaatgctaatagtaaagaaatggaaagtgaaagatttaatttccaaaccttttccagacaccattgcccagaggtaaccaccattgagtttggaatgtagcttttccatatttttcttacacatttacaaaagtatgtattatatcaatatattaactgtacctttaaaattgcatgacttaaactacttttgttttctgttttaaaactaagggtaaagagccatacaattagagataacctgtcacaaggataatacatttcaaactgtcttctgaaagaaaaaatacctacttttcatagtaatcaaataatttacaattaagggaactgacttcattaaacgtttgctctatttccaggcattgtgctagattctttacatgtttcatccctcccaatattcctgtgtgttaggttcaaatttcaatacaagtccatttaaaaaaggaattagcatatgaatcagacctgtttactttctatggccacttgaaacatctttttaatctaagaaaccctcagtttaataatctagaagagatgaaatgttctacgcaagagtgtacaaattgcacaatctgtatctcataaatatctgattttcaggcagtatgtcttaatagaatgtctattaaccaaagttggcaagaaatgcaagatttrtgagtcatgaaaatgttaattttgaatatattattccatttcttattggcagcaatggtgggaatatgggaaacagatttcagctaaattaataaatgattgaggtgataggaatcatgtagacatgattttgtttgatgaatttgcttacggttgttctgtatgcatatttgcctggrtttggccttatccaatgaaatacatttaaaaacccctttggtgttgccatgtcacctaactagaaaccattaaggaactatagaggcatggtyttggaaatctattttgggagagagaaccaggtggctctgctagtcctacttaatccatctagaggtcatttgggagcctatatctttggagaattttctagaactgaaatgaaaagacctggagtttgggggttttaagaaagcttgtggtggaatgaagtatgtttaggatttgtaatagcttcagagaagggtgttaatatcagaattcctttgagtttagtagactgtctcaatgaggctgggttttcatttcattgttcaccagcagtagacagacttatttgtaaacagaccgggtataagattgtaggtgctcttttttttttttttttggagacagggtcttgctgtgttgcccaggctgtagtgcaatggtgcgaacttgggtcactgcagcctagaactcctgggctcaagcgatccttttacctcagcctcctgagtagctgggactacaggtgtgcaccaccatgcccagctaattttttttgtgtagaggtaaggtctcactatgttgcccaggctggtctcaaattctagagctcaagcaatcctctcatctgagcctcccaaagtgctgggattgcaggagtgagccacggcacctggcctgtggtcatactggatggaaccaatgttaataacgattggtgtggcagtacagaaacactttgcatatgatatgaatgaatatgtctagatggtattgaaagagactgttctttctcccttctttgcttctttgttttacttacaaggtttgctgcaagattgaagtgtcaggattacagcaacatttctcaggctgtgttcattagaatactgacatcccattaggtgttaaaccagagagaaatgggttttgtgttaacataaatgtaagaaatcaaacaggtttctttattgtaggtctgttcagagccttcaggcggctaatattctagtggctctgcaagacagtggtgcagtatgccatacttctcaggtctgttttgctacagagcccttttttctcaggtttctaaaagcttctcactgggcactactgtcacccagaccatagagtaggaaacactgcttaagagtttctccatgcttcaactgaaatgtgagggttaaccatagattaaaatggaaaatctgatttttaaaagtccaagaatctatttttggactttaaaagatcccaaaaggccaggcgtggtggctcacgcctgtaatccctgcactttgggaggccgaggtgggcagatcacctgaagttgggagttcgagaccagcctgatcaacatggagaaaccccatctctactcaaaatacaaaattagctgggcgtggtggtacatgcctgtaatcccagctactcgggaggttgaggcaggagaattgcttgaacccgggaggtggaggttgcagtgagccaagatcrtgccattgaactccagcctgggcaacaagagtgaaactccgtctcaaaaaaaaaaaaaaaatcccaagaaatgaggactgtttttattttaatgtctaagaacaatgctgcaatttttaatgatttcttaatgacttatgcgaaagataaatagctatttcttcttgtttctccctttttcaggccatccactgcagagcaatccttccttgtcaggacactccttctgtgaaattaacctatactgcagaggtaaatattacgaattattaactcaattaaatgatgcatatcagtaaatatggtataaatgataagcagagatgataattgaattcctagagctagaattatttttcttaatgaaattctacctgaaatatgtaaacaaagaggctgtggcactcattctgaatctctactttaaaggcagttttaaacattttaactgtgaaaaaaaggaaatggaaaccaatctgacttttaaaaaggaattcagggctaggtgtggtggctcacacctgtaatcccagcactttgggaggccgagatgggtggatcacgaggtcaggagatcgagaccatcctggctaacatggtgaaaccccatctgtactaaaaaaaacacaaaaaattagccgggcatggtggcgggcacctgtagtcccagctactcggcaggctgaggcaggagaatggcatgaacccaggaggcagagcttggagtgagctgagatggcaccactgcactccagcctgggcgacagagccagactccgtctcaaaaaaaaaacccaaaaaacaaaaaaacaaacaaacaaaaagaagaaattcagaatcctggatctaraaataagaacttaggaacaatttttacttaacttttaaaaattgacatttgcatgatttaagtttctataaatgcattctgtagccatataagcctagtgggcatatattccagacttgtctgtatgcaattccaacttattcccttggtaggtactgctaatcctttttggaaaaggcggactgtaattactaaataatcactatcccggaggctagacctacttagaccaagcaaatagaatgaggaccaacccatatttatggggccttcttgcttcccaaatcatcccacaaccaaattacatctaggatagtgcagtgatatattatacttggaggcaaagaatcccagggctctggctcttctccaccacttaataactgcgtgaagtcccaactacttgggaggctgaggtgggaagatcacttgaactcagaagttcaaggccagcctgggygacatagcgagaccccatttctaaaaaaataaataaataatgatgtgacacttgaacaagttttatgacctcgcaacctcagctggcacatatatataacgtatcaccacctaaatgaagggaggtggctgaaccgaattatttcctgaatagttttgtgctttagaatctacaattgttgtagcactggttcaggaacttctaattctgtgcctgcctcagtcacagctttgggtcctgagccatgcaagaagaacatgaaagtctagcccctactggaatatattcttgtttgatcattaatacttgggggagtcctttattctggcattcatcagaaatcaaactttcagaatcatggagctaggatacacagttaaatgactatatggtttgccgcataagggtcttttccgtatggatttccagagaaaattatttgacagtttttagcaataaattttagtttttcacagttactacttttaaaatgttcctctatttgtaactccaagtgtgtgttttcaaaacaaaattgttcaaaaccattctgtcctacagtgagtatataacgtccttttgaatctgttttgtgagtgtagcgggagcagggatggtggctgccattgccagggatggtgctgggctcttcacttatattatttattccttgcagcaagcctttgaagttttacacttacttgatggggaaactgaggctcgggggttatatttatttgcccaagtttgtgcagttagttattaggtggcagagctgggattttaatccagtttctaccaaaactctgctcttartgtgcatgggtgaatggatagaaatttcacattcacttttaaagaagccagtttcccatattgctaattttatttacaaaactgatatgtatatgtgtatatatatactttttgtatatgtgttttatatatatacacatatatatgtgtgcatatatatacacatctatacacgttgtgttcatatatatgtgtgtgtatatatatactttttgtatatgtatatrctttttgtgttcatagtctgtttattagatagtcaagaatgggaagaaaaggttattttacatatatggtttaagacacatagaagcttttatttatgactagaaatgatttttctccttgattaggtgtctgtccctaaagaactggtggcacttatgagtgctattcgtgatggagaaacacctgacccagaagacccaagcaggaaaatatacaaattcatccaaaaagtaagatcctagggtctagatttttgttttcattggcggtaaactacagttagcttgtacacatccagagggcaaaattactkttgaaatatttcagaattttgagaacagcttttggtttttgttttcttcatttttttttcttttgtgcttttaaagggttttgttctacttacagagtgttgtattgaagagagggtttgctgtagagacagaatagggagcatacctgttttcattttccctcactccagttcaggggctggcttcctgttcttttgagttcttacgcattcacctgccctggtactacagtgtgggcaagtggctgttgagagtgtttacaaatggaggagtcaagaccaaaaaagcactcagttacagtcctggtcattagacatgtatctttgaccttcagtgaacagaatgtgtatgcatgcgtgaktgtgtgtgtgtgtgtgtgtgtgtgtgtgtgtgtgttttcttaattgacctcacaatggataatttgacttccactgcagcttctgtggttccaagctcccataactttggcatctacttattgccgggtaactctgtgtgcctctacaacatgccaatagtgctttgaaacataaaggaataaaaaaagaaaaccaaaaccttttaaaagtcaggaggaaaaaggcaaacatatgggaaatgcgcttcctgtaggttactttttgagaaatgctcaaaatgcaccttttaatagtatgtgtgatcttgtttttcatgtgtgagaagcttttgttcctagcagaataaaaggcaaatagatgttttgaacaatgttttatatcacaattttaagctatatgttaaagatgagaactatttgagaagtataaaagcaaagttatccctactaatattaggagatttgaaagggaatttacttacttttaaatatgaattgtcttaytgtgtaacatttgtgaacactaatgcaagcacgtggtgtgcgtttgtttgccctctttaggttccaataccctgctacctgattgctttagttgttggagctttagaaagcaggtgagcttttggaaaaattttcaggtttgtggaaagatcaaaacttaggcatcttgaacttctctcaaggttaattggtcaatcatttgcatatttctcaagatatcaagctgacagctctagaaaaattcaaatctaaaatgtaggcaacaaattaattttacatttaaaaatcttgaccagttaccccttattttttcaagtattgtaaaatgagcatgctcttacctttagagatctggattctcatgtaagcttgaacaagtcactctcaatctctgtttccttatccttgaaattataatgtctgactttctacctcatagggtggttatgtgaaacaaatgagataaaatatattaaagaacttggaagcctacaaatattacagaaatgtaagatattttatcaatattttacaaataaagtgcccttccttcttaattttttgttcattcttagttttaagcacacttaactgtttttaagtgtgcggttcagtagtgttaagtatatccacattgttgtgaaacagatcttcagaaatttttcattttgcagaactgaaactctgcaccaattaaacaatagctcctctttcccccaccgcccagtccttggtaacacccattctattttctgttcctatgaatttgattactttagatacctcacataagtagaatcatacagtatgattttatctctttgtgtctggcttatttcattcaaggtgtcataatgcccttaaggtttatccacgttatagcatctgacaggatttccttcattttctatttgtttcttcttatataagagtattcaacctttaagtgcatgacaaagtttatacccattcctgttctagaatagtcttayaggctgggctctgtggctcatgcctgtaatcccgtcactttgggaggccaaagtgggaggatcgcttgagcccaggagttcaagaccaggccgggcaacataagtgagatcatgtctctacaaaaaaataaaaaattaatcgggcatggtagtgtatgcctgtagtcccagctactcagaaggctgaggtgggagtattgcttgagcccaggaggtggaggctgcagtgagctgtgatggcccctctgtactcagcctgggcaacagaatgagaccctgtatatttaaaaaaaaaaaaaaaaaaaacgctgggcgtggtggctcacgcctgtaatcccagcaatttgggtggccgaggcaggcggatcatgaggtcagggaattgagaccatcctggctaacacagtgaaaccctgtctctactaaaaatacaaaaaaaagaaaaaattagctgggcgtggtggcgggcacctgtagtcccagctactagggaggctgaggcaggagaatggtgtgaacctgggaggtggagcttgcagtgagccaagatcgtgccactgcactccagcctgggtgacagagcgagactccgtctcaaaaaaaaaaaaaaaaaaaaaaaatagtttcttatgagttgtgactgggtttctatagttgtgaaattgagggatgaaatgagaccctcaagaggtcttacaagaggcaataaactaattggggacaccttatgtcttggtttttttcctttggcccagcctgtacctccttagagagctgcatatctattgctgcatatacaacagcaggtttgcagctcacgccatgtaacctcatccctttcccataggcacatggtaaatgcactctcactgtaaaggtttgtctacaagacattaactactttttagaaccagawgaatcatttgccatgaatttcttttttattaagctttttaatcttgcaggcaaattggcccaagaactttggtgtggtctgagaaagagcaggtggaaaagtctgcttatgagttttctgaggttggtcatttagttatcctttgtaatcattgtgatagacagtagattgaagattttgagtgtgaaatgtgatggttttaagtgatacggggaaagaaccagattgtcttttatgtagatgtgtagttgctacattctttttatcattttcatttaacataaaaatcattaacttgtaaccttcatagaaagcaatatacaattttaagaaatgtacaatggtgataattaaggcatacagacatatatatgttgatttttcagactgaatctatgcttaaaatagcagaagatctgggaggaccgtatgtatggggacagtatgacctattggtcctgccaccatccttcccttatggtggcatggagaatccttgccttacttttgtaactcctactctactggtaagtgtaaatgtttcttcatttgaaattgacgtttcaaaaataaacttaagaaccttaggagtcctaataatatgtatatatatgtaaagaaccttagagtcctaataatgtatatatgtataaaaatcttttctcttgttcgtgtaacctttgtttctaattttattgtttattgtggttatcacaatctcatttttttkttgttgttttttgagacacaggcttgctctgttgcccaggttggagtgcagtggcacaatctcagctcactgcaacctctgcccccgggttcaagcgattctcctgcctcagcctcttgagtagctgggactataggtgcacaccaccatgcccagctaatttttgtaattttagtagagatggggtttcactatattggccagggtagtctcgatcctctgacctcgtgatccacctgccttggcctcccaaagtgctgggattacaggcatgaaccaccccaccaggcctccatcttgtttttgaaaggaaaataatcaggccatttggagaaggagaatattatgttcacggtatttggggagttgggcatgggggtgctgtgtaacaacaattcattgataaattatgtatccagacaatcagactataccaattacacttggtgtgtaggtacaattaaaaaaaaaatcagtacaccatgtacaggaaaggattagggccatagaacgctgctatgtttaatatgcctgtgagctactttaaattcttcttagaaccaaaatgagtgatggattagcaataaaataaataaaatacagcacaggacacataggacactctaaagttttattaaatatattttgggtaataggagagaaagaaagtgatgggtaaataagagcagatataaaaatggaagtagaagaaatgtttcatggaagttagacacaaatagactggctttcattgtattgcaaaaattccctagaattagggcaagaaagaatgatgctaatttttagttctgtattttttttgttttttcaattaaggtctcttttaccttctttgaagtgctgtagtagaaatacagtggatcaccagtgccagtatgctaagtatttaggtaggcagtcttttagatagtctgtaattygattactaaaatactaaggtaattttctttttttgtaggcaggcgacaagtcactctccaatgtaagttaaactttttcattatggccttaccttcaagaagtattacgtcaactgattttaaaatatcccttgtatttttatgttaaagatatggttataatggacaatttggggactcttctcacattattaacaattagatgtaatagatttaaggaaattttatggtttgatctcttcatatatttatgaaatatttttaatgcagtgatatatctatttaatattttctaagtaatttttgttttctaattactttatgccatatttgtgtgtgtgtgtatgtctttggttaaattaaagattttgctgaactgagtaactccctgaatatctcagctaatattttttaaaaattgaataacatggagtgtttacagtagaatgggttattttaggttaagataatcagtcttactattaatcacactgttttctttaggtcattgcacatgaaatatctcatagctggacagggaatctagtgaccaacaaaacttgggatcacttttggtaagatttttgttattatttctttattggttcatgttgctgatttttttttccctgcctcctaccactctgaattgttttgtgtgtatctcttgtttttctttgttatcatctcttaggtaggcaaggattttttttttttttgacatggagtctcactctgtcactcaggctagagtgcagtggtgcgatctagctcactgcaagctctgcctcccaggttcaagtgattcttctgtctcagcctcccgagtagctgggattacaggcatgcgccaccacgcccagctaattttttgtattttagtagagatggggtttcaccgtgttgcccaggctggtctcgaactcctgagctcaggcaatccacccaccttggcctcccaaagtgctaggattacaggtgtgagccaccatgcccagctattttttttttttaattggagacaaggtctcactctgtggcccaggctgtagtgcagtggtgcaatctctgctaactgcaactccagggttgcaatcctccctcctcagcctccaaagtggctgagactaaaggcgcatgccactatgcctggctaatttttgtattttttatagagatgggatttcaccatgtcgcccagactggtctcaaactcctgagctcaagtgatccgcccacctcggcctcccaaagtgctgagattataggcataagccgccacgcccagccaacaaggattttttttttttttttttttttgagatggagtctcactctgtcgcccaggctggtgtgcagtagtgtgatctctctgcctctcagttcaagcaattcttgtgccttagcctcccgagtatctgggactacaggtgcacgccaccatgctcagctcatttttgtatttttagtagagacggggtttcaccatgttggccaggctggtcttgaactcctgacctcagataattctcccgcctcggcctcccaaagtgctaggattacaggcgtgggccaccatgcccggccaacaaggatagttcttaaaaattctgtaacacttattacagcgttaggagtgttaggttcagtctaggtgttaagtttaattcctgatatactcccacttttaacatagggacatgcaagagcagaagcagggcttaactttccctgctgccatctgctgggctgggcttcccattgctctggattgactgcctgggagccagagtcggcttagactgtagtggtcatgccttacaactgctttcctctgtagaaaagccaaaaagaaaatatcttgattgaaatgtcttttcttctcagctgtgtccgtgtttttattaaaatatttttttttcaggttaaatgagggacatactgtgtacttggaacgccacatttgcggacgattgtttggtgaaaagttcagacattttaatgctctgggaggatggggagaactacagaattcggtaaaggagtcaaagttttaaaaaccttcatccaaagttgtataggtgttaaaaactgagtttttataaaagcgtctttactgtgtagcaaccaaaaagtcatttttacaagtgtggaaagtgaagtcaatgctggtataacactgtgttgatccacacygttcactgttctatgtaaggtagttttgatgacctggtctaaatagggagctgtgggacctcactgggtctttgctattaatatagctgtttactatgtttgcatcttatttggtatgtcatttttaagtgttgtctcctgaaagccaaatttgctgaccaggcattaaatcatttttctagtctttttataagaataaagcctgtattattgagcaagaaacawcagagaatattacttaagtaagcattctattaatagacttccagaagtttatgccaacatatcctagtgttccagtctccaagttttagattcccctaaagttacaccactgagtgaagtaatacctccttattagcttatttgcgtggtgatagcagtcttyctatatgtttctccatgttatttcatgtcttrcaggtaaagacatttggggagacacatcctttcaccaaacttgtggttgatctgacagatatagaccctgatgtagcttattcttcagttccctatgagaagggctttgctttacttttttaccttgaacaactgcttggaggaccaggtaagtagttggtattttatgattttttttttctttttgagggtaatgtgagaattaggaagaattgtaaactattgttttgttccatttaatacttccaattcattctggatgtagctgctgaagaaatctgtattgttttctgagttacctctcaacttaaaaccattaataacccctaaggtttaaattatgctgcttcattttttaaaaaatctcatcagtttttgaaattaggataatagtgtgtattccctgaaaacatttctatggtacagaagtttataagastaacaagtgagagtccatcaacccctttccactccccaggggtaaccactgttagcagtttggtgtaaatggctccagatcattttctaggtgtaaattaacaagcagacaaataaatacatgtaattattttaattacaaaaaatgggtcatgctatatattggctctgcatttgtgttttgttttgctcgatatttcacatacacccttctgtgtcagtacatataaatctgtttcatactttttaatgccatcatactagttcatgataaagctatgctgagttatgtacccatcccccactgatggacattgaggtgttctccttggttgattgacttggaaggctgtctgtcacctggatccattctgcctgtccagtcttatttttctcctttctagtcatgtgaaggttattgcttttagaacttgggttatgcattccttttctgtgtcttcatgtgttatccccttacctataattagaatttctcttctcccttccactgaattacatatattcttcaaggcccaacttaagtcccacctccttttttgaacattctttcactctgaaagtcctcgtagatttccctattctctgaatgttctctgttctctgtggttaatagtacaatgccaaacacgcacacaaaatgtcaaataattacctttctatgaattgatttcttttcttttttactcttagagattttcctaggattcttaaaagcttatgttgagaagttttcctataagagcataactactgatgactggaaggatttcctgtattcctattttaaagataaggttggatttaaaaaccttttctatttttcatgctcgatatatctctatttattgactgattaggttaacttgtattatctaatagtagtattggttcagaactttaggactcaacctctcattgcatattttttctattttaaatgtgatcttaaccacatgaactacctgtagaattttcctatttcagagaagtcatcaatagtatggtgatgaatataaattttagaagatagagttagatgaggtaatggatatattagcttgacttagtccacattgagtacatatatcaaaacatcgcattgtgtcacataagtatacacaattatgatctatcaatttaaaatattaatttttaaaaaagatttagaaattatcttgatatagcagattagacaaaattatatatctaaggacttacaagtttaaattttttttygacaggaaagggcattctattgtaaactgtgaattcttactattcataggttgatgttctcaatcaagttgattggaatgcctggctctaytctcctggactgcctcccataaagcccaagtaagtacttgcctgctaatgctttccttctcattctcctaactcctagagagcctcaaaatatctgaaagaatagtatgccttcctgaaactgttactagtaaatgatgaaagcagagttcttaggtgttttggccttaaccctgaggccaaaagaataatttctgcagtttacaaatatggtttttcacttcaagtaattgagtgcctcctttctgcacaaggatggtgagggatttagamaataagctattgtatcttccttcaaacttctgcaataaaaatattttataagtattatgttaattacaacactgttataagttattatccccatttcccaaggaggtaagttaggtttagctaggtaaagtgtcttgccctaggttgcacagctagtgagtagtaaaagttgagattcaaaccctggcagtcttattgcctccaatatactgctttcttycttctttttttttagaaacagggtctcactctgtggctcagcctggcgtgcagtgatgtgatcttagctcactgcaccctctgccttccaggctcaagtgatcctcctacctcagccttacaagtagctgggaccacagatgcgcactaccacacccggctgtttttgtacttttgctagaggcagggtttcaccatattgcccaggctggtctcgaactcctgagctcaaacaatccacctgcctttgtctcccagagtgttgggattacaggcgtgagccaccgtgcccggcctcaatatactgctttttatactgaaccccctccttcaatcggacctgaaccctggtctttcacgagttgtgtgaggacactgaccatggcatgttccatggcatgttctcttgttgcctttcttttggatcaccaaaattgcctaccagcttctcttacactaaacaggccagtttaattgatgttcagggagcagcaggagagaagctaagaaacaagatgaggcctggtcatgtttgtttgtaaagcactttaaacagccaggccgagaagtgtttggttgagaagttactgggagttctgagtatggaacaaatgtggtcagagcgccccactaactgggcagtcctggttatcataggctgtggtgggaaacaggagctcaggtagggaggggtgattacgatagaatgtttcgaattttgtgttggaaacaggtggcacaaatcatcagtaaacccttttaacgtctaaaaaaggtatcagcaaaaataatactttagatttttttcctagcacttcattaagaagtgccatacattatctcgttaatttttacaacagccttgctagagattatgaggacctgaagtcatacaaaggcagtggaaaagaaaggagtaactgagagaagagacgtttgggggctagaatctattggcaactgattggctgtggtgagaaaagaagaaattaaaaatgactgagcagagatgtaataaagattcagctcaatccagcacacatttattgtcaggcactaatatgatgaataaggaactcacagagcaaatatgtatgtatcaagtaattataatacaatgaaaagtattttttttaaaatattaagtgttgtgggtgaggaaactattaattttaatggtgatggatttggacatcgtcttggagatgacttacaaaggagaatacaagaagtaaactgtagaaccttagaggatcttcattttagagctaggacagaggaaaggtagcaaaataaatggaaaactaaaaagatttcaaaggttcattgttaagaaagctgtgggaagaaataatttaaaagtggtacggagagtggtcagcagtctggtgtgctgtagaattatgaggagcctgagaataaaagcrtagaatttggagtttggagtctttcaaagactctaacttcaggggcctgatatagccaaaagacagttccaggaagtttaggagtggagaaggctttgcccattgcttttaaaattggggaaatctgggtggaaaattagttcttcaaaagtgtttctttgatatcaccgctgctaagggatcctttttgggcgttggttcattctagatcccttaagattgctttcaagtaataccaaagtgctggaggaaccctggaatcattcgtgtgcccgggaattctgtaaagagagagtatcttagaaaatctcaaaccacagaaaatactttgatccattgcagcacagaatcttggcttccacgatcctctttttataatgctctcatcatttgtatatgtatttaaatatctgagtctatccacatctctccatttctactaccactgtccaagttcagtatcacatcttcacatcctggaagactgttctggcacccaaactgtgcacttgtatctgttctgacttctcccagccactctccacactaaagctagagtaaacctttaaaagcacaaatgtgtcatgttgtcctcctgcttagcagtctccactggtatctctttgctcttgggctaagacaaaatcctttagtggggattataagctcctaacactctagctccctttgcttcagtcacactggcagttttggagtttctcgaactccccatatgtcctccaacatagtacctgagcatgctgttttctctacccggagccctttgcccagttaattccawtctcagctcaagaaccacttcctcttggaagcatttcttgacatccctggccaggtcaaatctcccattctagggctttttagtgctatatcctctcttcgtagcagttgcacagttctaactttacatttatttattcgtatgattaaagtatttcctcttcgctatactgtcagcaccatgagaacaaggcacatatctggttttgctctttacttttctgaagactttgccataagtagggtcctttcccaggctaattcttaacttagtacttttaattacactaataaggaagtttcaggacacgaagaaacagaccagctaaaggttttctactttgctattattttttaagaaatcaatgctaataatgttttggttgaaagcagtgtattctgatcagtcaaggacctctgatcccacctgttcttgaagacaaaatggcatgcctgcagtccacagcctgacacttcatgtaataaactggcagctgcttcgaggtgggagctgtgttgacctttttattgtctcccctagggaacaaacggagtcccagtcacaactctctttaagggagattcagtggtaacttctaatcaaaacttacttcatttaggctctaaggggcaggtgcctctctgttccctaatacaagcatttcagtacaagcaagcatgatttacggagaaagagggatgttttgcaagaattttgcacacactacatgttctttcccattgttgcaaaatatgatttctaagttgagaacacacaaatattggtataatttgcttaacaattaccatgtgttaatttcattttcttctaaaaaggaatgaaatcatcaggcaatggtatcgggctctctcaagggtctagcatctagaacggtgccaattatgtagcaggtgcttgcaggtttgttagatgattagatgtttggaacaaccaagtaaaatccatgacagcaaggacttgatgttgttcatcttgttgtcttgagtgcctagaactgttcctgccatgtactaaatatgctcaactgattccaactactttagcatatactactygagcacatgacagtcttttgctgaggtgctttggcattctttctaaaagatagatgggtgtttcattaatgtggtatccatttgggtttgtgagttcttggatgatgccagtagtatgtaagttaggtaaaatatttcctattttcctcactttggagtttgttttccttatttaaaagggactttgaaatttaagtatgtactgtagctttaaaactgcatttctgcaaaagcacgtgcatttttaaacaatgtaatctttatctttgcagttatgatatgactctgacaaatgcttgtattgccttaagtcaaagatggattactgtaagtaataatgtgtgatttttgattcctttttgaattgtgcaaatatgtctttactcatgaagcagggagggtactttaaatcacaaacagttatatttggaaaggctatttgaaagtcaggtttatmtaaggtgatattatatctactctcaatatagaaaattaagggtttgagacagggtcttgctctgttgcccaggctggactacagtggcgtgatcatggctcattgcagcctcaacctcctgggctcagtcagttgtcccacctcagcctcccgagtaactgggactacaggcatgtgcctccatgcctggctaatttaaaactttttrtacaaacagggtctgtgttgtacaggctggtctcaaactcctggtctccagtgatcctcccaccttagcctcccaaagtgctggaattacaggcatcaggcatgagccactgtgcccagcctagaaaattaagttttatggggggaaaaattgatgttgaaggcattaatcctgatttttcttgcttcttaactcttaaaaaaaaaaagtatgcaaaaatatttgcatcttacctttcttcttttccttttaaatcatttataagatactgcttccaatatggcaatttcacataccaggtaaatctaaaatgatcttgggtgaccagctgctgactattagtggtgcaaagaatcgaagcacttttgctctttgttcactttctatgaagcttcttaaagaggagcttcttcatatatgtactaaaatagaaccctttactgaagccaaagtaaggatgagcccttgataattctttaatgaaaaataacagaagatttaggaatacttttattcctattaatttgcaacagatttatcatttttttacgtaatttcaacttttaagttcaggggacacatgtgcaggtttgttacacgtgcatattgtgtgatgctaaggtttggggtatgattgatcccatcacccaggtactgagcacagtacccagtagtttttcaacccttgccccactcctagtagtgcccagtatctattgttgccacttttatgtccatgaatatacagtcgtttagctctcacttgtgagaacatgctgtatttggttttctgttcctgtgttaattcacttaggataatggcctccagctgtgcaatcagttcagctattgccttttaaaacctgttttgtgtagttgacaaacttgtcatgaagaaaagtataagagatttctatgggaaacaggattttttaacagtgtgagtgtattaaaattctctgttttagtttgaaaaatgtattccagcttatttggtgctagttaaaactgctactaatttctgctcaaatattcctttgggcccagcagttaaggtggataatgatcaactcttcaatattagtagaaacaggcattgttaggaacagattcaggacactgtattcactaatgcactcttttccttatgtattttatttctcartgatttgtcttaaatagtaaataaatgcaaaagaatatttataacatattcatatggtgtataaaacaattgtgtgacccaccactagcataagaagtaaaatcttagcggtacctytgtagcatccctccccatcttatgcccctctccaccctccttgctgacccatccaggttaccattgtcctgaattttggtttatcattctcttgctttttatgtttttaccacataaatatatccttaattaatatatagtttagatttgcaggtttttgcacagaaaatgagctggagctgtaagttctcatattaaggataagttgtaaagggaaaagaagtattgctattaaagagagttctgaagagggggaagatgcaaaatatttatttaaaagggtatatacctatgcattaaatttagtggaaggatatacagaaactactaatattagttactgaggagtagtacttggagacagggagcagatccaaaagaatttttccttctgtcctatttgattttttagtatttgcrtatatttcttttaaagtaacaaaagccctagtttaaaagattataaaagtagttctaaaagatttaaaaatccttatttttataagctttatttaatattgcttaatcatcttctcaaagatttttgagagtaaatccaaatttgaaaagtgcagactcatttttatttttcttagatggtttctaagattaagtggggaaaacagaatatgtggggatggaggaaaacattagtttatggccttaccaatttattaatgtawtatttaaaaatatacgatttcattctttacctttttgaattggtctatagattagttgacatgcatacattttgaaatgtttctttgctttggaaatttctatacctcgaatggtacaatgaatgtcaacagtttcttccactcttcctacccataatctactttttcttaagtaatatagattctaggagtcatatcagctatttaaattacagtaactcaatctcaggattatttaagtaactcaggcttaaatttattttgaataatcttgttcattcatatggttctttttctcaatttttacttktatgtcagataaaccaataagtattattaaattrtacttgaacaaaaataactaggtaacatttatttcaggccaaagawgatgatttaaattcattcaatgccacagacctgaaggatctctcttctcatcaattgaatgagtttttagcacagacgctccagagggtaagtactagctcaaaatcttagaaattaaaatggacagaaaggcacagcatttatgttctacccaacttggcaaaagattattaatgtggaaactaatggggaraaaatcatttataaaatttattcatttctttaaaaaagcattgaatgcttactgtgttttatattgtgctaaatatgaaaatatgtaagaaaggatataccttatcttcaaatagcktataatctagtaggaaggggaacacatgcaaaatttagcaataagccaggcacggtggctcacatctgtaatcccagcactttgggaggccgaggcaagcagatcacttgaagtcaggagttcgagaccagcctggccaacatgatgaaatctcgtctctactaaaaatataaaaattagccgggcatggtggcaggtgcctgtaatcccagctactcaggaggctgaggcaggagaatcacttggactgggaggcggaggttgcagtgagccgagatcacacccctgtactccagcctgagcaacagagtgaaactccatctcataaaaaaattttttwaaaaacattagcaataaaaggaggcatactttaggtatcatttggaaaaacttaattagtgaaagactcttccaactgggggcatcagagagggaattttggaggagacttgctttgcacccccagggctagcagggaggtagaaattgaaggtggagggagcagcaagggctggaattcgtctgcagcattgctggagtaaacagtagcactgggtaaggaagtcagtgaaggtaacactagaaaagctggtaggaccagatgtgatgactctcaatgctaagctaagaaattttagatcttacactgatcagtaggaaaagattttaaaaatccagcagaagagtcgggatgaaatgctgggttgtagaaaactaatctggggccatgaaggttgcatggtggtgaagttactagttgggagactggcaggagtaccggacttgagggagtaagttgcggggagaggagagaacaggacgtgagaaagagtttacacagggtgaaagcacagagctctgtgactgactggctataggggttgacagtaaagaatccaagcagattttaaggtttcgaatctaggcaattgaaagaatagatgaaaccgaaaggagttgctgcattttgagataaaccaatgactggattttaaagacttccatgaaagggaagtcttcagtctaaggaccttgagaagraagaagatttggagcggaattttctgtggaattgatgcaaaaattaggaataggattttgacgcaacaaaggacccatcaaagagagaatctatttttagtgcatcgggtcatcatggtttcataaattgctctaccactggtgggtggtctagggccacagagagagagaacatggtagggtgattctggaatgggtatagcaaaacttagggcaagtcagggagccttggagatgaccttaaccagttggtctaccagggtagacttggagttgcatgtgtccataaggggctaatggactaaattattagcgacaggattagtagttcatgaaagcagagattggttagtgagtgtggagtcctgtaaggtaaggaggtcgtggttggaggggagagttatcatctacctagaggcacctctgcctctcacaggcactacaaactctctgcttgtccaaactgaactcatcttttttctttccttcacccaaacttgtcctcccttttagggtgagttaaggtagggataggatgcttataaaccccctgaaattgtatacagaagtttgtattcatgtagtaagtgtattttccccctagggaaagagtccacattattcatcagattcccaaagagatctataatacaaacatttaagaactgctattatgtaggtatgcagataatttaacagggatttcagaggaaatatacaaagataaagctagggggaatcaggcaaaaattaaggaactatgatttcatctggagaatggaattgcatttaagatatataagttatagagaataactagaaaaactctaggaaaagtctgaaagataatatttatacatgctaaaaagtctaagaagagcaattctcatttaatgctgaatacttcacaaagtaaattatccctgtgctcccagtagaatatcctcatctggaataagtttgcacagaatttacttagtgtgcaatttgtttcttttatttttatctgacttatttctatattataaaatatttaggattttaatctggctatgcatttctctccagctcctttcttccaaggaatcctgttgaaatgatacggtatacttctttattttgctcttaggcacctcttccattggggcacataaagcgaatgcaagaggtgtacaacttcaatgccattaacaattctgaaatacgattcaggtacatcattttaacttgtctctgtggaagaaagcagaaaactaaactcctttgaaagatggagaaagggaatgcagagtatgagacatacttgagtcttgagaattccttgtcaaactgactgcttctatataaatacttatagtggtatttaaggaatagttgcaatatgtaatctggtagtattaatctttttgttagactttgctctaaacctctcttgccttaaaagaaaaaaaaaaaattagaatgaaggattccgtggtaaataggctttctccacaaccaactaaatctactttgaaatgggaatagttagaaatattttattctattatatgttaatctttcttaattcaaatttgtaatgtgaggcttaaaccaaagtttaattccttcagaaattgcatgtataaggtatgtgagcacctacctgatctttcttaattcaaatttgtaatgtgaggcttaaaccaaagtttaattccttcagaaattggatttataaggtatgtgagcacctacctgatccagacctttaaaaatatatgatctttttcaagaaccagctcctcttctttctcttcaccaattattaaattgtatatataaggatttgagagtctcagaatcaagacataccataaagtggtgtacagtataactatagtggggttattcatatcactacagaagtaatattaagatatacctgtcatatcctgccccttcctcattttctactccatgctccccccaaatcctccttttagatggctgcggctctgcattcaatccaagtgggaggacgcaattcctttggcgctaaagatggcaactgaacaaggaagaatgaagtttacccggcccttattcaagtaagaacccactcagaccgtactttgaattcatctaagaaacaggaagaaaactgtcaaatatttaaacgtaatctatatgacaatattttttaatttgttaaagtttatcagtataattttgraatagggattcacacttataaatrtttaaaatgtgaaataatttcattcctctttttagaagcattatatatggattactattttggatcaaatagagttagatactgataaaatagaaataaatcaaagatagccttatatacacaaagatttttaaaggtaactagaagataattggtgggtaggtatagacaagaaagaragtctgaagttaaatgtaaggagaaataagcagataaagctaactcttttgtgttcaaatgttgcatagaggtcaagggtaggttgcttgacataataaaggaatgcttagtgagagggggataagttgtatcttgacagcaagatacaagaatatctcagtcaaggtctttatgaattttgtccaaattctggaaaaaaaaatcatgccataaatatccatgattacttttgtttgcttttcatttacttcacaagtatttaggtgggtgcaaaagtaattgcagttttggccatcaaaagtgatggccatataatatcataaaacttggcaaaataagtcattatctcttttttgatgtgaccacaaaattaagttttaagtatattttatatgctttccctaattaaaacccatctagctttgaattgagtaaagtatactttaaataggtttttaaataagagtatacttgggccgggcgcggtggctcacgcctgtaatcccagcactttgggaggccaaggcaggcagatcacgaggtcaggagtttgagaccagcctggctaacatagtgaaaccctgtctgtactaaaaatacaaaaaattagccaggtgtggtggtaggcacctgtaatcctagctacttgggaggctgaggcaggagaatcgcttgaacccgggaggcagaggttgcagtgagctgagattgcgccattgctctccagctcctccagcccgggtgacagtgcgagactctgtctcaaaaaaaaaaaatgaataaaataaataagagtataccttttgtgggaaaaataagtatttctgttttatgatgtttatagtagttacattaaaaatgactaatcctaccttttgtatggtaggtcctttttatttagtgtatttattatttatttcgtgtattatttattatgtatttattatttcactgtggtcaggacttttattctcaattatttgaagttttcagaaattctatataaattttagtgttttcatactcttaaaatcttgattaaaaaattttttttaaaagcagtttttaaaaagaaaggctttgaggctcactctcacatacagggctgatatttagccaggagatgagaggactctgttcaaataataaaatccttccatgctgcttggtaaatagccacgggtcccagccactctagcccttccctgtaacttgctgcaaaatgtctgatctgccagtataaaggccagtctctggtacagaaggaggtctctgggaccctgtggcaggaccatacccatctgattggctgggactggtgccttatttgggtgatgctggctgtcacccctgctgacatcctttaatttaatcttgggtattgacttgtgttcttattctctttctccttcctttttcctttcctctgaaccccttccctcctttctttcttctctccctccctttctcctcctctgtctccttctcgcctttctttcttttcaattttttcttttttggcagggatcttgctgcctttgacaaatcccatgatcaagctgtccgaacctaccaagagcacaaagcaagcatgcatcccgtgastgcaatgctggtggggaaagacttaaaagtggattaaagacctgcgtattgatgattttagagatttctcttttttaaatggaattcgtaaagaaatataaaacttcagctcmcaattaaaactgtctttttagttttggctttttattgttttgttggtgattttactgaaataaagttgagctacttcttcttatagtggcatattctttgtaaattttaacaaggtttaatcttttgatttacaaattaaaaaattttgaattagctttatattaattttctctcagtatgatcacaaaatatgtcaaggtagtattttacctgatatatgatttaaattcattaatttgaatctgctgcagattcaaaaattcaacatggttaggattttgctttgctttttaaataaccttaaacataagtccgggcgcagtggttcatgcctgtaatcccagcactttgggaggccaaggcgggtgaatcacctgaggtcaggagtttgagaccagcctggccaacatggtgaaaccccgtctctactaaaaatacaaaaattagctgggcgtggaggcacgactgtaattccagctactcaggaggctgagggaggataagcactttaatctgggaggcaggggttgtagtgagccgagatggcgccattgcactccagcctgggcaatggagactctgcctcgaaaaataaaaaattaaaaaaaaaccttaaacatgaatgcttagttgtatttgcacaccacctacctggtggacagcagatgaactccttaccagaatgtgtcaaccctagcaggagctctcaactccctcctcctggacccctccggctcatccagtgggcttgtcctggtctcctgtccatcaggggtcagatggccaccccaagcaccagtctttcccatccctctcacagtctgttcaaagacaacaaaataacttgaaccaaataaaagacaaacataacaaagcacccctgccaatgcaacgtagtgccccagggcatctcagcacacatagctgtactaggtagaattattagtgtattagctctattagttagaattaattagaaccatagctgtgttagaattctttgattgcaagtaacagcaatccaagtgaccagaagtcaaaaagggaaaaggaagattattttaaggatgctaggtatggggagattatcagaacctgggacggacagaaggggtctgatgcccaggactgcagcaccgtcagtgctcctgtccctcacctctgcctctctagtccacgttgtacaggccggccactctccagctttactgttacaaatagctctgaccacatggggaggctatcacaattccaaattcccagaggtgagactctaacccaggttgggtccacctctggtcaaataaattgtgtaagaggaatggtgtcttagagtataattgttggcatggggtgggggtggggagcggtgtcctgaccaaataacccctcaaagtgctaatgcagtgactaaagttacaataggagtgaacacccaaggtgggacaggtatggaagagacatattcctgcctattcccggaatcctgacttttccctggctctcactctccctagcagtttttgttttgttttgttttgagacagggtctcactctgtcgcccaggctggagtgcagtggcatgaccatagctcactgcagcatcagcctctgggttcaagccatcctcccacctcagcctctggagtagctgagactacaggcatgcaccaccatgtctggctaatttttgttttgtagagaaagagtttggccatgttgcccaggctggtctcgaactcctgggctcaagcaatccacccgcctcgttctgtcctcttggtcacttatctatgctgcagtgtgattctttctccaggctctgctctcccttgccttccttgccaagaatacagagaagggagttcagctcaaatcactggcataagatcatgttctaagattagactttagcaaatccatttacccaaatactgctctttaaggcttctgccctatgagcttacaagacaagctgtaagttaatgtcgtttttagttatcacttagtgatactgaaagtgaattgtgacaagggatgcttgaagggtggcatggaagggtgctgtgaagaaggtagagggcgctaaagacaaacttaatcctgcttgctggtttacctaggggccagctcggtgcagttcacatttcttcagttcagctagtaagcatatgctaaatgtctttgtgccagatcggatatatacataattatggatgaacacagacaagtaatttcctagataatactaaagaagagctatgctaaggcatcccagagaagggccacttaacccaactgaagaatttagggaatgcttcctggagaagaaaaggcctaaacaggcttaaggagtaagaaagatctagacaggcaaaggaagttggaaagtgcgtttctggagaaagaataacaaggaagactctgctccacaatgcgtagggcctgagtttagaatcctcaaactgctgggggtgacttacatggctgggaggtggtatcacctggaagctccttccctcactagtctgatgcctgggctgaaattactcagaagctggtctcggcagtgacagtcaactggagcatgcagtagtttgggttgttttgcagcatgaagatagttagacctcttattagtcatctttatacagctttatccatcaccagacagtaagcctcatgaatgtagagcgtgtttgttatttatttcatccccagcacctcgcatagagcttgttacataacaggtgttgaaaaaatatttgttaaatgagtcaaggaatgaatgggggggggtggggcagaaggttaaggtggttcacatgtgcagtcctcagttttctcacagatgtaggaagtaaggtctccttctgagaattagaggtggatgtcgagaaggtcctggcagaggggtcaaagttttggaaagtcactgtgggctggatggaataaaagggcaataccatcaaactatgtgatcacaggactttctctatcagtgtcttctgcctgggtgaacagatatgacagtttcttttaattttaaacagggtcttgctctcacccaggctggagtacagtggtataatcataactcattgcagcattgactgcctaggcttaagcaatccttccaagagatggctgttttttgtgatgactaaggggatgggtgttattccaagtgtagacataagtttagggatgcaaaggaatctcagagtgcttaagaaagagtggtccagtgagcgactagggaccagcttcctaggatagtaagtgaggatgctggtgggaagtggagggatgaagagactgactggaggtcaggtccaaggctggcagtgactagagtaaaagggcagctggaaggttgtggtcagaaggtggaatattggaatttcagatttcttaagtgtgtcaaattcaggtcgtgacagattccagggtgatttcttaagtgtgtcaaattcaggtcatgacaaattccagggtgcagtcatggtgtgggtatctgaagagcaagtttcaataaggctcaaggaagggtagctatttgtacgcttcctgggaagctgtcagcagatgagagggactctgggtatgagtataggtgtttttcttgagcaaccatgtctctcttcccaacagaagtctgatttagtggaaacagacttttcaggatttttctagtgcaataatcaaatctctaaaaattggcttacgatgaaagtgctgcttagtcaaaatagcatctgcatatctttgatgccgtaatcatgctatccagagttccttaataccaatggtaataaggcgggtgcagggagcagttatctgtggtgaagaagcttaattgggtgagggatatccatgtgccaagatgaaagagcatttatggaactttatagctttatgattcatacagaacatttataaagcattatagttacatggagtattggtgtccagatactagtaatcacagacacttctataatatttccactatgccaggtgttgtgttgagggctttacatatatgaactgacttcatcctcccaatagccctttgacatatatactatcatcattaccattatcttcattttacagatgaggcaactgaggcccagagaagtcaaatcacttgcccacaagtcatacacttagcaaatggcagagccaggatttgatcacaggtaaatcctgcacatactggaaggaggcagttagcccctaggccttctgataaggaaatacagggtaatactcacctaatcaaggctaataagtagtagagctggactctcatccacggctgtctgagcccctaatctccaagtcagagtggttcatttgcccagatgacgacctttagttgtgaaaatgatctctggcctttgcagtcttccctggtggaaagaaagcttcagaaaaccttactggtgacaggaagtagttgctcaatacatgtttgtggaataaacaaatgagtgacgattgccacactcccagtgtcacagttggcccacagaacacgttttacagttgagtaatctcagataaagacaggaacatggtgtttataagctgcccttaatggcagagaacacagacagaaacgagggaagagagagaaattggggaccctgaagaaagggggccagcagcaggtaggtgccatcagggacaagaacagcacctcccagggtgggagaccccaggcctttctggcagcaggtctggatggaaagtggacaggaggctcacccgtctgcatcccctgctcctgcccctgctcggctacaaaaaccaaagggacagcaggtacctcaataaatatttgtccaatgcatgaatgagtaaaggtgaaggagggggagtggtttgaaagtctattctcatccttccagctgaccacaccccggtagccactcctgcataaagctctcccctcctgtgaccagctgaggacctcaggctgcagcggagccatgcccagatacacggtgcacgtacgtggggaatggctggcagtgccctgccaggacgcgcagctcactgtgggctggctgggccgggaggccgtgaggcgctatatcaagaataagcccgacaatggtggcttcacctccgtggatgacgcgcacttccttgtgcgccggtgcaagggcctgggcctgctggacaacgaggaccggctcgaggtggccctagagaacaacgagttcgtggaagtgggtgagtggctgcaggagagggccgcgaacgggtgcggtttggcctggcttagtctttgcagcattgaacccccacctcagggaaaatgatgagcagaggtcaggcttgccgaggctggccctgtgcaggcacatgccacgcctctggggatcttaagtcctcacacaaccctgtgagatgggtaggattctcctccacctctgatggaggagaaatcagagaggaggtaacttacccagactccagcagctagtaagtaacaaagactagactggtactcaaggctgcaggtctgaatccctttgcagtgactgaatcattttgaggttattttgcctttcgaaagaatccacccccacccccagactggaggccggcagcatagcatcagttcagattttgaagaaaataaagctgggaatggggatggaagtggaattctgtcttgaactttcatctaaacccctggtctctgccctgacacctacctttctgctttttgctctcctcctacataaagatgctaagaccacatgaaaccatctgaagcagttttaaagcagccatttctatagaattcatgggccaatgatgggccgttccttggtttaacagggggaacatggctgtacaatgtgatctgtaacgagtctcccgtgcattgttttagttatagagggtgatgccatgtctcctgacttcattccatctcaaccagaaggagtttatctgtatcctttcccacaggctctttggtctgctctgggggtggctcctgcagatggtggggctgggggtttttccacaccaccctatatgttcctttacctggatacagatacagcaagtaccgggagcctgaaaaggtaagcttcaaaccactttctttttcttcagaaaattaaggccccttattt

SEQ ID NO: 94073 - DNA, 29256 bp, Homo sapiens
tgtctatctatctatctatctatctatctagcgcaatctcggctcattgcaacctctgcccccagcggtcaagcaatcttcccacctcagcctcctgagtagctggggctacaagcatgtgccaccgtgcctggctaatttttgctttttggttttgggtttttttctttttttgagatggagtcttcctctgtcacccaggctggagtccagtggtgcaatctcagctcactgcaacctctgcctcccaggttcaagcaattctcctgcctcagcttcctgagtatctgggattacaggcacgtgccgccatgctcggctaatttttgtatttttagtagagacagggttttaccatgttggccaggctggtcacgaactcctgacctcaagtgatccgcctgcctcggcctcccgcagtgctgggattacaggtgagagccaccacacccagcctaatttttgtattttttgtagagactgggtattcatcatgttggccaggctggtctcaaactcctgacctcaggtgatccacccgcctcagcctcccaaaatgcagggattacaggtgtgagccactgtacgtggcctataattttttttttttttttgagatagtgtctcactctgttgcccatgctggagtggagtggtgtaatcatagctcactgtagtctcaaactcctgggctcagccctggcgtggtggctcacgcctgtaatcccagccctttgggaggccaaggcgggtgaattacctgaggtcagaagttcaagaccagcctggtcaacatggtgaaaccctgtctctactaaatatacaaaaattagctgggcgtggtggcgggtgcctgtaatcccagctacttaggagactgaggcagaagaatcgcttgaacccagaaggcagaggttgcagtgagtcaagatcgcacaactgcactccagcctgggcaacaagagtgaaacttcgcctccaaaagaaaaaaaaaaaaccaccaccaacaacaacaaacaaaaaaactcctgggctcaagagattcttccacctcagcttcccaagtagttggaccataaatacacatgaaaattagaaaacatgcatgtctaatttttcttttttttttgtagagatggagttcactatgtttctgaggctggtcttgaactcctgggctcaaccgatcctttcacctcagcttcccaaagtgctgggggattgcaggcatgaaccactgcacctggctatatattttaatgagccttcattctatgccatgtgccttgcatacattttctcaaataatcacagaaagccctgccagtccctgagggttatccccactttccacatgagtacaactgaggctcagtgaggtcaattgacttgtccagggttgcacagatatactgtggcagaactagaattcaaatccagatctttcctggttctaaaggctttttttttttctcgcccaggctggagttcagtgacatgatctcaactcactgcaacctctgccctctgcctccccagttcaagtgattctcctgcctcagcctcccgagtagctgagattacaggcatgcaccaccacgcccagctatttttttttctttttgggggcggagtctctgtctgtcacccaggctggagtgcagtggtgcgatcttggctcactgcaaccttcacctcatgggttccagcaattctcctgtctcagcctcccaagtagcttggattataggcacctgccaccatgcccagctaatttttgtatttttagtagagatggggttttgccatgctagccaagctgatctcaaactcctgacctcaggtggtccgcctgccttggcctcccaaagtgctgggattacaggcgtgagccactgcactggcctaaaggtttttttcgttttgtttccaactgggccattattatttccaacctataagatggaagtaattgtttctgccactcgtgcctcctgtaaggattaagtaagataaagtctgtggagaggcctctgttgacaccagctctagctcagcactgcttctttattcccccagggtaattacctaaacacaagcctttcattttatactaaggaggctggtgaacctcttcttaatctctgggagatgatatcgttggatgtccattggaggcagctgaaagtattagatcagaatcagaactgccaggtcccttcccacgtccaagcctgctgaagcttctttcatcttctgggaactctgcatctctgatctcccacccaccccacgattattggaagtatacaatcctgtctgccctttcctaggggaagtgcggaactacatatgatacatctgacatctccagcttccaacttcgggagaggagactttgcggttagctggctattgtgaagtcagtttttctctgcccccagcaaatgttgtgatgtggatagaagtggggcctcggcacagccaggcgcagtagctcacatctgtaacccagcactttgggaggccgacgtggacaaatcacaaggtcaggagtttaagactagcctggccaacatggtgaaaccctgtctctactaaaaatacaaaaattagccgggcatggtggcatgcgtctgtaatcccagctatttgggaggctgagataggagaatcactcaacttgggaggcagaggttgcagtgcgctgagatcgcaccactgcactctagcgtgggcaacagagcaagactccatctcaaaaaaaaaaaaaaagagaaagaaaagaaatggggccttggcaaagtggggtgcatacatcatcccttgtcttggcttgcctggcaacacacaagcctggggcactgcccgtgctcctgcataatgtatgagcccatggtaggaacaaaacaccagcaccagcgagtctgggcactgcaggccacggacgtgtccaggggccttgccaaggctgaagtctctctgttggcagaatatgcagaatatgtgttcctggaggccttttgtagggctgaggtgagaactggcctcaacttggtcctcaggattccatcagacaataagaccgcccaaggccgggcacagtggttcacgcttgtaatcccagcaattcgagaggctgaggcaggaggatcgcctgagcccaggagttcaaaaacagcctgagcaatacagtgagaccccgtctatacaaaaaattttaaaaattagctgggtgtcgtagcatgcacctgtagtctcagctacttgggagactgaggtggaaggatcccttgagccaggaggtcgaggctgttgtggtgagccatgattgtgccattgcactccagcctgggctaccgagtgagactctgtctcaaaaaaaacaaaaacaaaaacaaaaaccggaagacagcctaagaagacaatcttctttaggatcaataatggtgacattagcaacagctagacttctgttttctgggcttgaaacgccctctgagagggccaggggtggccaagagggtggctgagaccacctcagtatggttgacagtgggagggaagatttggatccagggacacagcccctggcagtttccgtggctgcctcatggtgtaggaaaccccaggagcagcagctgtggtgaggtatgttggggtggagaacatggacaaaaataggtatatggtggcattgtttttaggggaaaatgccaggattcagccatcgtttaggaagtcggaggcctccatagagaggggtgcttgtgtgagcgtgcatgtgtgggtgtgtgcaagtgtctgtgtgtgtgtgatctaaaaaggttaggaatgaaacggggaggtctgagtgccttgaaagccaaggaaattaggacgtgtggaaaacaatgcttcattcgtggatggtgtttggtttcaattcattcatagaatcagtgagtattggctgagtgcagtggctctggcctgtaataccagcaacctgggaggccgaggtgggaggatcatttgaggcaggagttggagactagcctggccaacatagtgagaccccatgtctactttattaaaagaaaaaaacaggccaggcgcagtggctcacacctgtaatcccagcactttgggaggccaaggcgggcagaacacctaaggtcgggagttcgagaccagcctgaccaacatggacaaaccccgtctctactaaaaatacaaaattagctgggcatggtggcacttccagctactctggaagctgaggcaggagaattgcttgaatccagggcggaggttgcagtgagctgagatcacaccattgcactccagcctgggcgacaagagcaaaactccgtttcaaaaaaaaaaaaaaaaaagaaaagaaaagaaaaaagaaagaaagaaagaaaaagaatcagtgagtattcaccaaggctcccagggctaggccaagtactagagctcaggatacggagatgactcagaccaggccccagacacttgcagtctaattgtggagccagacatggaagtgaggaattcaagtatcttgtgagaagtgcgagaacaacagtatctgtaggatgctgtgggaattcacagtccaaagcagccacctctgcctgaggttggcagggagacctcacagaggcaaaactgaggacgtgcttgagggatgaggaagaggtttgaggggaagacagagggtgttccaggcagagggatcagcaactgcaaagctgtggaaatgtgagaccctacacactggttcaggaagcttcagcagatcctactgaaggtggcttatgcctgtaatcccagctacctgggaggctgaggctggaggactgcttgagcccaggagttcaagaccagccttaacaacatagcaagaccacatctctaaaaattcagaaaaaaaggctgggcacagtggctcatgccagtaatcctagcactttgggaggccaaggcgggcgggattgcctgaggttaggagttcgagaccagcctggccaacatggtgaaaccccgtctctactaaaaatacaaaaattaggtgtgcgtggtggcagtcgcctgtaatctcagctactcgggaggctgaggcgggagaatcgcttgaacccaggagacataggttgtagtgagccaagatcacaccattgcactccagcctgggagatgagcgaaaatctgtctccaaaaaataaataaatcaattaataaataaatcagtaaaaaagaaccgggcccggcgcggtggctcacgcctataatcccagcactttgggaagctgaggcgggcgcatcacttgaggtcaggagttcgagaccagcctggtcaacattgcgaaaccctgtctctactaaaaatacaaaaattagccgggtgtggtagtgcgcgcctgtaatcccagctactcgggaggctgaggcaggtgaatcacttgaacacgggaggcggaggttgcagtgagccgagatcgcgccactgcactgcagcctgggcgacagagcgagactccgtctcaaaaataaataaataaataaataaataaataaataaataaatataaataaaatataaaaagtagcattgatgtttacaatatccctgagcggcaggcgtttctcccttttgcagatgctcagtggcttggccggagatacatccaagtggtgggtgtagcctgggggttcaatcctcctgtggcgccccagaacccggtgcctcctccaacgtccggcatctgatgaggatccgacccaggcgggcggcggcgggattcgctcttccccttcgctccccgcgagaaagccccgagggccgcggcggcgcagagccggtgacagttgaagcttaggcgggaagagggaggcgcgaggcgggaagagggagtttgggcctcggcagccgccgtacaaacaccgctctggtcaccatggcaacagcgggatgccgcgaacggcttctgggcggggccggtccctcggacgattggacctagcttggcgcggaatccgtgaattgcccgcggcccgagggtgcaggtgatgggtgctgaccgactggggaagcccggagtgtggggactgaggaggggagtggcctggggcgcgctggagcctgcgaggaaggcgccgcctcggatcccccgccccccattccccttcccgaattccaccctccggcccagccatggcctcagtttccccaaacaggaaagggaaggagggtgggcaccccggtctaacggtgcctctcagcctctgagacccagaaccttccttctgcagctcccggactgactggctctgcccttccccatggacgtaagtccgggccccttcccctctctgggccccctcagcgccctctcctaaccccgaatgggcctgtcttccagcacggactggggagggggcttctacccaacagagactacaacctgccagctcaggacgagagctgtcaggaagagtccaggaatggacttcccacgggagggcacatttctggtattcctggcaagataaggagttgactaagtaatccacgagaaaaggcatttccggcagaggaaacagcctgggggtgagagggaggctgcagcatttggggaactgctagggctatcgtgtgtttggaagagggggagggagagaggtaggcagggctaaattgggaattttgtcactgacataaattttaagtgccaggcgtggtggctgtcgcctgtaattccagctactgaggagactgaggtgggaggatcgtttaagcccaggagctcgaggctgcagcgagccatgatcatgccgctgcactccagcctgggtgacagagtgagacactgtctctaaaaaaattgaccaggtgcggtggctcatgcctggaatcccagcactttgggaggccgaggcgggcggatcacctgagatcaggagttcaagaccagcctggccaacatggcaaaaccccctctgtactaaaaatacaaacattagctgggcgtcgtggcgcgcacctgtaatcccagctactagggaggctgaagtaggagaatcgcttgaacccgggtggcagaggttgcatgaaccaagcttgccccactgctccagcctgggtgacagtgatactccgtctcaataagaataataataataaaataaataatagaaaaagttttaagtgagttactgggagccattgacggattgtaagggagggagggatactacacaaggacatctggtgtggaaaggggcaaaattgcaggttggatgacaggagccggtaatgtgggctgagggatggtaaaggagtggcaagggagtcagagacaagagatctctttggagaggcattccagaaggaaaatcagccctagaagactctagaatgctgaagtgcttgatgttgctgaactgggaatgatagggaaaaaggcaggctcagggcacaagataatgagtcagggtgtagtcctgttgacgctctccccaccatctggtggccgttcctctcccagccacctcctcgtccctcatggtattcccgtgttcctgcagcccctctccatctccttgtcaccccttcctcctgtactcgtccaggcctcctctagcccgtggaatccaaccccggctcctgtcagcagccctcccctgctgctccccatccctgccatcgtcttcatcgctgtgggcatctatttgttgctgctgggtctagtcctgctgactaggaactgcctgctggtgaggggtctggtcggggataaagggtgggctctggggaagaggaatcccggtaacctgtcccttcatctgcaggctcttaccctgagacacttgacatttagcccttgcatctatccgttttgtggtaccagggggtccctcctctcctgtccccagccaaaccttttcctttcccctcgggaaagctgccttggctgtcactacctgctgcctattccacatcctgaaccctgtgacctaggcccagggctgctgcgcggacggtagctccccctgcaggaagcaaggttcctccgggcccccagactgctgctggacctgtgcagaagcctgcaactttcctctgcctagcccggcccacttcctggatgcttgctgcccccagcccaccagagctgtgagttccattcctaccccctgccccactgagccctgatctaggtatgatcggtgcattcatttttttgctcaacaacatttattactgagcaccttctcaaggccaggcacggttccagggcatgaatcatgtgcagccaggtaaaaacaacctatcagataatgcctggtgatgaaagctacttgaagaaaataaaatagggtgccagctggagaaaggtgatgtgggtaacatgtagagcacatagccagcacttctaaatgaaagtgagctaaatgaaagttagctaaatgaaaaaacagctcacacagctcctttccgttcaccgaatgaactgtgttctaggtatagggcctctttacggacctttgtttttcccaacaaccctgagaactgagaactaagttgtttttttttctttcctccctccagagctgggtcctcccgtctcctcccctcccctcttcttttctttttgttgttgtttgagacagggtttcactctctcgcccaggctggagtgcagtggtgcgatctaggctcactgcaacctccacctcccaggctcaagtgattctcctgcctcagcctcctgaatagctgggattataggctcacacaactaccatatggctaatttttatatttttagtaaagacggggtttcatcatgttggccaggctggtctcgaactcctgacctcaaatgatccacccgccttggctgcccaacgtgctgggattacaggcgtgagccaccatggcccagccatggttttttttttttttttttttttgagacggagtctcgctctgttgcctaggctagagtacagtggtgtaatctcagctcactgcaatgtccacctcctgggttcaagcaattctcctgcctcagcctcctgagtagtaggaatacaggcgtgtgccaccacgcccagctaatttttgtatttttagtagagacggggtttcaccatgttggccaggctggtctcgaactcctgacctcaggtgatccagagctgggtattttttaaaacctatatgttttttctgattacaaaaagtattatttacaaagtatacatatagaaatacatggaaagtaccaatcactttacaaacccgctctctatcccaaagttgctgtgttttacatgtatctctcatatactaatacagtactatcactgctgtattttaccattatttggcaaaaatggggtggtatcatgtaggttatttcatcatacctgctactgtccccctatcccccgccttttttgagacacgatcttgctctgtcacccaggctggagtctggtggtgcaatcatagctcactgcagcctctacctcctggactgaagcaatcctcccacctcagcctcctgagtagctgagactataggtgcatgccaccacacccagctaatgtttatatctttcacacagatggggtttcatgttgttgcccaggctggtgttgaactcctgggctcaagcgatctgccatcctcagcctcccaaagtgctgggattacaggagtgagccaccatgcccagcctctacttgccctttttttttttttttttgagacgagtcttgctcttgtcacccaggctggagtgcaatggtgcaatctcggctcaccgcaatctctgcctactgggttcaagctattctcctgcctcagcctyccaagtagctgggattacagggatgcgccaccacactaggctaattttgtatttttagtagagacagggtttctccatgttggtcagggtggtctcgaactcccgacctcaggtkatctgcctgcctcggcctcctaaagtgctggaattacagatgtgagccaccgggctcagcctctacttgccctttttaacctgacatcacacttcgccacctatccatgcctgtatgtgtagacacataagggttactgtcctcctcctgaagtggggagtaagctggcttagggaagtttagtggcttctccagagtgttacgcaggagagccttgcatcgcaaatagctccacagcgttagctgaggtagaatcctcaggggagaagcctggcttggagaagacaacctgtttctatttgtgggtttaaagatgttaaatgtaatcgaccaccgtcctgaggaatgattattttgagctcagcgattcagacagcaaagcccctgcccttggagtggtgacattccttccctaggatggaaggggaggataaaagcaaattcataacttgggcatatggtgattggtgctaatccctggcatgttttcagttttgaagtaaattgtggggcaaggagcgctttttcagataatcaccttctggtttgccaggggcagtcagcagaggggtctcaggtttggggctgaggggcagaagggcaaaaggaggagaccttgggttctgaaaactcctgtcttggcgtggtggcactcgcctgtaatcccagctactggaaaggctgaggcaggagaatagcttgaacccagtaggcagagattgcggtgagctgagatcatgccactgcactccagcctgggtgacagagtgagactctgtctcaaaaaaaaaaaaccaaagcaaaaaaacctcttgccttagaggagatgctccattagaaaatgatttctggccccctgtcctggggatgccgccccctaccccttctgtctatttgaagtgaatagccagggactcatcacctccttgggagagaggatgggtgaggtgcattgtaaggatagactgggccttcccaccttccccacagagggctgcaagaactttcaaacctggagacatcaggccctgatcctctctggtttctgctggagctaggaagggatttaacagggtggaggacagggcaggttctttctgtccttgagctgtctttccacaaagtatatttaagtccctccctcttcagtttccttgtaataacagcccagaaggttacaaatgtcttgccacttggcagctgtagacactgaggcttacggaggttggagtgacttggaggttatatggctggatcagctggaatagaaacccaggtttctcttccttactgagggagaaacatgcctgctcgcctgctctgcttcttttttttttcttttttcttttttttttgagacggagtcttgttctgtcacccatgctggagtgcagtggtgcaatcttggctcacttcaacctccgcctctcgggttcaagcgattctcctgcctcagcctcctgagtagctgggattacaggtgcccgccaccacacctggctaattttttgtatttttagtagagatggggtttcgtgttagccaggatggtcttgatctcctgacctcgtgatccgcccgccttggcctcccaaagtgctgggattacaggcgtgagccaccacgcctggcctgctctgcttctttcatgtgcatgttgcaaggttctcattcattcattcattcattcattgactcactcaccaaagatttatggagttactgttgaggcactgtctagggccttggggactcagcagaaacaagatggagaaggtccccagcctcgcagggcttccattctggtgatggagagagagaaataaccaggccattacaacagagggtgagaaatgacgtgctatggagcagcggttgctcagccctgcatgcgatcagaagcaggtataggacttaaaaggaaagccaggcatctaggccccacactgaggtctgggctggggctagagtttgtgaatcttttacaagttctcatatgattctgatgcacacaggttaagaaccactgctgagggaagaagctatgataagaatagctctctttcaggccgggtgcggtggctcatgcctgtaatcccagcactttgggaggccaaggcgggcagatcacaaggtcaggagttcgagaccatcctggctaacacggtaaaaccccgtctctactaaaatacaaaaaaaattagccgggcgtggtggcgggcgcctgtagtcccagctactcgggaggctgaggcaggagaatgctgtaaaacccgggaggcggaccttgcagtgagccgagatcgtgccactgcactccagcctgggagacagagcaagattccgtctcaaaaaataataataataataataatatctctctttcttttttttttttttcccaggcagggtctctcttgtcacccaggctggagtgcagtgctccctctgttgcccaggctggaatgcggtggcgtaatctcggctcactgcaacctccgtcccccaggttcgagtgattctcctgcctcagactcccaagtagctgagattacaggcacctgccaccatgcccggctaaagtttgtatttttagtagagacaggttttcaccatgttggccaggctggtcttgaattcctgacctcaggtgatccacctgccttggcctcccaaagtgctgcgattacatacaggcgtgagtcgccatgcccggccaagaacagctctctttcgtccagcactcattacttaccaggcatcgtgcttagttccttccaccgattcccgacaatggccttatgaactaggtcttatattttttcattttattttattttattcttttgagatggagtctcactctgttgcccaggctagagtgcagtaaaacaatctcggctcactgcaatctccatctcctgggtttaagcaagtctcccacctcagcctcccaagtagctgggaccacaggcgtgcgccaccatgcccagctaattttcgtatttttaatagagatgatgtttcaccatgttggccaggctagtcttgaactcctgatctcagatggtgcgcccaccttggcctcccaaagtgctgggattacaggtgtgagccaccacacctggccttaggtgttatattcctataaatgaggaaactgaggctgaaaaaatgaattagccaagctgaggttcaaacccaggccttactgactctagggcctgagctttaaccatctatacgatgatggctggctctcacagagacaacaggaaaaattcaagtgaaaaactctcctgagagccaggagagacacaagggttaacagtcttgcggagtccttgtttaatgtacttaaacagcagattccttccagaagccacatggctgcttgtaacggttgagaaatccattagccagttattaatgacaagatctaaacccttccaagggagagagccaagaaatgcttttaataccctcttttctgaggtaatggcagcagagcctctctcagccatgggttctgtgcacagaatgatggtgtggtccttcaaaagcccgcagaagtgatttcatccccagactgagactccctagagacaccccaaatcacaccctcatcaaacacaagaaaatcacttctctctcccccttccaccatgacggttctagcctcccccaaggaggcagttctgttgacagtagcacagcccaattcagacccctgtccctgcaggtggcaggtcccctcccctcactgcagcccctagtgatatctgatctcaccagccatctgacaccacaccctgaaacctcagctgttggaaaggtcattcccctattcctggcttggccaagtttctgattgaactgtacaactgtgactgtcactacctctgcctctggcctcaaggagccaatcttctgtcacacagccatcctgggccacttcagccatttggcctgactccagcccatgcctaaggcagttgcgggtcatccctgtcccaggggaggacagcagtgcactggatagaccagttctcccttcttgyctctaaggacacgctgctcctattccccaaagagacagacattgtttcctccaggagctgagaagccctcttctttcttctttgcctaaagaaggcaaatgatatgcttagattcatccattcattcagcattcatttatatctcagacacctgctgagcatgagtccagtgctagctcagtggagaatatgggatgagctgcccctgccctggcagacccagagagaggctgatgctcctggcactgggaggcagagggctcaagagggattgcaggcaggactgtacatcccagctccattcccatcacttgcctctctgtctatgcctccatttcctttttttttttttttttttttttttttttgaggcagagtcttgttctgttgcccaggctggagtgcagtgggtcgatctcggcttactgcaacctctgcctcccaggctcaagcgattctcctgcttcaggcttctgagtagctaggattacaggtgcaccccaccacgcccagctaatttttgtgtttttagtagagaagaggtttcgccatgttggcccagctggtcctgaattcctgaccttaagtgatccgcccaccttggcctcccaagttgttgggattacaggcatgagccaccatgtctaaccatccattttctcttttgtaaagaagcccattactcaggattctggtaattaaaaaatataaggctgggcgcggtggctcacacctgtaatcccagcactttgggaggccgaggtgggcggatcacctgaggtcaggagttcgagaccagcctgactaacatggtgaaaccctgtctctactaaaaatacaaaaattagctgggtgtagtggcgggcgcctgtaatcccagctactcaggaggctgagacaggagaatcacttgaacccgggaggcagaggttgccccaagctgagatcccaccattgcactccagcctgggtgacagagcaagactccgtttgaaaaaacaaacaaacaaatagatctaattcttttgaaaacattaaaattgattgggcgcagtggcgcatgcctgtaatcccagcactttgggagaccaaggtgggtttagcccaggagtttgagactagcctgggcaacatgatgaaaccctgtctctacaaaaaaatacaaaaaatgaattagccaggcgtggtggcacgtgcctgtaatcccagctacttgggaggctgaggcaggagaatcgcttgaacccaggaggcggaggttgcagtgagccgagaccgcgccatggcactccagcctggcaacagagcgagactccgtctcaaaaaaaaaaaaaaaaaagtacaaaaaatgagccgagcacggtggttcatgcctgtaatcccagcactttgggaggccaaggcgggcagatacctgaggtcaggaattcaagaccagcctggtcaacatagcgaaaccctgtctctactaaaaatacaaaattagccaagtgtggtggcacatgcctgtaatcccacctacttgggaggctgaggcaggagaaccgcttgaatccagaggtggaagttgcagtgagtggagatcacgccattgtgctccagcctgggcaacaggagtgaaactccatctcggaaaaaaaaaaaaaaaaatggccgggcacagttgctcactcctttaatcttagcactttgggaggctgaggcaggtggatcatctgaggccaggagttccgagaccagcctgaccaacatggtgaaacccccatctctactacaaatacaaaaattagctgggtgtggtggctcacgcctgtagttcagctactcagaaggctgaggcagaactacttgaacccaggaggtggaggttgcagtgagccaagatcgcaccattgcactccaccctgggcaacagagtgagaccctgtctcaaaaaaaaaaaaaaaattaaaaataggtaaattgccattttcaaagatacctgtaaagatttttaaaatcattcatgaatgcggtctgttcgttgcacagagtagatgctcaaaaatggtgaatgagaccctctattttggtctcatgctgaagaagtccataaagcccacaagtcattttcatgatggacagaaaaatgtgtgtgctttctctgtctactgcctcaactgcacagaccccgggactgtagcagaaccatcttttgagcttgacaccgggaggcccaaattctagcacgggacccagggccagttgctctctggtcctcagtctcctcacccataaaatgggaaggagagaaccctgaatcattgcttctagcttctgaactcagttgttcagaacaaggactcactgctgatttttcaacagcacagggaattgcactgttcctgggaatgatggacagtaccctctgttccactgggcaagtgagatttcccaggcctctctgttcccttctccccttagagagcaacagacgtggccccatcccacctccctcaaccctctctctcctccctcaggactgggcacctcgctgcccccgctgctgcccactctgcgactgtgcctgtacgtgccagctccccgactgccagagcctcaactgtctctgcttcgagatcaagctccgatgaggacccagggcccctgccctctggggagcggccagcccccagggcccatgtgccctcctccctgaagagcctttccccacgccactggaaccacagatggcctgccgagcacccaggcctgggaactggaagtggcagcgcagggcctggctccctgcagggcaggactcttggccggctggacggcagctcctctggagggccagaaaagagaggggctagtgctcgggcaggtgccctggcttcccttcccctccacacgtcaacgattctatttgaagttgggcaggggggtggcgctgctcaccacacacaagtgttataggaggagtctggcccttgagtaccgggtacgcaggggtgcctcaaccacactccgtccacggactctccgttattttaggaggtgagtgtagtgccagtatctactctccttcttaaaaaaaaccagggctccagagaatcagaacagccaccatcaccgcagggagtcaagggaggagggagattagagaaggagccagggagggtggcagggaggccacgtgatccgagtcccctcacccctttccttcccacaggtccctggccaaagatttatttctcttgacaaccaagggcctccgtctggatttccaaggaagaatttcctctgaagcaccggtgagtgggcaggggctccctccccatcaatagggccgacccaagtcttcctcccccttcccccatgccgggccccacgatagtgtgaatgtcaggggcttcaggtttccctaaatataggtccctgccagaggatccgtggcgggaaaagggcaggggtcattagagaagatcggggacacatgtggggcgggcaggagctgccttataaccagcccgggaacccctagctcactcgctgctgaccaggctctgccggctccttcggcctcgccgcaggtgggccccttgcaggaccgggccggggtggggatggggttggggttgggccaacagggtccagatggggtccaggtgaggaggggagatttggacgataggagcagggggctcagcatctgggaggcagatcagttcggggacggattttcttttggagaaggaagtcaggctcaaggaagacgtttggcaggaactgtgaccccgcatgccagaggccgagcagcggccggtgcatagccgcgcattctggttttctgtggcgcagaggactaccagcctggctgcggcggcccggcggagagcgcgcacgcatgcgcgacccagcccggcctgccagcctggaactcggatggggaggtctcgcctccgcgcgccgctagttccgccgccttctcgcgctccctgcgtgtcctctcgatgccctttcctccgcctcccttacgcctgggccagtgacagggtgtcggctccgcgccgattcagcccgcgggcgaggcaggctaacgcacgactgcgcgatgtggcccctatggtgacacgcgctgcagccgcgaagaccggaagctggggcggccccgggccgcgcgcgctgggcctgggaggcgaaactcagcttccttcgtttccgacttttccatccgcgtcctccacttccccgttccgccctcccccattgccaacattctggctgagtcacggcgccccagagcgcgccaggctgggggaaaggagcagaagggagggccctagcgacccgcgggatgtggtccgagtcacgtccgaggggggtggggagggatcgtgttctcggcgcccgccccttcctagcgcggcctctgggctgcgcctctcgggggcggcccgtagcccagtccgtcgcctgccattggacgccgcccgctcctcgtaaaggaaaaagctcggcggagggcggagtggtgcctttaaaaggccgggcgccgccttccgcctgcccgcctcctgcgccgccccttccgaggctaaatcggctgcgttcctctcggaacgcgccgcagaaggggtcctggtgacgagtcccgcgttctctccttgaatccactcgccagcccgccgccctctgccgccgcaccctgcacacccgcccctctcctgtgccaggtgagcgcccctcttcacgtgcggggaccagggaccgtggagagggatcttgggggcagtggcgggttgggcgtccgcgtggaggcctcccccatcccatgccagcgtctccccactaccaggcacacacaggctccccggcccctccagcctgaggtcctctaactgcgcaatgcagcggctgcgcgcgctgagtcatggcgggggaggaagccggacgagatgaaggaccattctccccctttycttgcagggacccctgtggcaaaggattagggccccttagcsctggcggggatcctaagaggcagtgaggggtgggggccggcccatgtacagccccagggttctcgcaagtgggagcttggtttctgtcctgggaaacggggcgcccttcgcgaggagggaaacccctccgcggtgcttgatgcccccttaacactttccctgtctctccttatcgggcgaccttgattctgagcccggaacagctgcagccatgcgaagcgacgggagcatttttcaggggaaggcgcttgctcctccacgttcttgccccgtaggaacagtgacgatggcaaagcttaccgctttcctcgcctcgggctagggcttgttccgccgccctttcctgggcttctccttgctctcttatatttttcctaatgcccctttcctaccacccgccccctcccttgtggggaaaagcctgaccttgggatgtccttgaagccttggagcccgggccagccctgggatcttgaggggattggaaggaacaccccagtggcagtcagaagagctgggttctaatctcagatctggctccggggttgctgtgtggcttgaagcacagacctttcccatatctgggccctttcccacgagggtgttgggccctctgcttgattcacgatctttacattctaaaatactccggttcggttttgttttcaggcaaggtgaccccatggcaaggcgcaagccagaagggtccagcttcaacatgacccacctgtccatggctatggccttttcctttcccccagttgccagtgggcaactccaccctcagctgggcaacacccagcaccagacagagttaggaaaggtacmggggcaggcctagcaaagggaagttgggcgtaagagagagctggggaccagaagtgccccagggcctgctgggtgtggggcaggggaggtagggaacatttccctgacctccaggagaggggccctgstcatcgggagatgatgggaaaccctagctaactagtccttcccctctgtttcctgtatccaggaacttgctactaccagcaccatgccctaccaatatccagcactgaccccggagcagaagaaggarctgtctgacatcgctcaccgcatcgtggcacctggcaagggcatcctggctgcagatgagtccactggtgygggcaggagacagaatgggtggagggtgcagggttgggagtggcaggctgatcccctaattcccatgtgacactcccagggagcattgccaagcggctgcagtccattggcaccgagaacaccgaggagaaccggcgcttctaccgccagctgctgctgacagctgacgaccgcgtgaacccckgcattgggggtgtcatcctcttccatgagacactctaccagaaggcggatgatgggcgtcccttcccccaagttatcaaatccaagggcggtgttgtgggcatcaaggtaaggggagggcctccggacgtgaggtttgagwwggaagtggaggaaggaaatccaggttagtgaggcagggaatgaatgctggattggtggcctagagacttgcatggagcctgcttcaggcttagggcatttactcgacatttttwatcctcacaattctgagagaacagtatcattcccactttacacatgaaaatctcagaagctcagggaagtgaagtgttttgctcagagtaagtggcagagccccagtctgacacccaattcactcaacatttctgttgtcaaataacatcccagtgtatcctgtctcagaggattgttactaagtgaactaagtgaaaatattttaatttaattgtaactaagtatttgagtaactaaacattttaagtaaattttttttttttttttttttgagatggagtctcgctgtctcccaggctggagtgcagtggtgcgatctcttggctcactgcaagttccgcctcccaggttcacgccattctcctgcctcagcctcccgagtagctgggactacaggcgcccgccaccacccggctaattttttttgtatttttagtagacactgggtttcaccatgttagccaggatggtctcgatctcctgatctcgtgatctgcccacctcggcctcccaaagtgctgggattacaggcgtgagccaccatgcccggcttaagtaactaaatattttaattgtaactaagtgaaaatatttgccagccctgagatgcagtttaagggattaagtaaatgtgggggaagactggggctaaagaagaggaaagaggggcacgcccagctacctaggaggctgaggcgggaggatcacttgagtccaggaagkggaggcttcagtgagctgagattccaccactgtactccagccgrggcgacagtggaaagggtgctagaggtcatttcctgtgtcttaatgttgttaccctgaccccaacaggtagacaagggcgtggtccccctggcagggacaaatggcgagactaccacccaaggtgagaactgtttgattctctgccctacgaacccaaccagagcaggtttgggtgctgggaggagtggaaaccacatgcccctccccaccgtgctctgacccmttcctcttctcttagggttggrtgggctgtctgagcgctgtgcccagtacaagaaggacggagctgacttcgccaagtggcgttgtgtgctgaagattggggaacacaccccctcagccctcgccatcatggaaaatgccaatgttctggcccgttatgccagtatctgccagcaggtgggcctgcaggtcctcaataggcaacctcctacctcatttggttccagtgttgttaatttgcctattacctgccatgatgcctacctccccaaaagcaagcattagctttggcsmgtggaggacactcaagggctgttgaaggcagaggggccaaggagggatggtgggtggatctgaggcggctcttgtctcctgtaatctgagggctttgaagcctsagtccctggcatcatcaagatacggtcttgaccagtggctgtggagagatgtaggtgggactctgggttaggaggcctcacagtgaccctgtccctcgccctgcagaatggcattgtgcccatcgtggagcctgagatcctccctgatggggmccatgacttgaagcgctgccagtatgtgaccragaaggtaaatggctacctgcctgaccagtgcaaggtggctggccggggaccctggggctaacccctatcctctyctccaccccactacccaccgtgcgcctgctctgctccaggtgctggctgctgtctacaaggctctgagtgaccaccacatctacctggaaggcaccttgctgaagcccaacatggtcaccccaggccatgcttgcactcagaagttttctcatgaggagattgccatggcgaccgtcacagcgctgcgccgcacagtgccccccgctgtcactggtgaggcccacactcatcttgatctctatgcagtagataagctccacccacaaccctatgcccatttggacggatttccatggcaacttccaccagctcctgccagcttcctgggtctctgaccacagcccctctcgcctcacccctgctctacagggatcaccttcctgtctggaggccagagtgaggaggagkcgtccatcaacctcaatgccattaacaagtgccccctgctgaagccctgggccctgaccttctcytacggccgagccctgcaggcctctgccctgaaggcctggggcgggaagaaggagaacctgaaggctgcgcaggaggagtatgtcaagcgagccctggtaaggataggcaggakgtgggcagggtgcctgggtggatgggactcggrgaagagcccttctcactccacccctctccctgcttaggccaacagccttgcctgtcaaggaaagtacactccgagcggtcaggctggggctgctgccagcgagtccctyttygtctctaaccacgcctattaagcggaggtgttmccaggctgcccccamcactycaggccctgccccctcccactcttgaagaggaggccgcctcctcggggstccagkctggcttgcccgcgctctttyttccctcgtgacagtgktgtgtggtgtcgtctgtgaatgctaagtccatcaccctttccggsacactgccaaataaacagctatttaaggggragtcggccgtccgtgtcttgtggtgtctaatgcaggggagggcctggggaggtagcagagcccagaagaagaaagagcccctgttctctgttttttctgggcagaaaaggagtgaaaggtggaaggaccttcctgctctgttttatacttggccagggcttcaagaaaggctgagagcttgtgacattttcttccagccactgcaggctctgccccttcacctaacagcataagatagggctaacagttggggagtatggttgtaactgctcatgtcttaggaggcttcagcctcagcacttttaggtccagaactcaaggggggcagaagacccctgtgacaaaaacccactaactagctcatgagtgacatgagccaggcaacataatgggtgttttatatgagtagatgctgttatttttaatttatacctaaggctcttttgcccaagattgaactgtttcttggtggaaaggattatcaatgcatatctctttttttttttttttttgagacaatctcactctgtcacccagactggagtacagtggcacgatcttggctcactgcaacctctgcctcctgggctcaagcgattgtcctgcctcagcctcccaagtagctgggattacaggctcacgccactatcgcctggctaatctttgtgttttttagtagaggtggagtttcatcacattggccaggctagtctccaactcctgacctcacatggttcctccacctcagcctcccatagtgctgagatgataggcgtgagccactgcgcccagccaatgcttatctccttaatctacactattgagttttctgttttcccatctttttttttttttctttttgagacagtttcgctcttgttgcccaggatggagtgcaatggcacggtctctgctcactgcaacctccccctcccgggttcaagtgattctcctgcctcagcctccacagtagctgggattacaggcgcaagccaccacacccggctaattttttatttttagtagagacgaggtttcgccatgttggccaggctggtctcgaactcctgacctcaggtaatccgcctgcctcagcctcccaaagtgctgggatgataggcgtgactgcgcctggcctgttttcccattttaacaggagatggaattagagagggcttcttagtctcctttgggctgtggaatcccataaaaaccttgaattgtttccaatacccccttggtaatgcagatacagaagttaagctgtagagctcaggctccaggtgaagaactgtgtctctgtagctgctgctttccatgaagctagaatgagcgtgccatgccattactttgagcctttccccaatgacccaggctggggtgtacagtaactacatcagctctctggacctagagaatctctgcagtgattcaggtagaacggagttacctagaaccttctaggagtataaaaacttggtcctaggccgggtgcggtggctgacgcctataatcccatcattttgggagaccaaggtgggcggatcatgaggtcaggagtttgagaccagcctggacaacatagtgaaaccttgtgtctactaaaaatacaaaaattagccgggcatagtggcgcacacctgtagtttcaactacttgggaggcggaggcaggagaattgcttgaacccaggaggcagaggtaatggtgagccgagattgtgccactgcactccagcctaggcaacagagccagactccgtcccaaaaaataaaaataaaacttggtccttcccttttctgcttattttgcttttattgcttacatctaaaacaaaaccaatcactattatccctctaaactttggattaatttgtctgcctagctcattcaactctgggaaacaaacactgaagtaaagcaaataaaaattgaaggtcggtagaagatggcaaagggggcattccaaaagggaacatgtgcagagtctcagagactggagagattgtttaaagatcaatagtttcagccgggcacggtggctcacaactgtaatcctagcactttgggaggctaagtccggcggatcacgaggtcaggagttcaagaccagcctagccaatgtggtgaaacccccgtctccactaataatacaaaaattagctgggcatggtggcgcgcgcctgtagtcccagctactcgggagactgaggcaagaagagtcgcttgaatctaggaggtggaggttgcgctgagccaagattgtgccaccacactccatcctgggcaacagagcgagactccgtctcaaaaaaaaataaataaaaaagactagagaagcagagaacgtcatataccagtttgggggatttggacttttatttatttatttattttgagacgaagtctcgctctgtagcccaggccggagggcagtggcacgatctgggctcactgcaacctctgcctcccgggttcaaaccgattatcctgcctcagcctctccagagtagctgggattacaggtgcacgctactgcacccggctaattttttgtatttttagtagagacggggtttcaccatgttggccaggctggtcttgaacccccaatctcaggtaatccgcctgccttggcctcccaaagtgctaagattacaggcgtgagccaccatgcctggcctggacctcttaattttatgataatctgagttcccgaaagagtaattgatagaaaaaaaaactacacctgaggacacaactttctgagttcaaatttctttttttttgagacagcatttcactctgttgtccaagctggagtgcggtgtcacaatttcggctcactgcaacccccgcctcctgggttcaagcgattctcctgcctcagcctcccaggtagctgggactacaagcgcatcaccaaacctaattattattattttttattttttaggatagacagggtttcaccatgttggtcaggctgatcttgaattcctgacctcaggtgatccacctgcctcggctgcccaaagtgctgggattacaggtgtgagccaccacacacagccaggttcaaatttctttcttttttttttttgagacagagtctcgctctgttgcccaggctggagtccagtgacgcaatcttggctcgctgcacgctctgcctcctgggttcacgccattctcctgcctcagcctcccaagtagctgggactacaggcgcccgccaccacgcccagctatttttttgtatttttagtagagacggggtttcactatgttagccaggatggtctcgatctcctgatctcgtgatccgcccgcctcagcctcccaaagtgctgggattacaggcgtcagccaccgcgcccagcccaagtttcttattctttttgtttatagactgggtctcactctgttgcccagcctggtcttgaactcctgggcttaagtgattcgcctcggcctcccaaagtgctgggattacatgcttgagccaccacacctagccccggattcaaatttcagtgtaacatccccaatccactgttatacaagcaatgaacaagttatttaacccctctgagccagtttcctcctcttaaaaaaggcacaaaacttaatagaaagcaactaagaagccaggcacggtggctcaagctggtaatcccagcactttccgaggccgaggagagtggatcacctgaggtcaggagttcgagaccagcctgaccaaaatggtgaaaccccgtctctattaaaaatgcaaaaattagctgggcgtggtgacgggtgcttgtaatcccagctactcaggtggctgaggcaggagaattgcttgaacccaggaggcggaggttgcggtttgccaaaatcgctccactgcactcccgcctgggcgacaagagcaaggaaggctctgtcttaaaaaaataaataaatgaaaatacaaaaattagccaggcgtcgtggcacatgcctgtaatcccagctacttgggaggctgaggcaggagaatcgcttgaacctgggaggcggaggttgcagtgagccgagattgtgccactgcactccagtcggggtgaaaaagcaagactccgtctcaaaaaaaaaaaaaaaaaaaaaaaaagaggccgggcacggtggtacacgcctgtggtacagcactttgggaggctgaggcaggtggatcatgaggtcaggagatcgagaccatcctggctaacacggtgaaaccccgtctccactaaaaaatacaaaaaaattagccgggcctggtggcgggcgcctgtagtcccagctattcaggaggcagaggcaagagaatggcgtgaacccgggaggcggagcttgcagtgagccgagatggcgccactggactgcagcctgggcgacagagcgagagagtgagactctgtctcaaaaagaaaaacggaagcaactaagaaatgtcaagagtgccattttggaatcagagaagtcatgctgactgaggcacaggcttggcgtgggaaaagtggactccaatctgttaacttctgaagttgtccacggcaaatatttctctgacggcacaggaagagatctgaacttggcttccctcatccattgaacaagtattaacaagtatctatatatgcctaccgtgccaggccttattctaaccactggggctgcaatatttaaaaagacaaagttggatcctccaaggactgtggtggggaaggctgacaaaacaagtaacaaaaatgtgtaacattaaaaaaaaagtgtaatgttaaaaaaaaaaagtgtaataaagttacaaagcctagccccagctcggcttgtttccctagctgaaatgggggatggccgggcgcggtggctcacgcctgtaatcccagcactttgggaggcccgaggcgggaagatagcttgtgcccaggagttcgaggtcacagtgacctatgatagccccaccgactccagcctgagcgatagagcgagaccctgtctctaatttagaaaaaagaaagttgtggccgggcgcggtggctcacgcctgtaatcccagcactttgggaggccgaagggtggtggtgggtgggggcgcggatcacctgaggtagggagttagagaccagcctgaccaacatggagaaaccccgtctctattaaaaatacaaaattagcccagcgtggtagcgcatgcctgtaatcccagctactcaggaggctgaggcaggagaattgctggaacccgggaggcggaagttgcggtgagccgagttcgtgccattgcaccccggcctgggcaacagcaaaactccgtctcaaaaaaagaaaagacagttgtttaaacatttttatgaaatgatatgggaggggactggtctagggtttctaatagcctccacatcgcccagcggcagagcccacaaaactgccactggccgccaccgggttcctccacctccttcccgatctcaggctggagaagtggtgcaggggtcgctgcgaaaggagaggagcgtgtatgacgccacatccggcgcgcggcggaactggcctcctttgcttccgcggcggggccggaagtaggagcggcggcggcggcggcggcggcggtcgaaagcggagtgaaagagggaggcagggagccggagagccggaaccggagtcgcagcggcggtaatagtgcgagactcctctaagtcaccgtccttagcgcgggaccgcggggttcgacgggagttagcgggggtgcggccaggccgttggacgccggggggtcctggggccgatgtgaggggaggcgggggtgggggagccgggccggctctagaatcgagttgtccgctccgagccccggacggacactgatccgcgggctcgtcttggcctttcccaggagacccctgtgcggtgcggagggggcggcggccccgactctgacccgcgccgggggtgggccatggcggagatcagcgacctggaccggcagatcgagcagct

SEQ ID NO: 94074 - DNA, 23602 bp, Homo sapiens
tttgtcttttgtcttgtaataatacccagttaggacactgtttcttgcagttattattcttcctcacccccttccatgtggttatgttatgcttttttttaatctggttaggtccacttattagtgtttctattccatattgggttccccccacaccctgatagttttaattatttattttgtgggtgtgtgagggaaatgtgaaacatgactatagttccaggagtcaaaattatacgaaaagcctgactcagaccagtgtctctgtttcttcatccctactactctttcccattcctcttttttttttttttttttttttttgagatggagtctcgctctgtcacccaggctggagtgctgtggtgtgatctcggctcactgcaaccttcgcctcccagattcaagcgattctcctgtctcagcctcctgagtagctgggactacaggtgtgtgccactacacccagctaatttttgtagttttggtagagatggggtttcactatgttggccaggttggtcttgaacttctgacctcaggtgatccacctgccttggcctcccaaagtgctgggattacaggcgtgagccaccgcgcctggcccccgtttctttcttttctttctttttttctttttctttctttctttctttccttcttccctcactcctttctttctttctctttctttctttctctccttccttccttccttctttctttgtttctttctttctctccctctctctctctttctctctctctctctttctttctttctctttctttttttcgagacggggtcttgctctgtcacccaggctggagtgcagtgagtggcacaatctcagctcactgcaacctccgcctcctgggttcaagtgattctcctgcctcagcctcctgagtagctggattacaggcacgcgccaccctgcccagctaatttttatagttttagtagagaccgggttttgccatatgggccaggctggtctcgaactcctgacctcaagtgacccaccttcctgagcctcccaaagtgctgggattgcaggcatgagccatcgcgcccagctaatttttgcatttttagtagagatggggtttcaccatgttggccaggctggtctcaaactcctggcctcaaagtgatctacccaccttggcctcccaaagtgctgggattacaggctgagccaccatgtctggcctcctcttttcttctacctcattttccactcatcccctgtaagtaattcatctctttagtacctggtgtaccctttctttatttcttttgtacaaatgaacagagacacctgcatattttctatacccccttacattaagggcagctaactatactcttatgcactttgctttttttggtttaacaatatgtcctggaaacatttcatagcagttcttggaacttgtcctcattcttttttacaccattgtgtggatgttattgagtcactctcctaaatatgggcatttaggttgtttcccgtattttgcaattacaaagagtactgccataaataaccctgagcacatgcatttttgtatggctggaggaagaactcttaacattacactacaccacacggtatttttaaaaccttgacttgggtgctaacgtttaagaatttgaagctatcacttcaaaatctggattttcgtatctatctgtatatgctcctgggatataaaaaccactgtgtaaagatatgttgtaggctgggcgtggtggctcacccaaagtgctgatcccagcactttgggaggcccaggtgggtggatcatgaggtcaggagttcgaggctagcctggccaacacggtgaaaccctgtctctactaaaaatacaaaaattagccgggcatggtggcacgcacctgtaatcccagctactcaggaggctgaggcaggagaatcacttcaacccaggaggtggaggttgcagtgagccaagattgcatcactacactccagcttgggcgacagagtgagacttagtctcaaaaaaaaaaaaaagatgtgttctagaagtcaatagaaaagccgggcacatgttcacgcctgtaatcccagcactttgggagaccgaggagggagggttgctcaagtccaggagttcaagaccagcctgggcaacatggcaagatcccatctctatgaaaaaaaaaattaaaaatcaactgggcatgctggttcatgcctgtggtccgagctactcaggaggctgaggcgggaggatcacttgaacccaggaggcagggtatattagttttgatgctgttgataaagacatacctgagactgagaagaaaaacaggtttaattggacttacagttccacatggctggggaggcctgagaatcatgacaggaggtgaaaggcacttcttacatggtggtggcaagagaaaatgaggaaaagcagaagcagaaatccttgataaaaccctcagatctcatgagacttattcactaccacaagaactgcccccatgattcaaatgatctccctccacgtacctctcacaacatgtgggaattatgggtgtacaattcaagatgagatttgggtggggacacagagccaaaccatatcattttgcctctggcccctccaaatctcatgtcctcacatttcaaaaccaatcatgccttcccaacagtctcccaaggtcttaactcatttcagcattaacccaaaagtccacagtccaaagtctcatctgaggcaagtcaagacccttccacctatgagcctgtaaaatcaaaagcaagctagttacttcctagatacaatgggggtacaggtattgggtaaatacagccattccaaatgggagaaattggctaaaacaaaggcattacagggcccatgcaagtccaaaatccagcagggcagtcaaattttaaagctccaaaatgatttcctttgacttcaggcctcacatgcaggtctcactgatgcaagaggtgggttcccatggttgtgggcagctctgcccctgtggctttgcagggtatagcctccctcctggctgctttcacaggctggcattgagtttctgcagcttttccaggaacacagtgcaagctgttggtggatctacaattctggagtctggaggacagtggccctcttttcacagctccactaggtggtaacccagtagggactctgtgtgggggctccagccccacatttcccttctgcactgccctagcagaggttctccatgagagccccacccctacttctgcctgggcattcaggcgtttccatacatcttctgaaatctaggcagaggttcccaaaccccaattcttgacttctgcgcacctgcaggctcaaaaccatgtggaagctgccaaggcttggggattgcaccctctgaagccacggcccaagctctatgttgtccccttacagccacagctggagcagctagaatgcaagacaccaagtccctagactgcacacagcacagggaccctgggccctgcccatgaaaccattttttcctcctagacctctgggtctgagatgggaggggctgccgcaaaggtctctgacatgccctggagatattttccccattgtcttggggatgaacgttcatctcctcgttacttatgcaaatatctgcagccagtttgaatttctcctcagaaaatggggttttattttctatcccatcatcaggctgcaaattttctgaacttttatgctctgcttcccttttaaaactgaatgcctttaacaggacatcttgaatgctttgctgcttagaaatttcttccaccagataccctaaatcatctctctcaagttcaaagttccaataatctccagggcaggggcaaaatccaccagtctctttgctaaaagataacaagagtcacctttgctccagttcccaacaagttcctcatctccacctgagagcacctctgcctggatttcattgtccatatcattatcagtatttttgtcaaagccattcaacaagtctctaggaagttccaaattttcccacattttcctgtcttcttctgagccctctaaactttccgacctctgtctgttacccagttccaaagctgcttccacattttcaggtatcttttcagcaacaccccactctactggtaccagcttactatattagtccattttcatgctgctgataaagacatacccaagactgggaagaaaaagaggtttaattggacttacagttccatatggctggggaggcctcagaatcatggcagaaggtgaaagccatttcttttttctttctttctttctttttttgagacagacagagtcttgctctgttgccaggctggaatgcagtggcgtgctcttggctcacrgcaacctccatctcccgggttcaagtgattctcctgcctcagccttccaagtagctgggactacaggcacatgccaccacgcccagctaatttttgtatttttagtagagatggggtttcaccatgttggccaggatggtctcgatctcctgacctcgtgatctgcccaccttggcctcccaaagtgctgggtttacaggcatgagccaatacacctggctagtgaaaagcatttctgacatggcggtggcaagagaaaatgagaaagaagcaaaagtggaaacccctgataaactcatcagatctcgtgagacttattcactaccatgagaacagtatgggggaaaccaccaccttgattcagtctcccactggtccctcccacaacacgtggggattacgggagtacaattcaagatgagatttgggtggggacacagagccaaaccatctcaccgaggttgcagtgagccgagaatgcgccattgcactccagcctaggcaacagggcaagactcctcaaaaaaaaaaaaaaattagctgggcatggtgacatgtgcctgtggtcccagctacttgggaggctgaggcaggaggatcgcttgagcccaggaggccaaggctgcagtgagctaagatggcaccactgcacctccagcctgggcaatagagtgagaccctatctctaagaaaaaaaaaaaaaaagtcaatagctttgctggtactgggcccgtttcctgcttgctttgtggctattgccagatctgagtgatggctgcccctttgagatagggcagggtctacagtcttggcctccagacacccaagctggcaacccttaaatgatatcatgtgtgtacaatagttggcacaagacctgcacacagtaaataatgatattaataataatactcattcccscatataaccctaagtgtactaggtactgtttcacgtgctttatttatatttattcatctaagcctcataacaaccatatagggcagagactattatttttccattttacagacaggaaaactgaggctcagagaggtgaagtgatgtgccccaggaaagctcagcttagaaatggcagagctggctcatgcctgtaatcccagaactttgggaggccaaggtgggtggatcacctgaggtcagtagttcaagaccagcctggccaacatggcaaaactacatctctactaaaaatgcaaaaattagccaggcatggtggcacatgcttgtaatcccagctactcgggaggctgaggcaggagaatcgcttgaacctgcgaggcggcagagattgcagtaagctgagattgcaccactgtactccagcctaggaggcagagtaagaccctgactcaaaaaaaaaaaaaaaaaaaaaaaaaagaaaagaaaagaaaagaaaagaaatggcggggctgggattgaacttgggcagttccagaacctgtgtccttaaccactaactgytcaacagtggtcaacgcccctcactttttctgcatatccctcccaccctgcccaggcttcactcccggtctaccctctgtccctttctccccaggtgagccaggctccatgactgtaacttggaccacatgggtcccaacccgctctgaagtgcaattcgggttgcagccgtcrgggcccctgccyctccgcgcccagggcaccttcgtcccctttgtggacgggggcattctccggcggaagctctacatacaccgagtcacgcttcgcaagctgctgccaggggttcagtatggtgagaggggccccaggctgagctgttgaggaggartgggaagaggagtgggatgcagactagaagctaccactggccggtggctcaggctgggctggtaactccactgcctatctgcaagcctgttgtatgagaccccaggatgaaaacggaaggtgccggggaaggcagaccgaaggggcatgggccagcccccaccagtccccccatctcctcccctccaccagtcggggaaggatggggttggagggagggtcccggggcgccccagctgactgcgaccttttcctctcccattcagtttatcgctgtggcagtgcgcagggctggagccgtcggttccgcttcagggccctcaagaatggggcccactggagtccccgtctggctgtgtttggagacctgggggctgacaacccgaaggccgtcccccggctgcgcagggacacccagcagggcatgtatgacgccgttctccatgtgggtgaggcatccgcaggggcgcgcgcagggacggtggggggcgcgcgcagggatggtggggggcgcgcgggtcgggggcggtgctaggaccgtggaggggacagggctggggccagtgtgtctctgaagggacaggggatgagactggctacggagacggtgtctgtggccaaccagcctgcctaggttaaaatcccaactctggcgctcttgccaggagcaggggttttcccccgtatattttgattagagagaaagctggttccgagttcgcaggactgttgtgatgactacgttagttcgctttgcctcgcagggtgcaggtgcacttcggtgtccttgtgctggttattattattattgctgctgttgttatttaagagggggaagggaattagatgggtaatggggattggggattgtgtgcttcaaagtgcagactctggaatcaggctccctaggttttatttctacatcttcactagccagctgtgtaacctggggcctcagtttccccatctgaaatgggaataataataataatactcatcttgggccaggcgcagtggctcatgcctgtaattccagcactttgtgaggccaaggtgggtggatcacttgaggtcaggagttcgagaccagcccagccaacatggtgaaactccatctctactaaaactacaaaaattagccaggtgtggtggcaagtgtctgtaatcccagctgcttgggaggctgaggcaggagaatcgcttgaacccaggaggcagaggttgcagtgagccaagatggcaccactgcagtccagcctgggcagcagagggagactctgtctcaaaaaaaaaaaaaaaaaaaaaaagtgcccatcttggcccggcacagtggctcacacctgtaattccagcactttgggaagctggttttgaattcctgggctcaagtgatactcttgccttggcctcccraagcgctgggattaacaggtgtgagtcaccatacctggctctctcaattccagtgaaagcagagctgggcctgggtcctcaccctccttccgccccctcccccaggagactttgcctacaacctggatcaggacaacgcccgtgttggggataggttcatgcggctcattgaacccgtggctgccagcctgccrtacatgacatgccctgggaatcatgaagaacgctagtgaggactgagggtggtggcggtgggcgagggctggatcaatggaaatggtctcgttcttcttagtgtctcccttgagtctctcatgctgcaacatttcaattgtggtagcaagaggagatgggggtgggctggaagctggactcagggcctgacagtggcggggtataggagtagggctatgaaattcagtccttcacctccatcccttgtacttcctttattccagcaacttctctaactacaaggctcgcttcagcatgccgggggataatgagggcctgtggtacaggtaatgtgggggtgctgggggactggccctctcccctgaaggatgggagatgcaggggagccctggtccctgacccctgccctttgactcctccagctgggatctgggtcccgcccacatcatctccttctccaccgaggtctatttctttctccattatggccgccacttggtacagaggcagtttcgctggctggagagcgacctccaggtaacctgggtggaggcccctatagtcccctggccagccccacctccccctccacccctgactcctagcccctcaccctgggcccttctccctagaaagccaataagaaccgggcagcccggccgtggatcatcactatggggcaccggcccatgtactgctccaacgcagatctggacgactgcacacgacatgaaagcaaggtgaggtccctccctgggagacagtggggacatgctgaaagccaggtgggcrtcagtctgcgtcaccctcacccgctcattcaccctgcccaggtccgcaaaggcctccaaggcaagctgtacgggttggaggatcttttctacaaatatggtgagcgaccctcaggacccatgccccacaccccacctctccccaattcagaggtctgatccccgcttgctctatctcaggagtggatctgcagctgtgggctcatgagcactcgtatgaacgactgtggccaatttacaactaccaggtgaggcacgtgaagggctgagcgcccacacagctggggtcagggtggtcagaaggcccaggcatggcctcgagtgactgcctgccacccaacgttgttcccttccccaggtatttaacggcagccgagagatgccctacacyaacccgcgagggcctgtccacatcatcacaggatctgctgtgagcagggggaagggtggctttgccttctctctctattcctatctatggagggctaactttgttccagactgagtgctgggtgctttatatagtggatatcacttaaccctcagccctaaggtcgggaactcctagcggtatgttcattggayggatgtaggaacagaggcacagacaggaaaatacttgctcaaagtcgcaggtcaaataagtggcagaggttgggagctcccccaccataaagttactctagttccctttttaattaataactaccatggaggtccaggcacaatgactcatgcctgtcatcctagcactttgggaggccgagtctggaggatcacttgaggccaggagttggagaccagcctggcaaatacagcaaaaccttgtctatacaaaaaaaaaaaaaaaattaaaaaagaaattagctgggcgaggtggtgcttgcttgtaattttagctattcaaaaagatgagtcaggaggattgcttgagtgcaggaggtcaaggctgtagtgagctgagatctcaccattgcactccagcctgggcaacaaaatgagaccctttctmwcwcacacacacacacacacacacacacacacacacacacaaaagatactgggtggctaggtgcagtggctcattcctgtaatcccagtactttgggaggttgaggcaggaggattgcttgatcctaggagtttgaggctacaatgagttatgatcgcaccaatgcactctagcctgggtgacaaagcaagatcccatatctaaacaacaacaaaaaaactatcttgggggagatcctgttagaccatgcaaatgtcatgtttcttttttttttttcgagacggagtcttgctctgttgcccaggctggagttcagtggcatgatctcagctcactgcaacctccgcctcctggttcaagagatttccggctaatttttgtacttttggtagagatgggatttcaccacgttggccaggctggtctcaaactcctcacctcaagtgatctgcctgcctcggcctcccaaagtgctgggattacaggtttgcctggcccaaatgtcctgtttctcctcaaactttcaccctcttattttcaaacccattagtggacgctgcctgttaacagttattactaagctgttccaatgaagacttttctttctttctttctttctttctttctttctttctttctttctttctttctctctctctctctttctctctctctctttctttctttcttttcttcctccctcccttccttccttccttctttctttctttttttttgagacggagtttcactcttgtcacccaggctggagtgcagtggcacgatctcggctcaatgcaacctccacatcccgggatcaagcaattgtcttgcctcagcctctcaagtagctgggattacaggtgcccacccccatgcccggttaagttttatatttttagtagagatgaggtttcaccatgctggcgaggctggtctcaaactccggacctcgggtgatcagcccacctcggcctcccaaagtgctgggattacagacaagagccactgtgcccggccttacagtgccattctaatggggattttctgtcgccctcactcttccaagatttacgaattgagatcctcttgcaaggctgacttgtgtcttctgccacatttgttcagttggttaattgtttatttatgtctgtgtgaactcatgggtaatttattttactctgcgggttattatccaacatgactgttatttatctggatgtttaagttgtgccagctttggccatcagtgggctcctgtctcctttccactcatcccctccttattctctggcacttcaaaacattccaggatcatcatgtgtttttttttttttttttttttgctcagccttagaatctaccccttctccatggagcgaggcttagttttttaattttttaatttaattttaaaaattttggccacatgcaatggctcacgcctataatcccaacactttgggaggctgaggcaggcaggtcacttgaggtcaggagtttcagaccagtctgggcaacatggtgaaaccccatcgctatcaaaaaatacaaaatttagccatgcatggtggtgcacacctgtagtcccagctacttgggaggccaaaatgggaggatcatttgagcccaagaagtcaaagctacaatgagctgagactgtgctactgcactctaacctggggacagagcgagaccccatctcaaaaacaaaaatgtttttaatagagacagtctcactatgttgcccaggctggtctcgaattcctgggcttaagtgatcccccagctcggccttccaaagctgcttcttacaaatgattaagagcaaagtgaggctgggtgcggtggctcatgcctgtaatgccagcactttgggaggctgaggtgggtggatcgcttgagtctaggagttcgagaccagcctgggcaacatgacaaaaccctgtttctggtaaaataataattattattatcattatatatatgtatacatatatataaaagtaagaatcacttgtaataaaaattcaaacagttacagagggcaggaggtgaacagaagccactcacaccacacattgccccactctcggttgttgactctttttaggcattttacaatgttctctgcatatacaaaggagtaattgtttagatagagacatgttactgtattgcttacttaaaaaaaaaagcacttagatcgtgggtcatgccctagtggttctcaaacttggtgcacatcagaattacctatggagctttcaaaagtccagtgcttgggcctgaccccggacaaaataccagaatccctggcattgatctcccagagtagctgccacacggagcatgaaatagaatgctgtgagcaccagatggcttctcacggcccttggcagccaggctctgcccatgggtgattgctattctgattttatcagcacaaattgktttttttctttaattaagaaatttgaggccrggcgcggtggcttacgcctgtaatctcaacactttgggaagctgaggcgggcagatcacccaaggttaggagtttgagatcagcctgcccaacatggcaaaaccccgtctctacttaaaacacaaaaaattagccgggcatggtggtgggcacctgtaatcccagctactcaggagggtgaggcaggagaatcgcttgaacccaggaggyggaggttgcagtgagccgagatcgtgccattgcactccagcctgggcaacaagagcaaaactctgtctcaaaaataaaaaagaaaaaataaattgaaattatttcagaccaacagaaaagttgcgctaacaatacaaggactttccatatccacttcaccaatatttcccaaatatgaacatttaaccacttttatttatttatttatttattttgagacacagtttcactattgttgcccaggctggagtgcaattggcgtgatctcggctcaccacaacctctgcctcccaggctcaagcgattctcccacctcagcctcctgagtagctgggattacaggcttacgtcaccacgcccggctaattattgtatttttagtagagacgggggtttcaccgtgttggccaggctggtctcgaactcctgacctcgtgatctgcccgcctcggcctcccaaagtgctaggattacagccatgagccactgygcccggcgtctctttcattcctttcatcasaaacattctctactctttcttcatttttcatgaccttgacaattttgaaaagcacagcgagttgttttgtggaatttcctttgggtttgtttgatgtctgctcatgattagatagaagttgtgcatctttgctaagaatacacaraacagatactgtgttcttcccaatacatcctgcaaggaggcgcatggtgtcttttttgagttaggatctcactctgtccccaaggctggagtacagtgttacaatctcggctcactacagcctggacctcccaggcttaagcaattctcccacctcagcctcctgagtagctgggattacaggcatgcaccaccacgcccagctaatttttgtattgacagggtttcgccatgttgcccaggctggtcttgaactcctgggctcaagcaatctgcccgcctcggcctcccagagtgctggaattacaggcgtgagccactgtgctcggctgcacgatgtctttttaacctctttgagcctctgatttctcagctgaaagtgtggtacggatgggtctcattactgatgatgcttactttgatcacttggttagggaggtatcagccagccatctccaccataaagtgactctcttttttcctttgtaattaacaagcatctcctggagagatactttgagactatgcaaacatcctgttatgcctcaaactttccctgctagttttatcatccattcatgatccttgcttcaatccagtactataatgctgggtgcaaaatggtgattttcctcaccctggcatcctctctgctcctcatgcctggcttttctgctgcaagcacgagcattctgtttccccaggcrctgttgttttaaaaagctttcttggagggtctactgtgcagccaggcttcagatccagtgatttctctgttcttcaaattgctttttctccttcacacacatcttggccatctttctgtatcaccccgcttccctgctttgcgatggctgtgctataatgtatttaactgactccctgatgggcgttgggatggcttccagttcagggctttcactgtaatgctgtagtgggcagccttacacagccrtgtacttttctagaagtcagagacccggagcaagggaagcctgcctgggacaaattgttcaattgtgagtattattgtggccaagtctttttgtttttgtttttgtttgagacagtgtcactccgtctcccaggctggaatgcagtggcacaatctcggctcactgcaacctccacctcctgggttcaagcaattatcctgcctcagcttcccaagtaggtgggagtacaggtgcccaccaccacaccaggctaatttttgtatttttagtagagacagggtttcaccatgttggccaggctggtctctgactcctgacctcaagtgatccgcccttcttggcctcccaaagtgctggaattacaggcatgagccactgcgcccggcctctatggtggtcaagtcttcactgtcttccttgagggcagcagggtcctgggctagcaggtcatttctgcttcccygcgggtcctccacctgctctgggtctgatcagttctccccgccccagggctgtgaggagcggctgacgccctttgctgtcttcccgaggccctggagtgccgtgcgtgtgaaggagtacgggtatacgcggctgcacatcctcaacgggacccacatccacatccagcaggtgtcggacgaccaggtcagtgaggggcaggccgaagtcacctgactgtacagccaggcccctccaagcaaatgagctgttaaaaacrtgggctcggccgggcgcagtggctcatgcctgcaacacctgcaatttggtggggctaaggtatgaggatcgcttgagtccaggagttcaagaccagcctgggtaccatggtgagacctagtctctacaaaaaatacaaaaaatggccaggcacggtggctcatgcctgtaattccagcactttgggaagccgaggcaggcggatcacaaggtcaggagatcgagaccatcctggctaacatggtgaaaccccttctctactaaaaatacaaaaaaaattagccaggcgtggtggcaggtgcctatagtcccagctactcgggaggctgaggcaggagaatggcgtgaacccgggaggcagagcttgcagtgagccgagatcgcaccactccagcctgggcgactgagcaagactctgtctcaaaaaaaaaaaaaaaaaaaaaattaggccaggtgcggtggttcatacctgaaatcccagcactttgggaggctgaggtgggcagatcacttgaagtcaggagttagagaccagcctggccaacatggtgaaaccccgtctctactaaaaatacaaaaatgagctggccatggtggcgggtgcctgtaatcccagctacaagggaggttgaggcaggagaatcacttaaatctgggaggtgaagtttgcagtgacccaagatggcaccactgccctccagcctgggagacagagtgagactctgtcttggaaaaaaaaggaaaattagtcaagtgtggtggcagatgtctgtagtcccagctacttgggaggctgaggcaggaggatcacttgagtgcaggagttagagtttgcagtgagctatgatctcgcctctgtactccagccttggcaacagagtgagaccctaactcaaaacaaaaaaacgaacaaatgtggactgtagaactagaaacctgctcctgctgcttaccagctgagtgaccttgagtcactcatctaatttttttttttttttttttgagatggagtctcgctctgtcacccaggctggaatgcagtggtgcagtcttggtttactgcaaccgccacctcccaggttcaggcaattctcctacctcagcctcccgagtagctgggatcacaggcgcccaccaccacacccggctaattttttgtatttttagtagagacagggtttcactgtgttggccagaatggtctcgaactcctgacatcaggtgatctgcctgcctcaacctcccaaagtgctgggattacaggtgtgagccactgtgctgggcccacttatctaacttctttgcctcagttttcccatctgtgagaggggataatcatagtttccacctcacaggactacatgggggttgaaggacttattatatataaaatgcttagaagagtgcggaacttggtaaattctgtaggtatttaccattgtgaggcaggggaagataaagatggggggtgggacacaggtaggggaaaacaataagatgagtatgtggtasaggtggcttaaggttaggtggatccaaataataatggctcacctttctttatttttgccattgtagttttaaaataatgacaatatttatgatttattgagcacctactgcataccaggcactgcctagatgctctgcatttagtagcactttatttatttatttgtttttgagacagagtttcaccctgtcgcccaggctagagtgcagtggtgcaatctaagctcactgcaacctccacctcccaggttcaagcaattctcctgcctcagcctcccgagtagctgggattacaggcacatgccaccacacccggctaattttttgtatttttagtagagatggggtttcaccatgttagccaggctggtcttgaactcctgacctcaggtgatccacccacctgggcctcccaaagtgctgggattacaggcatgagccaccgcatgcggccccagtagcactttatacaccaaaacaatcccacaggagtggatttcctctccattttataggtgagggaactgaggctcagagaggggaagtaattttcccagggtcacacagttggaggacggccaagctgggatctgatagctaccatttatcgagtggcacatgcaccgggcgcagacttttgtgtgcatgatctcactctgttctcrtgatgactctgggcatctattactttgtgcattgcatagaacatggaagttttgctcagagagtccagcaacatgcttaaggccacctagagggtggatgcgctggccaggtgcagcagctcatgcctttgggaggctgaggcaggcggatcacttgaggtcaggagttcgagaccagcctggccaacatggtgaaaccttgtctctagtaaaaatacaaaaattagccaggcatggtggtgcatgcctgtaatcccagctactcgggaggctggggcaggagaatggcttgaacctgggaagcggaggttgccactgcactccagcctgggtgacagagcaagactctgtctaaaaaaaaaaaaaaaaaaaaaaaaaggagagagagagaaagagtggatgtgctggaatataaagcaaggtctgtctgactccagagtttgtgctctaataatagcctacacttacatagccctttccatatgctgggctctgtttacaaatactatctcatttaactcccacaacatctatgatrtgggtactgttactcttcctatcacttttcagatgaggaaaactgaggcccagagaggcctagccacttgctcagggttgtacagcccatcagagggcagagaggggactggaacccaggccatgtggccccagagttcaggctttcagctctaactactgtccctgtttttgtccctcacaggatgggaagatcgtagatgatgtctgggtggtgagacccctgtttggccggaggatgtacctctagggatggcggcagctctcctccagaagcctaggttttgccgccttggctgctgtgaccagaaactgcccaggcctgggtggggagttgggtgggccctgactcccctgccctccagaggccccmtgtagggtacatgcagccctatggagctggggcagctgttccctcctggagaggtgggagtcctggctggctgtggagggagggcaggtgtgcgggcacagagtgacacacggcaggtttctgctggcagggccccaccctcctgcatagctctgatcgggcgaggtgcccacggggcttcaggaatgaagaggcttaagctctggctccatggattctgcacatctgcgggggatgccgctgggcttcctcctctcctgcccacctggcaagggcatcgccaggtgggcacaaccgtcatgacactacttaccagcaggtggcgtcaggggctttttcttctgagcccggcactgagagttggtctgaagcctggctccttcttcactgctccaggactgctatgaagagtcccttcatgcctcagtttcccagcctggcaccatcttattcgggaagaggagacgtgttaacactcttgcctcctagctaggacagatgacaaaccgcaagagccacagacttgccagttccttccctctttccttcctttctttcccttcttttatttattgaatcataatttattgagcatctaccatgtgccaggctctgttctcagtgctggagagacagctgtgaatgagacagagatctcggccctcacagagctgacatcctaaccagagagttggacaaaaatcacgataaatgagttggttaaatagcgatttgtgagtagaaaacgcagggacggtgagagagcagtttcaattttcagggggatctcactgagagggcaacatttgatctgaaggaggtggggaaggagccaagtgggcagacatctgggggaagagcattccaggcagaggaacagccagtgcaaaggccctgagacagaaatgtgcctggccggctgggtacagtaactcacatctgtagtcccagcactttgggaggccgaggcgggcagatcacttgagcccaggagtttgagaccagcctgggcaacacagcgaaaccctttctctaccaaaaatatgaaatttagctgggcatggtggtgtgtgcctgtagtcccagctgctcaggaggctgaggcgggaggatggcttgagcccaggaggttgaggctgcagtgagccatgattgcgccactgcaccccagcctgggcaacagagcaagaccctgtctcaaaaaatatatataaataaaaaagttttaaaaagagaaaaataaacaaagaaacgtgcctgccctgttggagtgtccacgaggaggccactgtggctggagcagggagagtgagagggagaccaagcttgaggacagggcagtggtggggatggcttgtatggagccttacaggccacggtgaggactttgggtggagccaggggaggctctgagcaggtgaaggaagtgatcggactccacgagtcacaggcaaaggccccagggctgacagctgccccagggcctgcgggctcccagccctgccagatgacctgagatctatctattcccccgtcatggggcgcggtttctgcctccacagatttcattccctcccacccgcccctcacttggcccaaggcacgcaggactccttgccgttcctggaacacagccagctctttctcactgcggggcctgggcgctggctgtctgccccctgtgtgccctctccccagctcatcccaggctggcgccttctcaacctcaggtctcagactcggtgtcccctcctcagaggccttccctgctgaccccagctaaagtagcctgtgttgctgcctgccccacccccgttttacttcgatctgcaattctttccttgattggttaacttgttcattggctgtttacacccgtaaagctaagtctgtgagggtggtgaccatgagttcaacgcctctgccaaatcctcccaggccccttcttgggctggattggggactctgggctccccgctagttccagtcctgcgcattctaggccatcaccgtttggggatgggtctctctgactcccccactggacttcaacctcagagggatggggcccagagctgcgtcccagcattgcccagcacaagatagatacttaataaatattgattgccttaatgaaggccaccacatgccaggctccagccgggcaatgccagggacagcgatgaatcagctacagtcatgccctctgggagctcgcaggcaggcagggaaacacggttactcaacacaggtgatgagcagtaagagaatcccgtggcgggccgggccaagacggtgaggtcacaagctggacggtcatggagtgctgtggccgccgactgaactggtgccctgtgtgggtctggcatgccctgtcccgggctgggtgaggctgtggacatgccgggaggtggcaacctccacagagggcagaggtcagacactggagtcaaacagaaactggttcaaatcccagccccaccaattcctgtgtgaccatgggcaagtcggcaaccctctctgaatctctgtttcttcatctataacccaagaatgataatactctgtgaggctgccttggggttaaatgagattgaaagccttgggatcgatattgattcctctttttctcatgctccacatccaagtatctggaaaatcctgtttgccttgccttcgaaatcgatctagactcttttttttttttgacatggagtttcactcttctcgcccaggctggagtgcagtggtgtgatctcggctcactgcaaactctgcctcctgggttcaagcaattctcctgcctcagcctcccaagtagctgggattacaggagcctgccaccacacctggctaatttttgtatttttagtaaacatggggtttcacagtgttggccaggctggtctcaaactcatgacttcaggtgatccacctgccttggtctctcaaagtgctagaattacaggtgtgagccactgcgcccagctcgatctagactctctacgcttttggcacccccaaagcccccaccctggtcctgtctacactcatttcctacagactccttggacttcctgctccctccttttcccgggagtctgttccccacacacaaccaaaggcacctgtgaacacctgcatcagatcacatccgcccctgctcagagccctcctgtggctccgtctcaggtccacgaggccccagacgatctgcccctgtcacccctgtgtcctcaccccctccaatcacccccctcgcccactctgctgcagccacactggcctctgcattggactccccacccacttttgcactggcagttccctctgccggggacactgttcccccagggatctgtatgactccctttatccccccctcaggcctttgctcagtgccaccctccctgaccctcttgtttaaaacagctccacctaaccggaggtcatcaggttcggtgaaataagccaggcacagaaagacaaacctcgcatggtctcactcatttgtgggagctaaaaatcaaaacaattgatgtcatggacacggcgagttagaaggatggtgaccagaggctgggaagggtgctgggaggctgcaggggatgggctttttttgtttttgtttttgttttttgagacggagtcttgctctttcgcccatgctggaatgtaagggtgagataccggctcactgcaaactctgcctcctgggttcaagcaattctcctgcctcagcctcctgagtatctgggattacaggcacccgccaccacacctgactaatttttatatttttagcagagacagggtttcaccatgttggccacgctggtctcgaactcctgatctcaaatgatccgcccgcctcggccttccaaaatgctgggattacaggtgtgagccactgcacccagcctcggttttgttaatgggctaaaaaaaaaagaatgaataagacctactatttgatcacacaacaagatgactattctcaataataattgtacatttttaaataaccaaaagagtgtaattgggttgtaacacaaaggataaatgcttgaggggatggataccccatgcctgtatcaaaatatctcatgtaccccataaatacatacacttactatggacccaacaaaaattaaaacctaaggctgggcactgtggcttatacctgcaaccccagcactttgggaggccgaggtgggaggatcacttgaagtcaggagtttgagaccagcctggccaacatggtgaaactccgtctctagcaaaaatacaattagctgggcgtggtgatgtgcacctgtggtccagctactcaggaggctgaggtgggaaaatcgctggagtccgggaagttgaggctgcaatgagccaagatcgcaccactgcacgccagcctggatgacagagtgatatcctgtctcaaaagtaaaaaaaaaattaaataaattcttaaaaaagtaataattaataataaaataaaacagctttaccctccatacacctcccatctcccttctctgctttatattccttcaagacactgagggctgggagcgatggttcatgcctataatcccagcactttgggaggccaaggtgggcgggtcacctgaggtcaaggagatcaagaccaaccggaggtcatcgggctggccaacatggtgaaaccccgtctctagtaaaaatacaaatttagctgggtgtggtcatgcacacctgtaatcccagctacttgggaagctgaggcaggagaattgcttgaacctgggaggcagaggttgcagtgatccaagatagcaccacctgcactccagcctgggtgacagagcaagattccatctcaaaaaaaaaaaaaaaaaaaagcatttagatcttgtgacccactatatagatacatgtttgattatttttttccttttctcccccaagagaatgtgagctccctggacaacagggtttttttgtttgtttgttttttgccagttctgtcmcctgctgttaccttggtcactggtatatagtaggtgctcaataaacatggtttacgtggaagaaagaaggaatgagaaataaaggtaagcttagcacagggcctggcactgagggatgcttatcagtaggaatgacagtgacttaggtgactcagataaaggctcagccctcgggagctccccgtggctgggtgcgcagcagacaggcacgcaggactggttgcaacacctgccctgtgtgacgtgcacaggaagttgcaggttgcagggccagagaccctgaagcttctgagaggcgaagctgagcaaggtcttttttttttttttttttttgagacagggtctcactgtgccgcccaggttggagtgcagtggtgcaatcatggctcactgcagccttggcctccccaggctcaaatgatcctcccacttcagcctcccgagtatctggaactactaggcgtgccaccatacccagctaatttttgtattttttgtagagatggggtcttgttatggtgcccaggctggcctccaactcctggactcaagcaatcagccagccttgaccttccaaagtgttgggattacaggcgtgagccaccacgtcccccgccacaaggctttcaaaggccgcacagatgcctacgctgcaggctggggttgggaggtagcgggtggtcccagaaagggaagcagggccacggggagagctcatgggaaggctgggggatccatggggctctggattcattcatcaataagtatttatttattaaactcctttgttgctcaaatcagccagaagtggtttctgttgatggcaactgagaaccatg

SEQ ID NO: 94075 - DNA, 131842 bp, Homo sapiens
  misc_feature (1)...(131842): n = A,T,C or G
ttcctcttttagctcggagaagtttgattgtctgaagccttcttctctcaactcaacaaagtcattctccatccagctttgttccattgctggtgaggagctgcattcctttggaggaggagaggcgttcttatttttagaattttaagtttttctgctctgttttttccccatctttgcagttttatctacctttggtctttgatgatggtgatgtacagatggggttttggtgtggatgtcctttctgtttgttagttttccttctaacagtcaggaccctcagttgcaggtctgttggagtttgctggaggtccactccacaccctgtttgcctgggtatcagcagcggaggctgcagaacagtgaatattggtgaacagcaaatgttgctgcctgatcattcttctggaagttttatctcagaggagtacccggctgtgtgaggtgtcaatctgccccttactgggggatgccttccagttaggctactcaggggtcagggacccacttgaggaggcagtctgtctgttctcagatctccagctgcgtgctgggagaaccactactctctccaaagctgtcagacagggacatttaagtctgcagagttttctgctgccttttgtttggctatgccctgcccctagagggtggagtctacagaggcaggcaggcctccttgagctgcggtgggctccacccagttcgagcttcctggccactttgtttacctactcaagcctcagcaatggcaggcgcccctcccccagcctcactgctgtcttgcagtttggtcttagactgctgtgctagcaatcagcaaggctctgtgggcataggaccctctgagccagtcacgggatctgatcccctggtgtgccatttgctaagaccgttagaaaagtgcagtgttagggtggaagtgacccgattttccaggtgccatctgtcacccctttctttggctaggaaagggaattccctgaccccttgcacttcctgggtgaggcgatgccttgccctgctttggctcacgctctgtgcactgcacccactgtcctgcacccactgtctgacaatgccccatgagatgaacctggtacctcagttggaaatgcagaaatcattcgtcttctgcgtcactcacactgggagctgtagactggagcttttcctaattggccatcttggctagactctcccccatttcttgtatcttcatatacctagtaatttgagatttcatcctggatattacaagtgataagttggagagaccatggattccattatgttctgttgaaaaatactgattttggttgtttgtttaatttggaaagcagttaacctggctaatctcaaaccctcagctctgaaatctcaattaagttcctttagccttagcagggtacctggagttctccagcaaataagtagttcaacaattggtcagaaatttggacagagtttatttacagaatttggggctccccctctctggctctttcctttttgcaattctaccaccactatcagtagatgctataatcaccttgaattctgtcctctggttcttgaagtcaaaaaaattaaaacatctctatctgggattaagccaccccacaaggcactttccagggtctgcctttaggccgaaagcattaaaaaaaacacccaaaataggaaacctgcttcatccaacccccttcagtatctgctgctttcgttcactctccagtaatttcagagaactgggttcttaaaaatgttttcttcagagttaatagctgttattcacaggatgcttgatccaatagaagctactcaaacattaccagaagaaactctccagacacttggatactgacaccttcgccctgtgatttaaaaagttgttcatccctgtcatctacccaacttctttcctacctctctactctaagccctgacattctactggtagggaagccctttatggccaggaatgtgagctatccaaacactcaggaagaaagaatcttgactttcctctcttctttgaccttcttcactctatttcagccaatacttccacaggcccacctttatccttgtcatcactctgaaatatgaaacacagacatttcactctccgcccacaacatctagtttcccaactcctgcactgtctcactgccaatggcctgaggggtataccagctgaccgtatctttggttaatcttccaaagaatgcaaaaactagaagttgaagtctccctcctattaaaagactttttttccccctgacattttggaatcttttgttatgtgcttacagggaagtttttcaagaaccacaggagattaggggcaattttctgatgtttcataaagaaaacaggtggggcttggcagtccagggtggtggttgacagcatggacttgacagtcacacaaggccgtactccagctctaccctcattcattgtagaacccaaagcaagggacttccaattttgggagccttatccaactcatttgcaaaatgaagatgataaaaccaacctcacaggcttacagtgcagcgtgtaattaagatcatgctcataaaaagcttcacatggtttttttttttagaagagaaatgggtctgggctagggatatttttgaatccagacacagagaggtacaggcaaataccacatgttcatgtgtacacaacagggcccacatgcctgcatacagacaccaaaatgtatgcataaaacatccaaacacttatatgtagtcacccagttgtgcatgaatccacacaaatgtgaacatgcagccatacatcaggttggacaaagaaatgcacgtcataggtaccccccaagtggcataacacaaagcatgcactcaggctacatgcacagacagacagagactggcaaacattcaggaaaggtggcaggaacacacatgcacctcatcaggtactcacaaagatgtgcatgtgtagacataagttggaatggatgcccacttatcaagcacaaacacacactccacaaagcctggtgcatgcataaattcatctgtcaacagggacatgctgaaacatacatgcacacaggaacctcaaacatgcactcagactgacacacacacagacagacgtataaataaggataaacatggcagaggcatctaggagaaaccactggacaaaatcatgcaaagttgcaaagttgcaggagcacacagggcagttaagggtaaggttgacttgcagggaacgagaaagaggaagacagaaagacaagatcagagaaaacgggagagagacaggtgagcaaagtcctgtgcagggctccaggcccatccagagtaatctgagggcctaacactggcctttcttcctgcggatactgcttaactcagcgccatgctctaggaggcagcctaagttcaatttcctattcacagcttcatgggtaaggcttggctatgctaaggaagggatgtggagagaggttcccaaaaaactctgtctcccttcccccttctcaaaggaaaagctttgataacgttagagcagagaattgtaaaagccaggagggggcttagagaacatctcgtccattctcttcaacatacagatgaataaaaacagctaatattcattgagcacttacatgtacctcccctgctttgacccatatacttctcacctaaatagctgaagagctaggagctgtttttggctccataaggttcagagagacgaagtcagctgttcaaggtcacacaacaaagacgggataaggtttggattccaatccatgccttaaccttgctcttaaccactgtaccatccatccagaaaggcaaacagaggcccagcaatggaaagggattttcctgggttcaccactaactcactctgaaagcctgtacccgcaccgccactgggacaagtccctcccacttaatttcagacaccgttctcttactccacacttcagagtaatcaacaaggccaaaattgcttgaactctatgtccccaaatactagagttctcccaacctgattctccccacccccaccctggccaggtcatggcagcctgtctgaacactcagtgcccttcctagtgccaaactcactgagaaacaaactctccaaatttctacctctctcctttttaagaaacaagggagaagaggaaggacccaggcttgtggccagcccaagtgcaggctggtgaccaggattagatggattgatgtctgcccagctggtgctaatcctccttcccacctcttcccccacaaaatcaataaacagctttcctctctctgctttgttctctgctctttgattcctccacacaggtctcagagctcaacagccaatttgagccagttagagccagtcctgggagtgtcaacctcacccacatccacttgtccaaatttggtgacctagaggagaggtgcaaccctggaaggaccaaccatcagagcctgtcctgtggccatctggggcccctctcaggatctggctgaggctcatctcagacccacataggaccaatatcagcacctgcctcatgctcatgtcacagcccactgggaccaacctcagaccctatatggtgccattcttacgccctcctgaagcaggacacacttatgccctcaatgaaacctgaaacaacacacagagccctcttggcaccaaacatgacttcaatattctcctggtatcaagttcagtaccaacttgtttcccatcctcgcatacacctgggggcagtcccaaagccaacacgatgcctttccctccctgaacacacctgatgctgatatcagaacccgccaatgtcatcagtgtgtccactgctgatgccagtctcagcactcacctcctgctaagcctggcctgcacttgactcccagggtgatctaggccagtcaatgacgggggatgagaagaaagttcacatcccagctccctcacttattccctgtgtgacctcactcaagaggatttatggagtctagatctgctcatcttcaaaatgaggatgatcatgatgaacaaacctcactgttacaaagattcgaccagatcatacacacctagacttaatcttcccatatacgaccatgctcaccaaagggtaactgccccgtttactaaggaagaatttccctgagggaaggacaggagggctactcatcccttctccactcacacccaccccaggatctacctctgtgcctaacactggagtttaccccaatctcttctgcgattgttccctctgcctgctaatagtagtagcccctgacaaagcaggaatcgcccttaaaggagacttaactcaccctcaaatatgatcttttcctaaatactccctttctactggtgggaaaaccaaatccagaaaggggaactaagtactcagagcaggagagatgggagttcagggccactcatgcatgtcccctgcctactgtctgttttctgtcctctgtagacccttatataaaatgagaaagataaacaacaatcataatattaatagggatgatacaatcaatctagtgggtttccctaaggatctgggttggaaaccagtggaggtctttgtaaattacaacccttgggacacttgagctttttccaccatttgggggttgttgttactatttctccagacctggccaatccctctgccaactgataacacaaggtactcttctccaggtgtgtggaaatttcccttgaaatatggctctggtcttccacccctttgccaaccagagatggtcagtggagtttccatggcacccatcctggcctcactctgaggttccagtgaggattccgggcatcaagagacagctctgggcaaaagcaaaatcaagtcagcccctgggcccagtgctgggctgctgggctttctgggacgacctactgggcttgctacacactcctcctcccagaaactccacacccacagccctgggtcttcctagccccaagactctcaagtccatatgcctggaatcccccctcctgagacccttaaccctgcatcctccacaacagaagacccccaratgcacagccacacttccatctcaccctaataaaacccagacctttgcattcttctcctcggaacccccaaatccacaattttggggtgcattctcactcccagatcccaaatccaaagcccaagtgctcccctatgcaaatattcccaactcctttgttctacagcttatctgttgcccgctcctaaatccacagccctggggcacccctcctgaggtaccacagatttagtcgggaggtaccctctctgttcagcttccctggggtccccctcctcctcctttgctggttgtgtccaaagctaggtggggttcacggagaggatgtagttgggaggtgaaatgaggtgattttataaccagccaaagtccacccctttttttcaggcagtataaaggcaaaccaccccagccgtcaccatctatcattccactgccaccatgctggcctcagggctgcttctggtggccttgctggccagcctgactgtgatggtcttgatgtcagtctggcagcagaggaagagcagggggaagctgcctttgggacccaccccattgctctttattggaaactacctgcagctgaacacagagcacatatgtgactccatcatgaaggtgtcccaaggcagggagatgggtggcacggggtgggggctgcccagttggctgaggctttgtggcaggggattgaccagtgtggaccagagtcttaggaaagggagttttggagtttcagcatcagggtcctaggctggaaagacaggatcttgggatgtccagctccctgactgtgagaacctgggggcaaaacatcccagtacatgatatctcggtgctgcgcccattcagagtgggggctgctccctctaaccactcccacctgcctccatcagatcagtgagcgctatggccccgtgttcaccattcacctggggccccggcgggtcgtggtgctgtgcggacatgatgccgtcaaggaggctctggtggaccaggctgaggagttcagcgggcgaggcgagcaggccaccttcgactggctcttcaaaggctatggtgagggggtgcccaagagggggaaggtggccaggccgactcgatggcctccgtgtccccagccttctccctgactctcctgcccactgaaggctgcggcagagccccctgtctggccttcgctccccagctcccttcattgcggcctctccctcttgcctgtctccagcatccctgtccctgtccctgtccagatttctccctgcctctctcactggagtctcctctttccccatctctgaggacaatcctgggtttctgttttccaaccctggttctctgtcttcatttgtctttttgtccttctcagcttctgtgcttctctgagtttctcctctgtccactgacctctccttcttcttcctctgtcttaggatttcgcggtattcctacttccacatctccagcctcctctcctgataacagtctctcctccttcccgaccgtctctgtttctctttccgtagttttctgtcttcaccagctcagcttaggagtctttcaccatttttacgcttgaacctggaaggtggaggttgcagcgagcggccaagatggcgacaatgcacttcagcctgggcgacagagcgagaatccgtctcaaaaacaaataaacaaacatacaaacaaaaaagactctttcaccatttttattttctcctcgcagatctccccatacctcacttcccccccttccatcatcttctcccatctctgtctttttctcyccctccttccctcccyatgctccatggagtgtcccgtctccctctgttctgctgtgcatctgtctgtctggcctgtctcttttctgatcctcttgttcctgttcggtctctgtttctctctgtgtttctctgactgagtttgcagttctcctgcgcgaggcttctgtgcctgttcccacggcctgacctctccccacccctgcgttcctctcccaggagtgacctgccgcacctgggagcgcaccaagccgctcaggcgcttctccatcgccaycctgcgggacttcggggtgggcaagcgcggcatcaaggaggtatccaggagaaggcgggcttcctcatcaaggccgtctagggcacgcgyggtgagcagaacaccccgagtgtggaggcgggagaaggaaaacgcccagggcgaggaacccgcgcgcgttctgtctggggaccgggcctyggtggggaaaggcgcccgcgctcccagccctgtagtctggcgctgggaatgtggctcatcagggcagtgcctcctggaattctcagactagcatcagagctctgagttgactctcttccyaacccccttctcccccaatacaccgccacacccgcaagctccagcatctatcccaccttcttcctaagccgtaccacctccaatgtcatcagctccattgtctttggsgaccgctttgactatgaggacaaaagttcctgtcactgctgtgcatgatgctggaaagcttccagttcacggcamcctccacggggcaggtaaccggctgcagcctggccgtcacgcccctaccacaacctgccaactgctcccctacatggggacaggtgccccaaactcccacccccctccagacagtgtcccctcaaaatcagcccccaatattggacaaccggamagttgcaccagaacccaggatgggtgcccaatacccagtctccaaggacacctggayagctcaacagatgatccccaaaacagagcctgaaggcaggatgcataccctcagctcagctctctcacctgggcacatgttcccatccccaacttaccataatttctaacagatgctccctacccagttcttctgaatattttaacacctggacaagtgactgcctcaacccgcctcctgcatacctgaacacctggtgctgcaaaatccagcccatcataatcatttcacatctacacaaatgtcccagattagcccactggaatatctggccaagcgccctctacttcacccacttaaatacctgaaaacatggacaggtgccctaacyaataccctaaacacataaatatctagacagattattccccagacacccaaataagtgttccccaaccctttccaatcacacaccttacagaggtgcccccagtgcatcccacttggataggtaaacacctcaacaggtatcccctcctcttcaacatcttcaccagccccactttaatacctgaacatctgaacaaaagcccccaatccagacccaataagtatctcggtagttgtcttcaaccaggcccacctgaatgcctacatacctagacaggtgacactcccctcataccagccccrtctgagtagctaaacagttgaacaggtgtttyccaacacatcctgccttgaatgtctgaacacctagctgtgcgctccaatccaccttcaytgaaacctggatgtgtgcctcagtccatgttacctaaatttctggacagtagccttctcacttaaccctcatgaagacttacatatatgttcccatccagccccactgaaatacctaaacacctgggcaggtaggtgcctttaacccagtgcctttcttgctctgacacaggtcccattcccatcagttcctgcctcctgacagcggtccttcccttcccatcctctctctgcaaccccagctctatgagatgttctcttcggtgatgaaacacctgccaggaccacagcaacaggcctttaaggagctgcaagggctggaggacttcattgccaagaaagtggagcacaaccagtgcacgctggatcccaattccccacgggacttcattgactcgtttctcatccgcatgcaaggggtacaccccagcagccaatgggaggagctgcaaagccaggcagagggaaatcaggctggcagtggggagggcagacaacacaggcccattcaaattagcccctgtcataataatcctcacaatcccaactatatcaaccatcgctgttccatctactgagccctcacccacaggcaggacctgtgcacgtgaattaaaatagcaagcacttctacagaactaccatgtgccaggcactgcattaagtgctttaagatagtatcccctatagcactcacaacagctcttgaaggaggttcaatcacggyctcaattttacaaatgaggaaactgaggcccaaagagtataagtggcttacctgaggtcacacagagaggaagctgaggwcccccaagctcaaatcctggtctctctgagtctaaggctggtgctttttttgagacagagtttcgcttttgtcacccaggctggagtgaaatggcgcaatctcrgctcactgcaacctctgcctcctgggttcaagtgattctcctgcttcggcctcccaagtagctgggattacaggtgcccaccaccacaccaagctaatttttgtatgtttagtagagatggagtttcaccatgttggccaggcaggtcttgaactcctgacctcaggtgatccaagggctggtgcttttagccaccacactctctaacctatcatgccctggttatcagacacacctctgtggacaggtgacctggctttacattgcagggtccccacctccatctggatgtcagtttctcatgtgggaaggcttaagagagtctgaagctcagggataaaggatcgagctcacaccagcaggggcctccctcacccacctcctgctcacaccagcaggggcctcccttacccacctcccctctctgaggtgtagcctagtatttctccagcttggaagttcctgttagaatctacccttgagccaccagctgatactcccttaactacaaagcacccagtacctgcgcccaggcaaaagggaaggaaacatcatacccctttcagaggcagggaaaaccaaggcccagagtgaatcagagatttattcatctaaggtcacacagcagattcttcatatccctaaaaagtagatgaygacacagcagtcatatttacgagtgtatctggaggaaggagcacctaaacctcccattatttttctagtacctcttgtgtaccaggccctgacagacctgatctcttttaatcccaacaacaagtctcagtgataatcattacagctcattcttacagcacacaatgatatcccagacactttttgcaagtgcaaaaagctctttgcacatacctcaccgaatcgtcaaacagccccacatgagaggtgctatgatgatctccgtttacagaggcagaaataaggcacatggagggctaaagtcacttctcaaaggcaccagcaaggagctgggattcaacatccagacaatytggctccaatcagtgatattatctccttcattcctgagagacagaaagctgagaactctaaagatgtggcccccagatttggagaagtgggagttcttatacaggcatcaaaagatcaaccagaggagccaatgaacaccctgaaatagtcctgcagctgggtggcatcgtgcccacctagaaaaactccgtgcaagtattttggaccccttgaaggctcagctcttatttattctacaaatatttattgtgaaccctaccatgtgtcaggcacttgtttcaaagggtgggggaacccacagggaccaaagcaaaccatgacagcagtaatacttaaataaatgagaaccagccaggtgcaatggctcacacctgtaatctcagtgctttgggaagtcaagatgggaagatcatttgagaccaagagtttgagaccagcctgggcaaaatagcaagactcyatctctccaaaaaatttaaaagccagccagaggtggtgtcacacacctgtagtcaccactaatcaggaggctgaggtgggaggattgcttgaacccagaagttggaggctgcaatgagccatgatcataccactgcactccagccttggtgatatggtttggctgtgtccccacccaaatctcatctagaattgcagctcccataatccccacgtgttgtgggagggacccggtgggtgatcattgaatcataggggtggtttcccccatactgttctcatagtagtgaataagtctcatgagatctgttggttttataaggggaaaccccgttctcttggttctcattctctctcttgccagccaccatgtaagacgcaacttttgcctttcagcatgattgtgagrcctccgcagccatgtggaactgtgagtttattaaactttttttctttataaattacccagtctacggtatgtctttatcagcagcatgaaaatggactaatacaatggacaatagagcaagactctgcctctataaataaataaagacagacggatagatagatatatgatagatagatwgatgatagatagtagatagatagatagatagatagatagatagatagatagatagatagacaggaaataagaaccctgccttcctagagctgtcattttagcaggagaaggcattatcagagccaatgccttgttgctcctggaaggttccaagcttgctttcttacctctgggtctttgaccttgctgttccctcagctgagaaggcttctccccacaccttcccatggccaattctcagaagtcttctcaaaggagccctctctgaccactcaatctgaagtaatccccatggaacccttgtacactgttggtggtaatgtaaattaatagagccactttgaggaacaacatggagtttccytaagaaaaagaaaaaaaaaagtagaataggccaggtgcggtggctcatgcctgtaatcccagcactttgggaggctgaggtgggcgagtcatctgaggtcaggagttcaagaccagcctggccaacgtggtgaaactccatctctactaaaattacaaaaatcatccaagcgtgtcggcgggtgcctgtagtcccagctactcaggatgctgaggcaggagaatcgcttgaacccaggaggtggaggctgcagtgagctgagatcataccactgcactccagcctgggtgacagagtaagactccatctcaaaaaaaatgaataaagaaataaaataaacaaacaaaaagaaagaaaaccactaaaaatagagctaccacacaatccagcaatcccaccgctaaatctatatcaaaaaaaaggaaatccgtatactgaagagatatctgcactccagtgtattttgcagctctgtttgcaagagccaagttatggaatcaacctaagtgttcatatggtgcccatacagaagggagtactattcaaccattaaaaaagaatgatatcctgctatttgcagcaacatggatggaactgcaggacattatgttaggtgaaataagccaggcacggaaaggcaaactttgcacattctcactcattcgtgggagctaaaaattatgacaatttaactcatggagatagagtagaatgatggttaccagagactgggaagggtggaggtgagggactggggatggctaatgggtacaaaaatagagttcgatacaatgaataagatctagtttttgatagcacaataaggtgatggccgtcagcaataattcattgtacttttgtttgtttgcttgtttatttttttgagatggagtctcactctgtcacccaagcgggactgcagtggcacaatcttggcttactgcaaactccacctaccaggctcaagcaattctcccgcttcagcctccagagtagctgggattacagatgcatgccaccatgccyggctaatttttttttgtatttttgtagagacagggtttcaccatgttgcccagggtggtttcgaactcctcagctcaggcaatctgtctgcctcrgcctcccaaaatactgggattataggcatgaaccactgtgcccagcctgtggtacattttagcataacagagggaatataactctaatgtaacacaaagaaatgatgagtgcttgaggtgatggttaccccatttaccatgatgttattattatatgtgactatacactttatgcctgtctacattgtatgyctgtgattatacattgtatgtctgtatcgaaatatctcacttaccacwtaaatatatacacctgctatgtagccacaaagatttttaaaaataaaaataattgcatagactcctcaaaccccaatctccagtacttttcttgtcttgctccaccccaggaccacatctcaaagcctcaagtctatcagaatttcaccctccagtctgtctcctctccatttcaccttataaaattccagaagcttctgtagttaatatataagccagaaaggaattcccaagcttgtctgtggartyccacccaaagtacgaccccaactgccttgctgcctgtgagctgtttcccgtctacccacctcctccttttccatcccttccacactctcccatctcaccacctggacagacttcagaaagccctgtggtttatttgcaaaatgctcccccaggaagggcagaggccagggcctaggagagaggcagccctgggaggtgggatggccccagamccrgagtagcaagaggccactggggacaatgaggagtgagaaggctgagggcaccgtggtcctcattcytcccgccttccattctgctgtcgctcttaaaagacatgttgctctgtttgttatttctgtggttggtgagggaatgtgtgccatgcatttgtactggcagagtctctgttaactcttcagaggctacaaggagcccaaagatggcagatgctgcagacgccaaaaggttagcatctcagggtggagtcccagggccagcttcccactggccacaggctggctgatgtatccttgtgataatgatattaaacttgcagcacctccctcagggaagggtggtggtcctgctggtggaatgtttggaggctggatttatttatttatttatttatgaaacggagtctcactttgtcacccaggctggagtgcagtggcgggaacttggctcactgcaacctctccctcctgcattcaagcgatcaccctgtctcagcctcccgagtagatgggactacagatgcacaccaccatgcccgggtaattgttgtatcttttttagttgaaacacggtttttgtatgttggtcaggctggtctcgaacccctgacttgaagtgatccacccgcgtcggcctcccaaagtgctgggattataggcatgagccaccgcgtccagcctggaggctggatttagagtggttccactgcaagaatagcgctaagctttatcaaaaggtggcattgcagcacggggtatcgagagtaactggtaggcagaatgggggcatcctgggccctttggggatgagaatttattctggacctcacaagaaagtgggatatggaggagatatagtctgatggaggaggcctagctccattttgggtgggctgtgggggtagggggtggctgatttagccactcattcattcattcctcaccaaatattttgaacacctgtcatatgccacacgctgtgttgagagtacagggatgagcaagacaatggtttggcccttcacagagttggcattgaggtgagagaggcattctcaccaacattccttccagaaaaatccctagagacccgacaataaaagaatcacacacaaaatggcacagatcacctcttgacgtggggaggtcaggctttagagatgtttatttaattctcagcagatttgaaggaacatatcagggaatccaaagcaccagtgcagaatcccacagctcagggaacctgsgccaaggrggctttttgatagacggaagcagtaggargaggcagctgggaatgaggactggggaagactacagcagtgtgtgactgtggtctacaacaggcaygaacctcaaaaatagcrttcaacrtgaaagsaaccagacacaaaagatcacatattatgcctgtaatatcagcacttwggaacactgaggtgggtggatcacctgaggccaggagctcacmaccagcctggccaacatgtccctactaaaamtacaagaaaattagccaggcatggtagtacatgcctgtaatcccagctacttgggagctgagactggagaatctcttgatcttggaaggcagaggttgcagtgaacaaaaattgcaccatagcactccagcctgggagacagagcaaggcttagtttcaaaaaaaaaaaaaaatcaaatattgtatgattctgtttatgggaaatattcagaattggtaagtccatagtgacaaaaaccagattgacaggggccgagatgaaaaagagaatggggtatggggagtgacagcttgataggtatgggttttgttgggggagagataatgaaaacatttggagctaggagaatcacctgacatcaggagttcaagaccacctaaaaatacaaaatttagccaggcgtggtgggggacgcctgtgataccagctcctccagaggctgaggcaggagaatcacttgaacccaggatgtggaggttgcagtggacagagatggcaccactgaactcgaacctgggtgacagagtgagactccatctcagaaaaaaagaaaatgtttggaactagatggtggtggttgtacagctttgtgaatgaaccacacgccactaaattttacactttaaaacagctaattttatgttatgtgaatttcagcttaatttttaaaattatatatatacatggctgggcacggtgactcacgcctgtaatcccagcactttgggaggctaaggtgggtgaatcacttgagttcaggagttcgagaccagcctggcctacacagtgaaaccccatctctactaaaaatacaaaaattagccaagcgtggtagtgcatgcctgtaatcccagctactagggaggctgaggcaggagagttgcttgatccccgggggtggaggttgcagtgagccragatcacgccactgcactccagcctgggcaacagtgtgagactctgtctcaaaaaacaagaacatatatatatatatgattttgtatattataattttcgataatctcactcctgcactcayttgcamtgygacctcagacaactggtgccatggaggggaaggaagctggcttgyagcaggtctctcagaggcaggaagttgcggggagtcagagccattrtctacagaggyggggacactgaatgaccctggaatcctttgacccccttccctcagccccttcagcggggcaggaagcggatctggtatgttgggggtattttgcccacaccacactcctggggtgtcagatcgatgtcttcwggggccacggggctggccayggagaagttctggaggatggtggtgaagaagaggaacaattccgcacgggcgatgccttcaccaagacaaatccgcttccctgtggacacagaaggtcaccagtgtgggcacagggcaggtgcatacacttcgctctgccatgtccctaagcccagacacaaatgtccactgcaacagayttgcataagactggcctttaacctacaattcagggtggacttttaggaagctgctctgaaaccagatgcaaatctttgagtggatgtgccacgttcatttctctctctctctctctctttttttttttttttttttttttttttgagatggagtctctctttgtcacccagactggagcacagtggcaccatcttggctcactgcaacctccacctcccaggtggttcaaatgattcttgtgcctcagcctaccaagtagctgggattacaggcacctgccaccacgcctggctaatttcttctatttttagtagacatggggtatcatcatattggccaggctagcctcgagctcctgacctcagataatccacctgccttggcctcccaaagtgggattacaggcatgagccactgcacccggcgccatgttcatttttatataagagagtttctagcttctgttacagttccaaagggttggtgaaacccacagagtataatgacccatttctggttctgtgtgtgtgtgtgtgtgtgtgtgtgtgtacctgtacatgtgtgagtgtgagcacatttatgacaacattcttagtgttcttcacttctcatatggggagaatggcacctccctcaaagggctcttgtgaggttaaaggagacaattgtaaaaattcttagaatagcacttggcttstgctaaggagscttaaggtttggttayygccttgtgtttgtttctggggtatstgtggggtatgtgtttctggccatgtgtctgtgtctgtgtctctaggctgtcttctagtctcagcctgagatccacaggcttcaagagctcaaggggggaaaagcccaattgtatataaattgtgaatgggactgatgcgtatgagacagggagggtctatggcttccactgattcycagaggtgcaaggaacccccagtagattctaaaccacagattgggagaaaaataagaacaaagggtgctggaaaaagctcaggcagagacaaagggagcctttcccttcacttcagtgtttcataatctgcaaaccttggaaaggccatgtcaagtgtgagttttcaggcattccctatgcctgtcaagttgttggacaagtgtgtctatgtggaggtgtttggaaaagtgtccacatccctttggcatacccagaaggtgggtgacatgagcttagaaacaggcaggtctctgggcctgttcttctgtaactctttgtgtgacctaacatttttcacaacagcctgaggcttattatctccctctcatcacgccctccccatctctggggccgtctgtttggacacctttcgaatttctttggctgcagtacccttttggcttgggttatacctttctttctgcccctggcagccctactcctgtctttttctctgtctatacctgtcagacacagcttttcttcttttcctctcctttttttggctttcttccatcttgcttaacttcctatctccatctatttgaatctgatttctccccaatctctttctctctcattctttcttttcatctccctctaaagataccttatttgtcttgttcattctttcttcctctckttttatgtcactctctctttttcctatctcttattctgtttctctcctttccctcctttctcccctcctccttccttttcctactctctctcctcttattcctcctcctcctccttctccttacgtgactctctctctctctgtgtctctctctcttcctctctgtatactgtctgaggtttgccctctgtctttctgccactggctccccatctctatctctatgtgttccctctttgtccctaactctgtttctcagtctcattatctttgttacttatctgtctctgtccttatttccctacatctctgcctctcttaaaacaaattagcaggccagtcgcagtggcttatgcctgtaatcccaggactttcagaaactgaggtgggcatatcacaaggtcagaagatcagcaccatcctggctaacacggtgaaacccagtctctactaaaaataaaaaaaaatagccaggcatggtggcatgcgcccrtagtttcaggtactcgggaggctgaggcaggagaatcacttgaacctgggaggsagaggttgcagtgagctgtgatcgtgacactgcactccagcctgggcaacacaggaagactccgtctgaagacaaaaaaaaaaaaagaaacttcagatagcaaaattgagagaagacattgacattcaagccatcaccacacatgttcccaattytcattgaagataaaatgtggaaggaggtcactgtactgcgcaaaaccgggggctgggccaaaccctggatcactgaagtcactgatgaaactcaagactgggggtttgtttctggggcctttcatggatggtgcatgttaaattcaattaaatttggcctaaagcagcctccctacataacaaattgtaatgtaactcaacatgtaaacaaacttgagagtatattcttgtaacaagtaaccttggacaatcagggcagccaagcttcagccagtcacaggctacaagctgcccagacatgctcagataaggcaaacacagagctgtaaccaatcaggctgtttcagtacctcagttcctttccctgtggataaatagtgcctgaccacattgctggatggagctctctgaacctttactggttccktgtgctgcccaattcatgaattgtttctttgttcagatagactctgctaagtttaatttgtctaaagtttttcttttaaccagccaaagagtagaggatgagaactgggacaagtcagagcacgtcaagaccttttccaccttcccrgtgctagaccataaatccaaactcctcctgcaaccttcaaggtcctgcccagatgagccctttgtcttatttccttctgcaatctacacccaaggctcactggacttcctataggttctcaatggtgccatatcacgtttctacctttggcctttgtccttgctgtttcctttgcctggaacacactttgcaatggttgattgatgctcacccatgaacatgttagcttggaagccagttcctctggtaagcttttccttacggacccaccacaagattagctactatttcctattttgtgctcccaaagctccctttagagcacttatcacaattatgtctaattataataataattgcccttgtgagcatgtcctttgtgccaggcagttctaagcatgttgcaggcattcattcatttcatgagatgattattttattattatttgatgaatgcccatcttccctgctggactttaaatttcctggggcaggaaccctgtctctgtgtgacttgtttgatgcattatcttcagcccccagtacagcactgggcttacagtggtgcccaacagattttttctttttaagaaaatgaactcactgaggtttagagatgttaaaatacttgcccaaggtcctgcttgccaagatgtgcctttgggaatgtaatcttctttctcaagcctccttatagggttgtagtgaagatggaatgggataaggcaggtgaagcaatcagaatatattaagtgctcaaataatcagtatctctcgttgtttttctcaagttgrggatagtacctgccctctggtgtctgggaaagaaattgtgggtccagcttacctaaggagaaggggataaaagcttcagtctttttcagtgccccattggcatccagaaagtggtcaggattgaaggcgtctggtttttcaaagtagtgtgggtcatggagagcagtgctcaggatgagaaatacttctgtgtcctgagggaggatcacaagatcaaaagatattgccattccctccaaccctccacacactccacaaaaaagaaatacaaaaaacaaaaacaacgggactcaattaaggagctaacaaaaggttgagttcggggattaagagaatccaggatgcccaaacaggagggctatggggttccagccggtcttaccttggggatgatgtaccctcggaagctggtgtgttgggtgacaatgtggggcacacccatggggagaaggtcggaaaatctctgaatctcatagatgactgcctctgtgtatggcattttggctcggtcatgaagctctggagggcgatgtgggccaatcacctgttcaatctccctgtagactctctctgtacagaaaagaagaccaatgaatctcattttaaagaggcatttcaggccaggcatggtggctcatgcctgtaatcccagcaattttggaggttgaggtgggtggattccttgaggtcaggarttcaagatgagcctggccaacatggcaaaatcccgtctctcctaaaaatacaaaaaattagctgggtgtggtggtgcacacctgtattcctagctactcaggaggctgaggcaggagaatcacttgaacccaggaggtggaggttgcagtgagccgagatcatgccactgcactctagactgggtgacagagcaagactccatctcaaaagaaaaaaaaatttttttaaaaagagacctttcagcaaggacactactttctattgaccaatgaaaaacctatagtaaagggttagatccttgatacccctcaaagtaatcagcatggggtgaggggaggagggaggaagcaacaagaattctcactgcttgaaatctaatgaatattacggatcctcttcccacatgcccaggtacacacacacacatgcacacacacaccacgattttgcatggaatttcagattaagaactccaggctacaaacctctcaaaacaccctctctaagatgagtagaaaatgaactaatatttattgtgtttataatatagttgagacactattcttggtcctcaggtatataacagtgtaatagaacaatagakgaattcatgaacaactggataaaaacatcaatcaatcaatcaatagatcaattcatggatggaaagattgatgaataaatgaacaaaccaataaatggatgtctgtatttacttatcaattaatagatggattgattaattaatcactaatgaatgatccatagacaaagaaatcaatgaacccaattaatgaataatcacatgaatggctagatttatggaagagcaagtgaataattaaattagtgaagtatgagtaaataaaggagtaaatgaaaggctggattgaatgataagtagatcagaggtgaataaatgagtgaattattgtgataaatgaaggaaatcacggatggattaagggtgaattgaaaggttgactcatggaaggataagagtgaaacctagttcgtagaaggatggatgaatgcatgaatgaatgaatgaatgagccaatgaatcaatgacaaatagtccatcaacataccactgtttcaaaggatcaacttgtggatcaagtaatccamataaatgaatgacagtatatgtccttagatgaatcataaatgaaagaatcagtaattatacattctttaattaatgaattaaagaatgaatagatgaaatgataagtggatggatcgatttttaagtgatggcacagaaagtcaaatattgcatgttctcactcatgagtgagtgctacaaaatgtgtacacatggacacagagagaggaatgatacacagtgragactcagaagagtgagggagcagaaggggggtgaatgatgagaaattacttaatgggtacaatgtacactgtttgggtgataaataccctaacagcccaaacttgaccattacaaaacctacgcatgtaacaaaactgcatatgtaccccctaaatttgtacatcatgaggtcaggagatcgagaccatcctggctaacatggttaaaccccatctctactaaaaacacaaaaaattagccgggtgtggtggcaggcgcctgtagttccagctactcgggaagctgaggcaggagaatggcgtgaaccctggaagtgaagcttgcagtaagccaagagcatgccactgcactccagcctgggtgacagagcgagactctgtctcaaaaaagacaaaaaaaaaaaaaccaaaaaacaaaaaacaaacaaacaaacaaaaaccttagaacaaaaaatccttaagtgatggaagaaaacagtgggagaacgcatggacagattcttcatgcatccatgcatccaccaacagaattggcttgrttggaatctagcccagagcctacagtgctcccagaataggaagccagcatcccctctctcatccaggtggtacccatagccccatttctgcagctcagaaggaggtcagaagacccccttgactggctgtccctggcccacctgcaacatgagggtatttgagcatgagcaggaagccgtagcggagagtggtgctggtggtctcagtgccagcaaagaagagcgagagcgtgttgaggttgaggttctggtggctgaattcactgtgtgcgttggatttctcctgcgtccacagtagggaaggaaggggagggtcaggggaggctgtagccttgctgtgtataygcccatctccctggctgccctccgttggcctaaaggtctttgacactatctggcccagtttgcttttctctgtcctctacacatccaaccgcgtatctctaactcatctctctcagcctctctttagtcttcctractctgtttctatctctctccacatctctttgatgtgtttctctctttttgtccccgtctctttctgcctctgtgagttttttctcttgttgctgtatttttgtcccttgccccgaattccttcctcagccagtcttctctctctctccctctgtctttcattctgtcttcccacctcccctctctccctgtctcagttcctcctccctattttctccytcctttcacctcatctttctttccttcctcatgttctctcctccctttccctattctcccctccctagtctttcttcttccctccccatcttccccttccctaccccttttccctccctcttctcacctctccatcttgccctccctcccctcccttccctttttcctctcccagaccccactttttccatgtggagcaggtaggtgtcgatgaggtccttgggggcgctggggtccagggtttcacggtgcttctccacactgtggccaatgtaagcattgatttcctgcaggtttttgtaaacttgcctgtgtgccccaggaaagtatttcaagaagccagagaagagctcaaacagctgcaagaaagaaggggtggtgaggtttgcctagggctgagctagcaggtcacagggagagagcgcctcctgggccccaatccctccatgggaaccccacttccccactcccctctgcctctgaacccctcactcactgactctatatctcctttgatctatctcacatttacctctttctgcatcttcctccctcatccttctgtctttttcttggcctctgccccatctccctgcctctctcctttctatctctcttagtctctgtctcacttcctttctgtgtcacccattgtctacctcagcctgtttatttgtctttctcatacttttctctccctcttcccacctctcctcatctcccttgctgtgtcagatattaataaaatgattcttacacaagataagcctgctgacatgttaggactaygtattttggaggttatttctattactttgatgaagaatggaatgcctaatttattgcaaataattgcaaaaatgcaaacatatatagtcagatgtaaatttccttcttaatctctccttctagagataaccattgttaactgtctggtgggtctccttccagacttttctctgtggttctcggtgggaggagaacattagaattactggtcgggcttgttacaagtactcaccttgggccccatcccagactttccagatcagaccgcccagaaagtagggtcctgaaaatccataactgtgacaaccccacatgtgaatccaacatacacccctgcttaagagctgtagctatgttgaccagcctggccgacatggtgaaacaccatctctactaaaaatacaaaaaaattagctgggtgtggtggcgctcgcctatagtcccggctgctcgggaggctgagccatgagaattgcttgaacctgggaggtggaggtggcagggagttgagatcacactactgcactccagcctgagtaacagagcaagatactgtctgaaaacaacaacaacaacaaactacagctatgcatactgttctgcagcttgatattcttaaatttaatatgtaataggcatatttccaggttaatmaataaggagacattttagtattttgttttaaaagagcagaagactgcctttacaatctggggaaagttaaaaaaaaaaacacagagggagaaggagaaatgggagaaaatgaagaaatgctgttccttattgtcatttatccttcattttctttaggtggagagctttaccaaagactgagaagcaaggatacagaagaaccagaagcagtctgggcatggtggctcacacctgtaattccagcactttaggagtctgaggcgggcagatcacttgaggtcaggagttagagaccagcctggccaacatggcgaaaccccgtctctactaaaaatacaaaaacattagcctggcatagcggcaggcgcctgtaatcccagctacaggaggctgaggcaggggaattgcttgaaccagggaggtggargttgcagtgagctgagattgtgccactgcactccagcctaggcaacagagcgaggctctgtctcgaaaagaaaaaaaaaaaaattagccaggtgtggtggcacatgcctgcagtcccagctacttgggaggctgaggcaggagaatcacttgaacccgggaggtggaggttgcagtaagccaagatggcaacactacaccccagctggaatgaaacagcgagactccgtctaaaaaaaataaaacagaaatgacatccaggagcagaatagacatgaagcccaaagccttattcgttctctctctctccctctctttcacactcattctcatcaactctgtctctcagaatctcttgatttctgctcttctttgtcttgtttttgctcatcttccttctctcagtctctctctgactctatttctgcctccccatcacgcctcattctctctctcagtgtctctatccctgtctcaccgtctctcctccctccaggtctccatgtccctgattcttcacatgtctgcgtttcttccaaggataagctgcatttctgagcccccaagacaggtcatccttttctcgtgtgttctgggtgttcacctcacccccacaccccctgtccctctccgtctccctgacctggccgaatacagagctgatgagtgaaaaagtctggtagaacaagttcagcatcttcaggaactcttgatcttggtagtggaatcgttttccaaagaygatggagcagatgatgttggcggtaatggamtggaagaggaaggtggsgtccatgagggcccctaggaagaagcagcagrtcaasgacacagactgaagtgcctggggaacatcaggctgtcaccyatctctgtgtgattgtctgccatcactcagtaatggtaaacatgagaataaccrtaacagctaattatgtaccagcacgtcacgcgtaattccattgaactctcactacaacaatgtgaggcagatgcaatttgattattagctccagtttatagatgggcagaccgagaggctgagtaatttgaccaaagttgcacagctactcattactgaggccaggatttagacccaggcaacacagctatagagtccatgcagccggttctcactctgcacctcctctcaggccccacctctgactctgggagtgagtacagttaaatcccaggggtaggggctgggcagagtaggtgttcaatcaattgcttrtataaattaaaaagccctgggtgggcacaggggcccatacctctaaacccagcacttcgggagcctgattcaaaaggatcaggaattcaagaccagcctgggcaacataaggagaccctgtctctacaaaaaaaaaaaaaaaaaaaatgtagctagacatggtggcacatgcctgtagtcccagttgaaatagtccaggggctgaagtgggaggatcacatgggcccaggagtttgaggctgcagtgagctatgatcgtgccactgcactccagcctgggtacagagtgagaccccgtctctaatttaaaacaaataaaaaaccatctttccacccctacctattactcccccttaatctcttctttccacatctagggctctccagtcttctgggaattattctgtacttgttaagtgatacctgtatacaccaggctcagcactggccccagctggagggagagtggtctgtaaggacccaagaacatcaggttagtgcagcctctctctggttctcacttgcctgtcttctctcattcctctgcagaccttttcctaagctttgtctgtctstctctctaattttctctgcctcaatttctctttgcctttgtttctttctgtctctctgtgtgtatatttgtctcccccctgccgttctttattttattattattattattatttttggagacagagtctcactctatcatgcagactggagtgcagtagtgtgatcttagctcacggcaacctccatttcccaggctcaatcaattctcctgtctcagcctcctgagtagctgggattaaaggcacgtgctaccaagcctggctaatttttgtatttttagcacagatggggtttcaccatgttggccaggctggttttgaactgctggcctcaaatgatccgccagcctcagcctcccaaagtgctgggattacaggcatgagccccatacccaacctatatttttttgttttggtccctccatctgtctctttcctcctgcctgtgtcactgtttcttcctgtccttctcttcagtcttcttgtccccgtttccctatagctcctgggtctctacctccccatgcagcctctgcatttacatcccagagtctcttgagaaattttgataagagagatggtaaacacctggcatgaatgagatggaggtgctagccagagacccttcacctacatgtctcacagacaccaagttatggagaactcaaaaataacctagtgattctttgatgacccctccagctgcacccgggcagaacaccccacctggcctgtctgctcactgccagctcatcagcacttcacccagggcaaggaaaacacagttcattatttgttaaatgtctgtagtttttttcttttacttaacttccgtttttgactttgacagacacaattgatccatgaaattatatgtctttgagggtttgtttgtttgtttgagacaggatcttgctctgttgtccaggctggagtgcagtggtacaatcacagctcactgcaacctcaacctcctgggctcaagtgatcctgtagtcccaccttagcctcctgagtagctgggactacaggcacacaccaccatgcgtggctcacttcttttctatattgtgtagagacaggatctcattatgttgcccaggctgttctccaactcttggcctcaagcaatcctcctgcytgagcttcccaaagtactgggattayaggtgagagtcatcacatccagcctctttgagtaactcttggacattatacacctggcatctctctctttccctggctctctgtgtttctctcctgcccatccccatccctctctattcccctgtctctctccctctctgtctctatccctctgtctgatggtgtctccagtttcgtctgtctctgtctgtgcccttatatacctctctgtctttctattcccgtgcacctgcatctctcagtgtttcattgtctttctttcctattcatcccccaggactcacccttggatttccgaagctcctctatcagacactgagcctcctcctgaatccgctcctccacactccgctttcccatcccgaagtccctcatagtggtcacagagaatcgccgaagcaccttccagcggtttccattggcaaagatcacacctggggtgcaggggaggtgtgggttggttgtagaagaagttggaagaaggctctgagtccttcttcctcccatawactcccttccctgatgcaccccccacccgccccctcccagtgcctctgaggctctcaccatatccccggaagaatgggtcgaccatggcgatttttccccggccagagaaggcctcagccttgtccacaagggcctcccgtatggcctctactccacacagcatgaccacgggcctsggtcccaggtgtaccgtgaagacgtccccatatttctctcggaactgccaatcacatccacaccaggggtggctgttagtcagcatacacctcatttgtaaaactatcaaaatacttacataccagattggtaattagcccctccccaacatccgcctccccaggctgccctttcccctgctgggacccagcaattaagggttaatggttaacgctgtccaagggagagaatacagtcatgggttcttagtttccgtttctggttgggccagtaaagccccttcctcatccttcctttctgtgtatcactggagacagaaactgaaaaccatggcttcaggctgctaaaaagctaaaacaaaacaaaacagaacaacaacaaaataaggcaggttggacaagcttaggttaatgggtggcccagccagggtctgctctgattggcttgtgccctaaacagtaaagatggttgataaaatacgatgaatatcacccccaccgcatacttcttatgatctgtggttttgctttttgcagtttcagttacctgcagctaatcgcagtctgaaaatattaaatggaaaattccagaaataaagaattcgtaagttttaagttgtgcatcattctgagtaggatgatgatatctctcaccatccactctgtcccaccccggacacgaatcatcctttgtccaccatgtctgcactgtgtataccaccctccctatataatgtgattgtataggaaaaaaaaagagtatgcatagtgctcagtattatgtggggtttcaggcatccactgggggtctcagaagatatctccagtggataaggtgggattactgtgcagccacttggggaactgctgggcagtatttcctgaagctgaacaaatggatacccaggaaaccagcyacttcactcccaggtacatgcccagcaaaaatgtgtatgtgtgttcaccaaaaaatgaacaaaatattcacagaagctttcttaataaaatgctcatcaatatagatatagacaatcagtgagggttctcacaatagactagtatacagcaacaaaaaagaacaaaccacagctacaggcgacaacgtggctgaaactcacaggcataatgttgagtggaagcaactaggcacaaaagagtcaatgcatcataattttatgtgtatgaagttcaaacacagggccaggygtggtgactcacatctgtaatcccagcaatttgggaggctgaggcaggctgatcacgaggtcaggagtttgagtccagcctgaccaacatggtgaaaacccatctctactaaaaatacaaaaattagccaggcatggtggctctcacctgtagtcccagctactcgggaggctgagacgagagaattgcttgagcccggggaggcggaggttgcagtgaggcgagatagtgccactgcactccagcctgggcgacagagcaaaattcaatctcaggaacaaacaaacaaaaacaaaaaagargttcatacacagataaaatcaacccatgatcaagatggtaggtggatagtgaatagaaaagaacagggtgcagggtttcggggcattcttgctacttggcctgcatgtcaattacatgagtatgttcagtttgtgaaaattcattgagctgtgcgctttttacagtgatgttcaagttcaataaaaacttgacataaaagtcataaaatttgttaagtttacttacaaatgccctgcattgatctctgcaaagccccttcactggacttctggatgacatgcttactccacttaacaattgtttcactgccccacaagccagggtaaccccactaaaatgtaaaataattaatatccacgtgctcaccaaggcctacaatattcccactttgctgagaataagatctgaagtctccactgakggttcacatggtcctacatgacgtggccctattaccgctctgacttctcctcccactcattcctccatgttgttctctgacatttttcctgtttcaggattcttgtagccacccctgcctccttctagtgccttccacctgaatctttcattgtctctgctcagaaaaaaaaaacaagacagtcttcccctaaccactcaatctaacgtagttctcatcactgtctgaaatatccccctgctttagtttaattgtagctcttctccacctaacatttccttatctgtttattttttgcttatctgtctctgccaatggaatgtccataagcgcagtgacctcgtatgtcttgtccaagatgccacatcatcaattcctagactatttcctggtacatagaaagtgcccagtgaattgttattggattcgtgaataaatgaatgagtggatcaaggtagttgccatttaatgagcacttattatatactagctgtatgcaatatcccatttaatcytcacaaccaccttaggggcacacattctcattgtcatgatcttaactgacggaagagaaaactgtgactcaatgcatacgggttgaatctgagacacgagcccacatccctctgacatcaaaaagaatctggaagcttattgggaaatggagaagcaacagcgccaccttcctcagccctgatgcacacttgctcatgccctccctctttaccccacccccaagagatgcaatcataatagatggtcgtgaatacctagaggatccttggaaggtttatgaaagagttttagggagtgtgtgaagcctcacaactttatgcaaacatgtatgtgcctatttggaaaagagggggccacagctttaatcaaactctatgagaatttcataatccacaaattgttaagcagctttagtctaggagggctttggagacagacctcctgctggatctcagcttccccttttcccagttgtgtgccactggacaaatgctttccccaggctgagcatcactatcactaattttgtttgtttgtttgyttctgtttggkttttttttgagatggagtttcacttttgttgcccatgatggagtgcaatgatgcaatctcagctcagggcaaactccgcctcctgggttcaagcaattctcctgcctcagcctcccgagtagctgggattacagacatgtgccaccatgcccagctagttttgtgttttttagtacagacagggtttctccatgttggtcaggttggtctcgaactcccgacctcagttgatccacctgcttcagcctcccaaagtgctgagattataggcatgggctgccatgcccrgccaccatccctaattctaagatgagggtagcacctcatcttgtccacaggtagttgtaaatgacacctggaaaatccccatgacaacacagataattcctagacacattagtctagtgagaaaactaagtccattgattcacatgattgcgtgatactcttgtcacacatggaaaatgatgaaaagaaaacaataggcacttgggacctttacctgtatgatgcaactctatttggtgaagagggatccccagatctgccaccccctactgagggccaggcagcactttgtaggccctggccgactgccagttccgctgagtcaggcttggagctttcactcactgactccttcatttgttcctgttcacatatttactaaatgcctattgtgtaccaggtactatgttcagcactgtgctgatacctcacaggccttccttgtctggaagtgtgagggagagctcagccacrggatcacaggtaaatgcagcactatcaaggacataggctcagtaaggaggggcagctggtgtatgagagcatatgatggggacctgggggtcaggaagtcttctcaagggagctgctgcctgcctgaatagctaaggaaccccaataatgaggagcagacaccgttcttgcactgacattaaccaagatgacccacccacatcctcaaataacaataacaacgacaaaaacaatttgccccaagtcctccctgtgagaaaatggaaatctttgctgcaataaaggaagggagagggtcaaacatgtctatgcaaaacttatcccaatgctttgggaggttgaggcaggaggattgcttgagtccaggagttcgagaccagcctaggcaacatagtgagaccgtcccccaaacacatctctacaaaaataaatagtggggcatggtggctcacacttttagtcccagctactctggaggctaargtgggagaatctcctgagcacaggagttcaaggctgcagtgagctatgactgtgycattgtactccagcctgggtaacagactgagaccctgtctctaaaacaattaaaatgaaaaaaattctttaatatcattccagacaagcctccactttctatgaactaataaggtagccacaaagawccttttgaaaactcattttagtatacaaaatcaattcaagatggattaaagacttaaacgttagacctaaaaccataaaaaccctagaagaaaacctaggcattaccattcaggacataggcatgggcaaggacttcatgtctaaaaaaccaaaaccaatggcaacaaaagacaaaattgacaaatgggatctaattaaactaaagagcttctgcacagcaaaagaaactaccatcagagtgaacaggcaacctacaaaatgggagaaaattttcgcaacctactcawctgacaaagggctaatatccagaatctacaatgaactcaaacaaatttacaagaaaaaaacaaccccatcaaaaagtgggcgaaagacatgaacagacacttttcaaaagaagacatttatgcagccaaaaaacacatgaaaaaatgctcaacatcaatggccatcagagaaatgcaaatcaaaaccacaatgagataccatctcacaccagttagaatggcaatcattaaaaagtcaggaaacaacaggtgctggagaagatgtggagaaataggaacacttttacactgttggtgggactgtaaactagttcaaccattgtggaagtcagtgtggcgattcctcagggatctagaactagaaataccatttgacccagccatcccattactgggtatatacccaaaggactataaatcatgctgctataaagacacatgcacaygtatgtttattgcggcattattcacaatagcaaagacttggaaccaacccaaatgtccaacaatgatagactggattaagaaaatgtggcacatatacaccatggaatactatgcagccataaaaaatgatgagttcatgtcctttgtagggacatggatgaaattggaaatcatcattctcagtaaactatcgcaagaacaaaaaaaccaaacaccacatattctcactcataggtgggaattgaacaatgagatcacatggacacaggaagggaaacatcacactctggggactgttgtggggtggggggaggggggagggatagcattgggagatatacctaatgctagatgacgagttagtgggtgcagcgcaccagcatggcacatgtatacgtatgtaactaacctgcacaatgtgcacatgtaccctaaaacttaaagtataataataataaaaaagaaagaaagaaaactcattttaggcaaatacaaatttcattgacagttttgcttgtttccaaatttgtaaaggattgggatattcaatgaccataccagctttcataaagaaagcgggcagtgggataccaagagctagaaggaacagcaaattctgttaacagaggcatgatttgtgcccagatagcgtctgcagagcttgggaaaaaacccttagagagaaggttcagcgaattgtgtaggatgtctttgaccagcatttaaacctatacacacgttcctaaatgttatcactcctcacattgcagatgatttttttttaagagacagggtcttgctctgtgcccaggctggagggcagtgacgtgatcatagctcactgcagcctcaaactacaaggctcaagtcatcctcctgcctcagtctcccaagtagctgggactacaggcacatgccaccatgcctggctaaatttttaaaacttttttgtagagccaggtcttgtttggttgcccaggctggtttctaactcctggcttcaagcgatcctcccacctcagcctcccaaagtgttgggattacaggtataagccaccacctctttgagtgttgcccagtggtgtcgtgagccacccaaacaacatcttatctaatcataagactccttggctccctccatgtcattcccctgaaaaatctaaatgtttcataatttgagagtctgtgaccaattaccttgtatcttccaggtaaagtgacagtgtctaactgataaccaaagaccacatgttttgactaagtgtctaagataaatatatatgtatgacaattatcacattcatcatttgtatgtccatgtattctgtctgagcaaataatttaaaaattcatagtagtattggcatatatactctgtacttggtatcattaaaaagaccattgatcagaaattaaaaaaataactctattaatagtaaaaggataacgagcctaagattcaggagtatggtcaacatgggagggggaaggggaagaggagctggaaggtattgtcagtgttctaattctcccattggaaagtgggttgatggattagtaatgataagtagataattaatcataaaatcaggcatggtaagcagtgataacccaggtaaatactgagccagtggcagttaccggtatagggcactatgtgtactgttgatgagcactccctacccacactcctctcctgctctccctctctcctccactctcctggcactgacatgggctagtctgctctctctcattggcacagcaaratctatttgattcgtgccaccacctcttttacctcattctttcagtggcagrcaggtacccaggatgtaacagaggatggcagagaagagtgaaattctatacctgtggctcatacccagacacctcttcatgcccattcacccctccaaggacagtgcccccgtgcagttccaattcagagacaggktctcaatctgttacccaggctggagtgcaatggcaccatcaaattacctatgataacctatttaataaaccagtgttatgtacctgaattagagaagcataaattgcaactcattgtattaaaatttgtactttagagtctgtaattccaatgtgaagcatgcactcatggagaccctagatggccgcctggtccttcctgagttcttaaaatttccattactaaaagctcygtattccatgactcatcatagaagagagaaaatgatccaaacagtgaaaaaatattgatgaggtgactattctaagattrctaaatggtttataactaatatttggtttatcaaatccataattctagtaagacaacaaaaacctcaggtgatatatttctggcacttggtagatcatttgaacacttgaagctggagttaattcaactgccagcttcattgcatgttttctggttgtattaaagcatttctatgcacaaagatcaatcaatgccataaccgtagataaaaggttattagaaaatgtatttccttactgggcattcctggagaactctccagtgacagaggtacttgtttcactagacaagtggtaaaacagttaaataaggtattgaagaaggaattaatgaaatcaactataacctaatagtagtagtaatataaattttaaaatcctcttaaggttgctgcaaagtatgaccacaccttacattcaagttaaaagagaatattaacagcctgtcttctctctgtggacagtggaccttacctatactccccaactccacatccctcaaagtttattacaggcccagtgagttcctgcacagctgcagggtcaccggaccgataaggttaggttgcaagacatgtctttctcaagatgtaagaaatgttatttaactgctttgtttctcacttctgaaactggcttcctgcctcatgtagttcccaccttaatatgtttaaaagtaggaaaagcctttgttcggggctcagactttctggatgtatgtctggctgaaccggtgatcaccttaatttaataaactctcctgaaccttttttggtctctccagtctttgattgtcccgcaacagtrttacaaacaaatatcattaggcaaagcatgctgaattgattggagtcccttggtcwmaggtattattgattgatggcaatcagatccactcctactggaaagacatagatagatctcttgtaaaatagtaatagagggcctatgcccctaataatagaatctcatgtatctcccactcttataaactctgatatgactcaataatgcaaggctataatactttatgccaaagcatgttttcaccaggtaaaatgagtcattgatgacacatcggttgatgacaaccagacctttcatgatctagaatttagaggttgggccctttggaaatgacaccagacaaactgtccttgaactccattggaagagaccgtaccaagttcttctaagactgttccttgtactccattgggaaggacaatgccaagttcttctctgtagcaaaatgtcagggtctcggatcttggatccacatctctccattggaaaggacccttctagactcctagaactgtatgtctgttggagaccttaaggcaaagctgaccagggaagtttttccccagaagcagttggcatcttatatgcggacagcttttccaagattgtggatcaagatttctcttccatcatgaaagcattatcttttatcctttcttccccatttcttgctgtcctaaccctttccctttccttacaagaaaatccataggactataatctgtgaatggctttagcaaaggcttatactctagcaaaacaagcaaacaaacaaaaaaaacaaggagttgttgagtttctgaaccaacgccccaaaatcaggaaataatttcactggtgccaatgcctcttcatgttcccaatgagaatcacccagaaaccccaaaggaggagtggaaagctatatcttgatattctagacatcattgccacttgcttttttgcactcactggaaatatttagtagtgattatgttattagttagttaatataataacagtacgtaataacatactattaactagctaataacataatcactactaaatataggaaatgtatctgaataatggctgcaaaaggcatattttgcttccaggcatcccgtatgcaagacctggrgactacctatgggggtgtgggcaattgcgtgtgtaatgttactggattaaatatgtaaagtggccaggcatggtggctcatgcttgtaatcccagcactttgggagattgagatgggaggattgcttgaggccaagagttcaacatagcacgaccccaactctattaaaaacaaataaataagtaaatacagtaaagtctctttccaactaaatgtggttatgcaccttcgcagcatgctagaaaaagaccacaaaaaagtaagtttcccaccttgttcaggagctatgcagacttatgggtaaacaaatctaactgatctctgctctaatgccagtaggtgaccctcttttccaacaccacgagtgcctaccttgagtrtcttgaggtttgcttactctgttctttctcctcacaggtccagaacttgctatttggcctagctcactgctgctttccaaattgtttccctgagagtttcctaatacctcccatagttaaaagccaaaacagtcaataactgaaattactatcaayctcaaaatcgacgaagataagttggtttctgttcagaaaaggttccagttgggttcctgggtgctcaytcttggtggtatttgggtgacagttgtatggaatctgaggctaagttatacattaagggacatcttgaattttgcagctaattgaacctccaaggagttcagatgggtagaagccactctccaaactgagatgagaacatttgtggcaacaaaaacgcttaatggaacatcacgcaattttagatctcctctatgcccatcttggaggcttgtgtatggtgctgaagaaaaccaaatattgctcttatctttccagtgaattcactagtgcagataacttaatttaaaatgcggctgacactgctgtttctctagacactgccacaaatacactaaggacatttctcaggggaaagaaacagatatgtgtttacaggtgcagctagcagttggtttgcaagcatcctgaatggtgatggtaagtgatatggtttggctctgtgtcctcacccaaatctcatcttgaattgtaatccccaggtgtggagggaaggacctagtaggaggtaactggatcctgggggcggtttcccccatgctgttcttgtgatagtgagtgagttctcacaagatctgatggttttataagaggctcttcccccttggctctctctctttttcctgccaccttgtgaagaaggtacttgcttctccttcaccttccatcatgattgtaagtttcctgcttctcattcaccttttgccatgaattgtattttcctggggcctccccagccatgtggaactgtgagtcagttacatcccttttgtttataaattacccagtctcaggtatgtctttataacagtgtgagaatggactaacacagcaagcctggctatcccaaacttttctactcttaatgtttcttctagtgggtctccaggatactatatgttaccaggccaactacaaatgaatgtctctataaatcaagttattttatagcaagctctggtccttaattaccatcatgccctgaacaaaatctatgaccaattggactctaatactattgaactatctttattgtctgaacttcgaattattcgattttgatcagtttggttcatggacacactcaagttaaaagagactattaacagcctttcttctctctgtggacagtggaccttatctatacccccaagtccacattcctcaaagtttattacaggcccagtgacttcattttcttcgtattaccctcctgagagccatcataacagtctccctgatgtgttgtattttctcragagtcttggccgggtgcggtggctcacacatgtaatcctagcactttgggaggccgaggcaggtggattgcttgagcccaggagtttaagaccagtctgggcaacatggcaaaaccctgtctctacaaaaaatacaaaaattagctgggcgtggtggcatgcacctgtagttccagctacttggggggctgaggcaggaggatcacttgagccttgggaggtcaaggctgcagtgagacgtgatcatgccacagcacttcagcctggctgacagagtgaggccctgtctcagaaaaaaaaagagtcttaaatgctcatatgcagccattctttgtacatccagtgggctcattacagtgggaacaacaaaaacatgaagaaaakgtaaagaatcactcaactacgttgacattgtccattgtgaattccatactgagagcagacaagtccattatgatggtgacagaagtaatgttgatgcccaaggttttggtcaatctcaaaattttgaggctgaccaaaaggggagaattgtttaattaaattaaatttgacctaaagctctctctgtagagtgaactgcaacctaacttgggagtatattcttttttttttttttttttttgagaaggagtctcactctgtcacccaggatggagtgcagtggtaagattttggctcactgcaacctctgcctcctggattcaagtgattctccttcctcagcctcctggrtagctgagattacaggcacgcatcactatgcccagctaatatttgtatttttagtagagacaaggtttcaccatgttggccaggctggtctcgaactcctgacctcaggtgatccaccacctcggcctccaaaagcactgggattacaggcatgagccactgcacctggcccaaatgaatatattcttgtgacaagtagccaagtgttggctaatcagagcagctgggctttcagtccacacaggctgcaaactgctcagattgtgaccaagtaaggcaagctgtgatctgtggccaatcaggctgtttctgtatgtcacctcctttttctgcctgtaaataccacttgaccatactgccgtgtggtgtctttcctggtttagggagctgtccaactcatgagtcacttctttgctcaaataaactctgctaaatttaatttgatgcttttctcctaataataccacccatcatgcttcaccatgctccgtactcaccaaccatgcccgtgccacccctgactctggaagtctgcctcattctgtttggtgaagcttccccaagtaccaaggcaagaagcagctcaccctcagaccccattcgtctgtgtcttaccctcagaaaggatttgagtaggcctcttctatccatctgcagaaggtttcccaaaaggggcagagggcggggccctggtgggaggckgtcatgggtgttagggtggcrcwgaaccaggagtagcaagagtcctgtgaggagtgcaaggaagaggaggacgctgagttccatggtcctggtctgactgccctgcaccctgctgcagcctccaactgggccttttatcctgaccctgcctctgcaccctgttatraaatttcatccattccccacctcctttttcatcatcatccaggagcattagcttagaaaaagttgttagggaacccagacttcctgcttgggcaacccagtgacctgatgcctatccctttacccactctgtagatattggcagggatacagtggtagagatatcaaagtccaggtgagcaagtgaatgtgtgggtgtgtgggtttgtgggtatatgtatgtctatttttgtaagcataggtgagcttgcacttttttacttagctttgtctgtttgtctgtgcttgcatgcatttgtccatgcctgcttgcatccctgtatgtgcttatatgatttttacatgtaaaggggtgtttgaatttatgcaaatgyactggcgtatatttctgtggttgaatctgggggtgcttatgtgtgtatccttgcatgtgtatgagcttccttgtatttatacagttttatatacgaaagtgcatttacatttgtgtgttgtggaggtggtggtagtgcatgttcaaaactgagaggctggctgggtgcggtggctcacacctgtaatcccagcacgttgggaagctgaggggggcagatcaattgaggtcaagagttcgagaccatcctggcccacatggcaaaaccccatctgtactaaaaacacaaaaattarccgggcgtgatggtgggtacttttaatcccagctactcgggaggctgaggcaagagaatcacttgaacctgggaggtggaggctgcagtgagccaagattacaccactgcactccagcctgggtgacacagcaatactccatctcaaaaaaaaaaaaaaaaaaaaaaaaaggagaagctgatgaaaataaggaattattcaattcaatcaaatttggcctactgcctttgtagcatagcaaactgtaacctagcaatacatgaaccaattgtgtgtatctgtgtgtgctggtgtatttgtgctggtgtgttggtggatctcctagcccctctctttggaagcctgcagatgctgagtctatctccagtgtcccctccttcatccgcccttctgtgacagccacaggtggaagtggtcggagaaacagaaggaggagcaagagatgcagaactggtgagtctcagaggaagaggtggtcagttggaaggagacagaaactgagacctggcaggtacagcgatcaggtcctcttggtttctgatcactctaactagtgctaaggagtttcttccctgcctctgactatcttcacggtgcaggaaatttctctggctctctctctgtctgactttgtgtctctgttttccccctggagactcttgagctccaggtgtgtgcaaactgagtccagtttgattgatgtctrctggactcccatatgtctctatcctcactgtgcaccttcacccacacatcctctgacagggtcagtccatctttgcaaaacgtgggtgtgaatgtgtgcgtgtctgcctgtctcatcctacgcctgacttttgaccatgaggcaacatctttcttgcaatgttaagcaaaccctttgctggatccaggacctgaacccgaagttactttgacccaggaggagcagacaaacagtcctatttgtaagaggtggaaactgtactttcctgaccctgaagaggtggcagcatggactttcctgaaccaagggcctcggtcttgcygtgctgtgtcatctgacactaagattgggtgctcattgcagccccagggtgaagcaccgatggggaggcgtgaagtgctttacacacagtaactcagtctttacactcttagtgaggtattgttgccatccccattttatagatggagatattgaagcaatgacagtttgcaagtcttacccaaggtcatacartgggttggggctacattgtccaatgtgatagtcacttgctgcatgtggccactaattaagtacttgaaatgtggtccaaatgctatttacaatagcaaaaatagggaatcaacagatgaatggttaaataaaatgtggtatatatacaccattgaatactatttagccataaaaaggaataaaataatgtcttttatagcaacatggatacaactggaggggattatcttaagtgaaacaagccaggcacagaaagtgaatatcacatgttctcattcataagtgggtgctaaacaatgtgtacacatggacatagagagtggcattatcaggggaaattcagccagrtatcgggcaaaattcacccccaatattccacgtaggttcttttctgttctccctaagtgtcggccagcctgagaaataaagggacagagcacaaaagagagaaattttaaagctgggggtccgggggagacatcacatgtcggcaggttccatgatgccccctgagccgtaaaaccagaaagtttttattagtgattttcaaaaggggagggagtgtacgaatagggtgtaggtcacagagatcacatgcttcacaaggtaataagatataacaaggcaaatggaggcagggcgagatcacaggaccacaggaccggggtgaaattaaaattgcaatgaagtttcgggcaagcattgtcattgataacatcttatcaggagacaaggtttgagagcagacaaccggtctgaccaaaatttattaggcaggaatttcctcatggatcctttgctcgattgatccttttatcattatgtattgaccttctttgtctctttttacagtttttgacttaaagtctgtttcctttataaacataggtattgctgctcacttttggtttttatttgcatggaatatcttttctcatttctttactttcactatatatgtctttcctggtgagatgtgtttcttgtaggcagcatatagctgggtcatgctttttaaatccattcagccagtctctttcttttaagtggaaagtttaatccatttaattcaaggttattattgatatgtgagagcttaatcctgtcatattattagttggcttctttatgtatgtatatcctttcttcctttctttttctcttattgtttatcattgtagttttgagagacaggactagctggatttccagatctgttactatccgaggggtcctaggacaagcagtcactagttacttcgcccagccactaagttgtaactgggggactttactcttttcacatgcctttctaattatgcctgaaagccccactcctttgttagggagagacatcctagcaaaagcaggggccatgatacactagaattaggagaagggaaaagggtaaatatatataaacactctaattatgcttaccttctcctccatgcctacacaaaaatatggtgagaaatggaattcctaacttctgagggaacacctattaaacatcaggaagccattatgagttattatgggctgtacggaaacctaaagaggtggccatcttacactgctggggtcatcagaaaggaaaggaaagggaaatagaagggaaccaccaagcagataytgaagccaaagagccacaaggcgggaccctccattagaaatgcttatagaaggaaccctagtatggggtaatcccctccaggaaaccaagccccagtgctcagcagaagaaatagaatggggtacctcacaaggacatagttccctcccctcaggatgtctagccaccaaagaaggaaaaatacttttgcctgcagctaaccaatggaaattacttaaaacccttcaccaaacctttcatttaggcgttgatagcacccatccaatggccaaatcattatttgctggaccaggccttttcaaaactatcaagcaggtagtcagggcctgtgaagtgtgccaaagaaataatcccctgcacttcaggccagacatttcaatccctgtgtctttaacctccttgttaagtttgtctcttccagaattgaagctgtaaaactacaaatagttcttcaaacggagccccaggtgcagtccatggctaagatctacggcagacccctggatctgcctcctagcccatgctccaatgttgatgacatcaaagacatccctcctgaggaaatctcaactgcatgacccctattatgcccccattcagcagaaagaagttagtacagttgttggccaacctccccaacagcacttgggttttcctgttgagagggggtactgagagacaggactagctggatttcctaggccgactaagagttcctaagcctagctggggaaggtgactgcacccacctttaaacaaaggtcttgtaactcagctcacacctgaccaatcaggtagtaaagagggctcactaaaataccaattaggctaaaagtaggaggtaaagaaatagtcaaatcatctatcatctgagagcacagggagagggacaatgattgggatataaaccccaggcattggagccrggggtgggcaaccccctttgggtcccctctctttgtattggagctctgttttcactctattaaatcttgccaatgcacactcttctggtccatgtttgttccagcttgagctgagcttttgctcgctgtccaccactgctgaatgccgcctgccgatgtgccactgacttccacccctccagatccagcatggtgtccgctgcactcctgacccagcaaggcacccattgctgctcccaatcaggctaaaggctcaccactgttcttccatggctaagtgcctgggtttgttctaatcgagctgaacactagtcactgggttccacggttctcttccatgacccatggcttctaatagagctataacactcactgcatggcccagggttcaattccttggaatccatgaggccaagaaccccagctcagagaacaaaaggcttgctgccatcttggaagtggcctgccccatctgggagcggcccatcaccatcttgggagctctaaaaagaaagaccctcctgtaacagtttggtgggttttttgttgttgttgtgcttccatttgagtctattctcttcctcatttgtgtgttttctctaccaatgggttttatattttgtgtgcttccttatggtagatatcctccttttgcttctatgtgtaagatccctttaagcatttcttgtaggtatggtttagtgatgataaatttactcagcttttatttgtttgggaaagactttatttccttttcayttacaaagtataacttttctgggtacagtatcttgcagatagtttttttctatcagtggacaccatgctggatccggacgggtggaagtcagtggcacgtctgcaggcggcattcagcagtggtggagagcgagcgaaaactcagctcaatgaatatatgatcccattttctcctggcttgtaaggtttctgcttgcaaatccactgttgatgggctcctttatagatggctaaatgcttttttctcactgtttttagaatttgctcttaatctttgactttaagcaatctgaatacaatgtgccatggagaagaacattttgcattgtaactacctaggggtctctgaacttcgtatatctagatatctaaatctcttgatagattttagaagaatttagctattatttcattaaacaggttttctatcccttttgtttcctttttgccttctgggatagtcaaaatttgaatagttggttgctttcttatgttttatatatcagatatgctttgcttattgtttcttatttttttatttttttctggactgagttatttcaaaagacctgtcttcaggttatgtagttgttaatttttttttatctagtgtatcattgaagcttttgaatttgttttgtatttaattcaatgaattcttcagttccagaatttgtttggatctttttttctatgatagtgatctgtttggtaaatttctcattcatattctgaattttctgacatttttgtattttttttacttctcttgtgtttcactgagctttttaaatatcactcttttgaattttaaggcattttatggatttcttcttcctcttcttcttttttttttttttttttgagatggagtctccctctgtagcctaggctggagtgcagtggtgcgatctcagctcactgcaaactccacctcccaggttcaagcaattcttatgcttcagcctcccaagtaactgggattacaggtgtgtgccaccactcctggcgaattttgtatttttagtagaggtggggtttcaccatgttgggcatgttggtctcgaactcctgacctcaagtgatccacctgccttggcctcccaaagtgctggtattacaagtattagataccgcacctggcctagattaattttttttagaatctcttgctggagaattattgtgttcctttgggggtgtcatgttttcttgcttttgcatgtttcttgtgtctttacattgatatctgtgcatttgggatcatggttgcttcttttaattttttgaatctgctttcataggggaggacattttccctgaagttgtacctatggtgttggttgggttgggcactttgactttgactctgagtgcacgcattagtgtggttcccatacgatttcttcctctgtaaacagtgtcagtagtgtctgtgatttccccattggcttagggtgtggttgttagtggaagccgtggtaaagttgttctgagatggggacattaggtgsgccaaggggtggcagcagcatggtgagtatgcctgtccttgggtctgagggtagcatacactggcaatggtgttagtggatctaggtgggccaattcttgggcctccaggtgactttctcaggttctgacagtggaatggtgggctgggctggtaggtgggacctcaggcccctgcgtggtggacatggcatgaacagtagctgtggcaggataatcctctagctccaaaatggtccatgcttttgtggttggtggtataatgggctggataggccagtcaccaggcctgctggtggcacatgcaggtgggtgccagccatggtggtagcggcaggttgggtgggcccacctcctccctgggaggagtactcaggtgccgagtactttggtactttgatactcagctgccaaaggtgttggatggagcaggatgatacctagtcccccgtatgacatgtttgggcactagaggggtggagctggatcaggtgggcctgtcctcagacccctcaattgtgtgtgggcactgactgaggtaggcaggaggggctratgcccgggtcttcagcagatgctcagcggggtctcttgaggagagcagggttgctttcagtggctgtggagcattgcttcacccccaggtgggagtcataaaccacttagcaattttcaaatttagcaaatttcaagtaattgcttttcaattaatgtatagttaacacaatccattgttattaactatagtcacccatttatgtaatagatctcctgaacttattcctcctaactgacattttgtatcctttgatcaacatctcctcaccctctccaccaactcctggtaacccccattctactctttgcttttgtgagttaaacttttttatactcmacttaaaagtgagatcatgcagtatatatctttctgagcctgacttatttcacttaatgtaayatggtccaggttcacccctggtgttgcaaaggacaggattttcttctttcttaaggctaaataatatttgtgtgtgtgtgtgtgtgtgtgtgtgtgtgtgtgtgtacatgcatgcatagcacattttctttatccattcattcatctgttgatagacacttaggttgattgtatatattggctgtgtgagtatgctacaataaacatggggtgcagatagctcacagaggaactttacagtaactaaacgttctttaagaagaagaaagatctcaaatcaatgcaacccccctctcttcccattgccccctacctcttccccaccctcttctatccccttctgtgtctctgtttctctagaatctgagatccagaagcacagatactgggtccagtttgattgatgtcccctaggcttgggtctgtctccatcactgctgtgagcctgtcccctccctgcccctggcaggggtcagtccctaatcacccaacatgtgaatgaatgtgtccacatctgctgtctctgcctgctgctttttttctcatttaaaatgggaaatctgcatcttgcttgcatagctaaacaaaccacttgccgccactgaagatgctgattcagggaatggaggtggctgagtcaccccacatccatgtggattagacacaggcaatgcattatctgaggctgaaagtcaaagctgccaggagcagctgcaccccatacttccccaacccacgaggagaggaccaacaaagtacaacccacactttcctgacctaggaaagatgccaccatggactttcctgaccccaggacctgtctcctgctgtgttgtgcaatctggcacagtctttatagcaacacaagtatggcctaatacgggtactctgggtcctcattccacccttggggagcactgataaggaggcatgaagtgctttcaatagagtaattcacttagttgtcaccctttgatgtagtaattgttttcacccccattttgtggatggagaaagtgaaacacagaggggttgagacttctcccaatgtcacgcagcaggctaaaggtagaatcagttgtcaaacccagaaagtttggttctacagcctactgttttaatcactaccccatgatgcctctctcagcagaatgtggagacagagagagatagtaaagagtaggaggcagagagaaagagagagagtgtgagaggcagaggaagagaataagttctggagaaaagggattctgcaggtaaatagcaagggagaaactgggttaaatgacaggaagccaatttctcacctgcaggacttctcagggtctttagaatgtttatgtgcctttaaaataacatcaagaggggagggggctgacagcagctgtgcggactatttggcttctcagctttttcttttccatcacagcactcgtcactatttctcaggtccaaggctctgaggggcacactctgggaagtcagaataaaggactaatttgagtcagacatacctgagttcaaatcccagctttgtcattcatttgttgtgctaaagatgctcaggcaagtgcaagctcagcttggagcctaaagtttccttatctggaaaatatggatacctagtgatattgtttggctgtgtctccacccaattctcatttcaaactgtatttcccataatccccacacgttgtgggaaggacactgtgggagatgattgactcatggggacgggttttcccgtgatgttcttctgatagtgaataagtctcatgaggtctgatggttttataaaaggaagtttcccttgcttgcctgctgctctctcttgcctgctgctatataagacgtgcctttgctacttctttgccatccaccatgattgtgaggcctctccagccatgtggaaatatgagtccattaaacctctttttgtctataaattacccagtctcaagtacgtcttcattagcagcatgagaatggattaacacagtaaattggtactgggagtgggacactgctctaaagatacccaaaaatgtggaagctactttggaactgagtaacaggcagaggttggaacagtttggaagactcagaagaaaacaggaaaatgtgggaaagtttggaacttcctagagacttgttgaatggctttggccaaaatgttgatagtgatatgaacaataacgtccaggctgaggtggtttcagatggagaagggaaacttgttgggaactgcactaaaggccactgttgctatgccaagagactggtggcatattgcccytgcccaaaagatcagtggaactttgaacttgatacaaatgatttagggtatttggcagaagaaatttctaagcagcaaagcattcaagaggaagcagagcataaaagtttggaaaatttgcagcctgaagatgcaagagaaaaccccaattcctggggagaaattcaagccagctgcagaaatttgcataagtaaccaggagcagaatgttaatcaccaagacaatggggaaaatgtctccagggatcccctgctatgtgcagccttgggacttggtaccctgcctcccagccactccagccttgactaaagctggccaagtgtttgcttcagagggtgcaagccccaagccttcaaaacttccacgtggtgttgggactgtggtgcacaggagacaagaactgaggtttgggaacctccacctagatttcagaggatgtatggaaacaccaggatgtccaggaagaggtctgctaagggagcagagtcctcatggagaactttgctagagaagtgaagaaaggaaatgtggggttggagcccccacacagagcctctgctggggcactgcttagtggagctgtgggaagagggccaccgtcgtccagaccccagaatagtagatccaacaacttgcactgtgcacctggaaaagccacagacacaaaatgccagcccgtgagggcagccaggagcggggctgtactctgcaagccacaggggcagagctgcctgacgtcatgggaacacacctcttgcaacagtgtgacccgcatgtaagacatggtgtcaaaggagatcattttggagctttaagatttgactgccctgctggactttggacctgcatggggcctatagccccttcattttggccaatttctctttttggaatgggtgtatttacccagtggcagtacctccattgtatctaggaaataattaacttgtttttaattttacaggtttataggcataagcgacttgccttgtaccagatgagactttgaactgtggacttctgagttaatgctgaaatgagttaaggccttgagggagtgttgggaaggcrtgatttattttgaaaygtgaggacatgagatttaggaggggtcggggtggaatgatatggtttggctgtgtccccacccaaatctcattttgaaatgtaattccygtaatccccacatgtcatgggagggacccagtgggaagtaattgaatcatgggagtgaattttcccatgctgtttcgtgatagtgaataagtctcacgagatctgatggttttacaaagggcagttttccctgcacacactctgtctcttgcctgcctccatgtaagatgtgtctttgctcctcctttgccttctgtcatgattgttaggcttccccagccatgtggaactgtgagtccattaaacctctttttctttataaattacccagtgtcaagtatgtgttcattggcagcatgagaatgaactaatacacctaccctatagagtcattgtgaggatggaaatgagactcaatatgccatggggaggacacactgtaagtgtttgaggaatgtgtaattggcacagggagagatatagacattcatagagaggtggagggagctagagacaggtccagggagctaaacatgggctgggggagctactgatgggctgccacagctaaagtactccactccagcctggacaacaccccagcctgggcaacagagtgagactccatcttaaaaaaaaaaaaaaaaaaaaaaaaaactagcaataaaagagccctgtatccctagacatttctctgtgtatctctctcacacccttcttgagaaggacataaactctgtggacaaagcaggtggggacccttaatctcctgaggaattcttctgaactgcgttctttttttttttttttttttgagatggagtctcgctctgtcacccaggctrgagtgcaatggaggcatcttggctcactgcaacctccacctcccgggttccagtgattctcctgcctcagcctcctgagtagctgggattacaggcaagcaccagcacacccagctaatttttgtattttcagtaaagacagggtttcaccacgttggccaggctgctctcgaactcctgacctcagatgatccacccacttcggtgacctgtgttctaatatcacccccactccatgcactcctgtggccaaggcaagggcctccacctggacagccctggaatacctcaggtacttatctgtgccctgtaaagaggaatgcagtgttcaaatcctacccttgcctgtacagtcctaatgaagacatttcccctatttcccctcactgagcctccgtttctcatctgtaaaatgagaatggagtggccatgcaaaggagaatagatctgaagtaactgttctacctgaattctggaacagccgctagtgatgtgaagttcagcaaatgtcttcactcctctgtgcctctgtttccttatctataaaatggtgatgcagccaggcacagtggctcatgcctgtaatcccagaactttgggaggctgaggcaggaggatcgattgaacccaagagtttgagacaagcctgggcaacacagtgagaccccttctctacaaaaaaatttaaaaattatccaggcttagtggcacacacctgtagtcctagtcaggaggctgaggtgggaggatcacttgagcccaggaagtcaaggctgtggtgagctgtgatcatgccactgcactccagcctgggtgatagagtgagacactgtctcaaaaataaattaaaaaaataaaatggggctgagaatagcactcctccacagggttttttgggggctttgatgggggcaggttttgtgacagagtctcactgtgttgcccaggctggagttcagtggtgtgattttggctcattgcaacctctgcctcctgggttcatgygattctcctgcctcagcctcctgagtagctgggattacaggcgcacgccaccacacccagctaatttttatatttttaatagagatggggtttcaccatgtcggccaggctggtcctgaactcctgccctcatgtgattttcccgcctcggcctcccaaaatgctgggattacaggtgtgaggaaccgtccatggcccacagtgttgttttgaagactcagtgaggacatgtgtgtactagacctggtacacaagagttggtcaaatacatttactgctccccacccttctaataaaccaaatgcagctgtgggatggtagggggagcactgggataactaagcagggaggggatcctggggctccagggatgggcagaggactcagatgctcagatctgatatggagccccgtgactgaaccccactgaggttttgggttctttaatacaacagtgaacctttcaatgactatgacacccaggagccatcctagcctagcccttggactccatctggtgccagaatggcccagggcttggatatctcaaaatatcagctgacaacaggtcagtaaatattctgagaaaatgaaaaatggacaacctgaaccccaagccttgcttccgcctgaacgctgacccagacctcggtcacattctgagaccagatcctggtcactcagtgagcactggacctggaccacccatccaagctactgactccacgctgatcctggccacagcctgagccatgaaaggcacctcagggaggaggaacagcaagaggaaagggcaggaggcttggaactgtgttgtgtttggctagaggtaacaagagaaaaagtttagcccagagggtccatcgggggaaattttgggacatggaccatgagaggtcctttggattcttagaaaaatctctgaatgtcccactgaggagttttgactttttcctagagcctttggagccatgggagatttaaagtagggtaagtcacagtcaaatttgtgctgtagaaaaatcactctgaagccagacacggtggctaatgcctgtaatcccagcctgggtgacatagcaagaccatgtctctacaaaaaataaaaaaattagctgggggtggtagcatgtgcctgtagccccacctactcaggagactaagcggggaggatcgcttgagccgaggagttcgaagctgtagtgagctgtgattgcaccactgcactccagcctgagcaacagagtgagaccctgccaaagaaaagaaaagagagaaaggaaaaggaaggagggaaggaaggaaggaaggaaggaaggaaggaaggaaggaaggaaggaaggaaggaaggaaagtaggaagcaagctctggaccttgaggggaatccacagaactggacctgctgacagatgttggctaagtcactgaaggctggtgggaacaaagatatctatcagggcatctgcaggaaaacagcctgaaaaatgtctatattaattaaggtaaaggccaggttgttgtaaccaacagatcccataatgcagtcactgaaataaaatacaagtttctttctctattttgtgtccctcttgaagtagacagttagtccagcatggcaaggtggttcccctccttgtggtcaatcatggacccagattccttcaaactcgttgctctgctatagttcagtggttctcaaagtgcagcctccagacctgcagcatcagcatcaccttggaactttttttttttagacagacagacagggtcttgctctgtcacccatgctgcaatgcagtcgtgcaatatcagctcactccagcctcgacctcctgcacccaagcaatcctactgccttagcctcccaagtagccaggactataggcatacaccacacactcagctatctgaaacttgttaaaaacacgaattcttagaccacaccccagayctactaaatcagaaaccgaaaacctgtgtttcaacaaggcctgcaggcaattctgaggcatgttctcagcagagcatcactaccctacagtattatcataatctgcatggtcaaagagcagaaggttttgtatttttcccccttttttcatttcttttcttttcttttctttttttttttttgagatggaacctcattctgtcacccaggttggagtgcagtggtgtgatcttggctcactgcaacctccccacttcaagtaaktctcatgtgtcagcctcccgagcagctgggattccaggtgcgcaccaccacacctggctaatttttgtatttttagtagaaatggggtttcaccatgttggccaggctggtcttaaactcctgaactcaggtgatccacccacygcagcctcccaaagttctgggattacaggtgtgagccaccacacctggccagttttctacttcttgaatcatccactccagtacagaagatggaagggatggaagacctctagctgttcaaagacctcaagcccagaagaaacttgaattttgggcacacaacatgggttacgagggtgagggagtccagtctagcataatggtgagtaatatgggttctggagacaggctgccttattttaaatcccaaatgtgtgactttccacaagtaacatctccttgagcctcagttccctcttccataatatggaaatcatgacagtattatctgtctcatgatgttgctatgagaattcatggtgttatgttcctgatatataacaagccctcaagtcttagtttaatattagtcttaatattttaaggttgataggagtgtctttttgtgccaagccttgcgttaaaggatttcctacagtatcacactgaatcctcatggtgtaggcatcatgattgctgtatgttatacagagataggttttgttaaaatactcattttctaaaggagggaactgaagggcagactggtgatgtcatttatcaaaggaaatagagattgtaggtgctggaactggaattctaactcaggtatgattgacgtagcctcaagtcttcatcacctctcaagaaaaccagctttctgcctggcatggtggctcgtgcttgtaatcccagcactttgagaggctgaggtgggtggatcacaggaggtcaggagttccagaccaggctggctgacatggtgaaaccccatctctactaaaaatacaaaaattagccagacgtggtggcgggcgcctgtaaccccagctacctgggaggctgaggcaggagaatcctttgaaccctggagacgaagtttgcagtgagctgagactgtgacactgcactccagcctgggcaacagagtgagactctgtctcaaaaaaaaagaaaaaaaagtaatgaaatgaaatgaatacaatgaggcctagagctaataaatgtctcagctaggcatgtagtgaaatgtctcgactaggcagtggcagagcaggattcaaattcagggctgttgagatgcacccccagactctgagcctgagtaacctgtggagctggaggaatacagcgccacctggtggtaacttgtctgtgtcgcttctggcctggaagaacagcaactaacacagcatttgctatgtgccagccattgttctaagtgctttacttagatttaattttttcttcttcttattttattttatttatttttttattatgctttaagttctagggtacatgcacaacgtgcaggtttgttacatatgtatacatgtgccatgttgatgtgttgcacccattaactcgtcatttatgttaggtatatctcctgatgctatccctccccattctcccaccccacgacaggccccgctgtgtgatattccgctccctgtgtccaaatgttctcattgttcaattcccacctatgagtgagaacttgtggtgtttcgttttctgtccttgtgatagtttgctgagaatgagggtttccatcttcatccatgtscctgcaaaggacttgaactcatcattttttatggctgcatagtattccatggtgtatatgtgccacattttcttaatccagtctatcattgatggacatttgagttggttcgaagtatttgctatggtgaatagtgccgcaataaacatacatgtgaatgtgtctttatagtagcatgatttataatccttgggtatatacccagtaatgggatggctgggtcaaatggtatttctagttctggatccttgaagatccatgtaccctaaaacttaaagtataataataataaacgtaaaataatatgggaaaggaaagtattcctttcctccagggtaggcagcaacaaggtgccaccttggaagcagagagcagaacttaccagacaccaatccatctggttccttgatcttggacttcccaacctccagaaccatgagaaataaatttctaatctttataacttgcccatcctcaggtattttgttttagcagcactaacagcacacacagggcatagccaaaagcccagaggacaggatcaaaaactatggagaagttttcctgggccctgaaacctaaccaaggggcttcagctggagtttttccatctggatttcaaaagtgctttgagctgggcactcctttttatcttccattttccctctcttgaacttgaatgtctataactcttatcctattgcctgtctcatcattgtatattgagaacagataacttgtttcttcactgctgagggtccacagatgtcgagaaattatacctagaagtttcatccacaccggatttatataacgagatttggtacttgtgagctgattatatgcagataagattttaatctttgaattgatgtaatggaacaaaactcttaggaacctcaggggargaataatatattttgcatgtgaaagggacatgaatctttgagggtgggagggtggaccaaggtaggcaaaatttctaaaaatggtttcacaagatatttcactgaaatatttcaagaaatttcatatttggtgcaataatcttaaaaacctatgaatatgatgatatatcactctcatattattttatgttgatagatattctaattaccgggatctgtgatccttacactttgtacacatgtattgaagcatcacayggtactccataaatatgtacaattataatgtgtcaattaaaataataataatagtaatgacaataataataataaagaaagcccaggttctctctcctttggtgcctatggaagattcaaaccacacaagctcctgaacatgcaggagtacagtaggactttcacaccaccctcagcccctagccaccatagaaatcaagggcctgtcccactctccctagaggcctcaattatgggagcaataaaactttccatgccctctcatcgtgtgtgtggcatcatcggttttgacacctggtccaaattttgggtgggtgtccatctgcttctgtgagtgaccataacaattgacactgtgaacagagctgctagattctgactacaatcaccaggggtctttcttcttttgctttggcttgctaacctgctaacccactccactacctgatacctagcatgcattttcagctgctgccttctagccagcctgtgccttgacctgtgctgccttgtatttcattgttgagtcctactgagcctccattaaagacttagtaaaccttggtcagaagttttgttaattaattggcattaaaagacaggatgatgggattaagaccctctttaatatagccatggatcatgtgtctcagcctggacttatctgtgtatcttagaatgcacctgtgaatgatgctaggctcaggaaaaagactcttcctttccaccaactggtatgtgtctcaaccaggcattgggccccaatctatagagcactcaggtgaacgactctatttggtgtaatatacgggcccactggatagtcattcaagaaacagcaatctttggagagtgagaaagagacagctgggtgcaagggctcacacctgtaatcccagcaatttgggaggccgagacgggttgatcaactgaggtcaggagttcgagataagcctggccaacatggtgaaaccccgtctctacaaaaaatttaaaaattacatgagtgtggtcgtgggcacctgtaatcccacctatttaggaggctraggcaggagaatctcttaaacccaggaggcagagtttgcagtaagctgaaatcaagccatcgcactccagcctgggtgacaagaacaagactccatcttaaaaaacagagtaagtctccgtcaaaaaacaaaaagtgagacaaagagagagaagagggaaaaaagcagccatttggtggcatactgaaatccatgctcctaagagcagatggctcaccaggacctctgccactgctgcccatgcctcttttgcaacaaagatcctgatcctcaggattataggaaaatcatccacaggacccgtgttgctcagtgaaggaattaattcaaatctaacttaagccctataaatcaatcattaacatgggtgataaccctgacagtacggatttgaggcccctgaaggaagaaatgtataaatatgagcaaggcagagaagccatccacccactcagatgatatccaatgatcaagaaaactttaatcaggagctgttccaagatggccaaataggaacagctctggtctgcaggtcccagcgtgaatgatgcataagatgggtgatttctgcatttccaactgaggtacctggttcatctcactgggactggtcagaaagtgggtgcagaccatggagggtgagctgaagcagggtggggcattgcctcacccacaaagtgcaagcagttgggggatttctgtgacagactgtaatgggaaaattgggacactgccacctaaacaatgcmcttttccaatggtcttagcaaatggcatgccaggagattatataccgcacctggctcagtgggtcccacacccatagagtcttgctcactgctagtccaagatcaaactgccaggtggcaagcctggctgagggaggggcgaccacctttgctgaggcttgagtaggtaaacaaagtggccaggaatctctaactgggtggagcccaccacagctcaacaaggctgcctgcctctgtagaatccacctctgggggcagggcatagctgaacaaaaggcagcagaaacttctgcagacttaaatgtccctgtctgacagctctaaagagagcagtggttctcccagcatggtgtttgagctctgagacagacagactgcctcctcaagtgggtccctgacccccatgtagcctaacttggagacacctccaaataatggccgattgacacctcatacagctggttgcccctctgagacgaagcttccagaggaaggatcaggcagcaatttttgytattctgtagtatttgctgtattgcagcctctgctggtgatccccaggcaaagagggtctggagtggacctccagcaaactccaacagacctgcagtgagggacctgactgttagaaggaaaactaacaaacagaaagggatagcatcaacatcaacaaaaaacacatccccaccaaaaccacatctgtaggtcaccatcatcaaagaccaaaggtagataaaaccacaaagatggggagaaaccagagcagaaaagctgaaaattctagaaaccacagcaccacttctcctccaaaggatcacagctgctagccagcaacggaacaaaaaagcacagagaatgactttgatgagttgacagaagtaaacttcagaaagtcggtaataacaaacttctctgagctaaaggaggatgtttgaacccatcacaaggaagctaaaaacattgaaaaaagattagatgaatggtaactagaataaacagcatagagaagaccttaaatgacctgatggagctgaaaacgttggcatgagaactacatgacacatgcacaagtttcagtagccaattcggtcaagtggaaggaagagtatcagtgattgaagatcaaatgaatgaaatcaagygagaagggaagtttagagaaaaaaaagtaaaaagaaacgaagaaagcctccaagaaatatgggactatatgaaaagaccaaatctacatttgactggtgtacctgaaagtgatggggagaatggaaacaagctggaaaacactcttcagcatattacccaggagaacttccccaacctagcaaggcagtccaacattcaaaatccggaaatacagagaacaccacaaagatactccttgagaagagcaaccccaagacacgtaattgtcagattcatcaagtttgaaatgaagaaagaaatgctaagcgcagccagagagaaagtttggattactcacaaagggaagctcaacagactagcagtggatctctcggcagaaactctacaagccagaagagagtgggggccaatattcaacattctgaaagcaaagaattttcaacccagaacttcatattcagccaaactaagcttcataagtgaaggagaaataaaatcctttacagacaagcaaatgctaagagattttgtcaccaccaggcctgccttataagagctcctgaaggaagaactaaacatggaaaggaacaactggtagcagccactgcagaaacatgccaaattgtaaagaccattgatgctaggaagaaactgcatcaactaatgggcaaaataaccagctaacatcataatgaccggatcaaattcacacataacaatattaacctgaaatgtaaatgggctaaatgccccaattaaaagacacagactggcaaattggataaagaatcaagtcccatcaatgtgctgtattcaggagacccatctcatgtgcagagacacacataggctcaaaataaagggatggaggaagatttaccaagcaaatggaaggaaaaaaaaaatgggggttgcaatcctagtctcgaagaaaacagaatttaaaccaacacagatcaaaagagacaaggccattacaaaatggtaaagtgatcaattcaacaaggagatctaactattctaaatatgcacccaatacaggatcacccagattcattaagcaagtcctgagagacctaaaaggagacttagactcccacgtaataataatgggagactttaacaccccactgccaatattagacagatcatcaagacagaaggttaaaaaggatatccaggacttgaactcagctctgctccaaatggacctaatagacatctacagaactctccacctcaaatcaacagaatatgcattcttcttagcaccacatccaacttattccacaattgactacatagttggaagtgaagaactcctcagcaaatgtgaaagaacagaaatcacaacaaactgtctctcagatcacattgcaatcaaattagaacacagtattaagaaactctctcaaaaccatacaactacagggaaactaaacaacttgctcctgaatgacaattgggtaaataacgaaatgaagacagaaataaagatgttctttgaaaccaatgagaacaaggacacaaagcaccagaatctctgggacacatttaaagcagtgtgtagagggaaattttttttttattttattattrttatactttaagttttagggtacatgtgcacaacatgcaggtttgttacatatgtatacatgtgccatgttggtgtgctgcacccattaacttgtcatttagcattaggtatatctcctaatgctatccctccccccgccccccaccccacaacagtccctggtgtgtgatgttccccttcctgtatacatgggttctcattgttcaattcccacctataagtgagaacatgcagtgtttggttttttgtccttgcgatagtttgctgagaatgatggtttccagtttcatccatgtccctacaaaggacacaaactcatccttttttatggctgcatagtattccatggtgtatatgtgccacattttcttaatccagtctatcattgttggacattgaggttggttccaagtctttgctattgtgaatagtgccgctataaacatacgtgtgcatgtgtctttatagcagcatgatttataatcctttgggtatatacccagtaatgggatggctgggtcaaatggcatttctagttctagatccctgaggaaccatcaaaccgacttccacaatggttgaactagtttacagtcccaccaacagtgtaaaattgttcctatttctccacatcctctccagcacctgttgtttcctgactttttaatgatcgccattctaactggtgtgagatggtatctcattgtggttttgatttgcatgtctctgatggccagtgatgatgagcattttttcatgtagagggaaatttatagcactaaatgcccacaagagaaagcatgaaaaatctaaaatcgataccctaacatcataattaaaagaactagagaagcaagagcaaacacattcaaaagctagcagaaggcaagaaataactaagatcagagcagaactgaaggagatagagacacaaaaacccttcagaaaaatcagtgaataaaggagttggtttttttgaaaagatcacagaattcatagaccactaggaagactaaagaatagagagaagaatcaaacagatgcaataaaaaattataaagggcctctccctctcccattccctccccctccccctccccctccccctccccctccccctccccctccccctccccctccccctccccctccccctctccctctccctctccctccacggtctccctctgatgccgagccaaagctggacggtactgctgccatctcggctcactgcaacctccctgcctgattctcctgcctcagcctgccgagtgcctgcgattgcaggcgcgcgtcgccacgcctgactggttttcgttttttttttttgttttttttttttggtggagacggggttttgctgtgttggctgggctggtctccagctcctaaccgcgagtgatccgccagcctcggcctcccgaggtgccgggattgcagacggagtctcgttcactcagtgctcaatggtgcccaggctggagtgcagtggcgtgatctcggctcactacaacctccacctcccagccgcctgccttggccccccaaagtgccgagattgcagcctctgcccggccgccaccctgtctgggaagtgaggagcgtctctgcctggccccccatcgtctgggatatgaggagcctctctgcctggctgcccagtctggaaagtgaggagcgtctctgcccggccgccatcccatctaggaagcgaggagtgcctcttccyggccaccatcccatctaggaagtgaggagcgtctctgcccggccgcccatcgtctgagatgtggggagcacctctgccctgccgccgtgtctgggatgtgaggagcgcctctgctgggctgcaaccctgtctgggaggtgaggagcgtctctgcccggccgccccgtctgagaagtgaggaaaccctctgcctggcaaccgccccgtctgagaagtgaggagcccctccgtccggcagccaccccgtctgggaagtgaggagcgtctccgaccggcagccaccccgtctgggaagtgaggagcgtctccgcccggcagccaccccgtccgggagggaggtggggggggggtcagccccctgcccggccagccgccccgtccgggaggtgaggggctcctctgcccggccgcccctactgggaagtgaggagcccctctgcccggccagtcgccccgtccaggagggaggtgggggggtcagccccccgcccggccggccgccccgtccaggaggtgaggggtgcctctgcccggccgcccctactgggaagtgaggacccctcttcccggccagccgccccgtctgggagggaggtgggggggtcggccccccgcccggccagccgcccagtccgggagggaggtggggggatcagccccccgcctggccagccgccccgtccgggaggtgaggggtgcctctgcccggccgcccctactgggaagtgaggagcccctctgccccgccagccgccccgtccgggagggaggtgggagggtcagccccccgcccggccggccgccccgtccaggaggtgaggggcgcctctgcccggccgcccctactgggaagtgaggacccctctgcccggccagccgccccgtctgggagggaggtggggggggtcagccccccacccggccagccgcccagtccgggagggaggtggggggtcagccccccgcccggccagccgccccgtccgggagggaggtggggggatcagccccccgcctggccagccgccccgtccgggaggtgaggggtgcctctgcccggccgcccctactgggaagtgaggagcccctctgcccggccagccgccccgtccgggagggaggtgggagggtcagccccccacccggccggccgccccgtccgggaggtgaggggcgcctctgcccggccgcccctactgggaagtgaggacccctctgcccggcaagccgcccagtccgggagggaggtggggggtcagccccccgcccggccagccgccccgtccgggagggaggtggggggatcagcccccagcctggccagccgctctgtcctggaggtgaggggcgcctcttcccggccgcccctactgggaagtgaggagcccctctgcccggccagccgccccgtccgggagggaggcggggggggggggtcggccagccgccctgtccgggagggaggtgggggggtcagccccccgcccggccggccgccccgtccgggaggtgaggggcgcctctgcccggccgcccctactgggaagtgaggactcctctgcccggccagccgccccgtccgggagggaggtggggggggtcagccccccgcccggccagccgccctatccaggaggtgaggggcgcctctgcccggccgcccctactgggaagtgaggagcccctctgcctggccagccgccccgtccgggagggtggtgggggggtcagccccccgcccggccagccgccccatccgggaggtgaggggcgcttctgcccggccgcccctactgggaagtgaggagcccctctgcccggccacgaccccgtctgggaggtgtgcccagcggctcattggggatgggccatgatgacaatggcggttttgtggaatagaaaggcgggaagggtggggaaaaaattgagaaatcggatggttgccgggtctgtgtggatagaagtagacatgggagacttttcattttgttctgtactaagaaaaattcttctgccttggaaaaaaaaaaaaaaaaaattataaaggggatatcaccaccaatcccacagaaacacaaactactatcggagaatactataaacacctctatgcaaataaactagaaaatctagaagaaatggataaattcctggacacatacaccctcccaagactaaaccaggaagaagtttactgaaacttatgtttactgaagcactattcacaatagcaaagacttggaaccaacccaaatgcccaccaatggtagactgggttaagaaaatgtggcacatatacaccatggaatactatgcagccataaaaaaggatgagttcatgtcctttgtagcgacatggatgaagctggaaaccatcgttctgagcaaactgtcacaaggacagaaaaccaaacaccacatgttgtcactcataagtgggaattgaacaatgagatcatttggacacaggacagggaacaacacacactggggcctgtcgtggggtgggggaatgagagagggatagtattaggagaaatacctaatgtaaatgatgtgttaatgggtggagcaaaccaacacaatgcatgtagatgtatctatcaaccctgcacgttgtgcacatatactctaacacttaaagtataataaaaataataaataaaacaaaaataaaaacaaaaaaaaactttaatcagtggatctcagggagtctgtgagctcctgatagcatatgcagattttggtcatatgtgacattgtgcctttttttttttggagattagctcagatttcattatatttatatatttctatggtggttaaaaaaacccacatagtataaaatttaccatattcaccaatttaagtttctgcaagaggacaggcaagcattagactctcatactattctagatggcctggagacctgcataggactttgcccacctgtctctctccccttgtctatgatcttgtctttctgtctttctctttcttcttccctgcaagacaaccttcccctcaactgccctttgtgcaagtgcatttttgcatgtttgtgtcattttgtccaatggtttatcctagatgcctctgccatttttacccttatttatacatctgtgtgtgtgtgtgtgtgtgtcactctgggtgcatgcttgaggtttctgtgtgcatgtatgtttcagcatgtccctgttgatagatgaatttatgcatgcgccaggctttgtggggtgtgtgtttgtgcttgataagtgggcatcctttccaacttatgtctgcccaagcacatttgtgtgagtacctgatgaggtgcatgtgtgttcatgccactgttcctgaatgcttgccagtctctgggtctgtctgtgcatgtcgcctgagtgcacatgtgctttgggatatgccacttgggggaggtctatgacgtgcttttctgggtccagctagatgtggatattcaacaaatgtgcatattcacatttgtgtgtatgtgtgcacaacaggttgactacatacaagcgtatggatgtttttgtgcatgcattctggtgtctgtatgcagacacatgggccatgctgtgtacatattaacatcagatatttgcctgtacctgtctgtgtttgaattcaaacatagccctagcccacctctatttctcttatatataaaaaaagaactgtgtgaagtttttaagagcatgattktaagtctgtgaggttgattttgtcatcttcattttgcaaatgagttaggtaaagccccaaaagttgtaaatgacttgcttctggcttccacagctaatgagggcagagcctgggtatgatcttgtgactgtaaattttatgcttttaatcacttctttggactgtcatgccccacctcttttctttatgagacattagaaaagctgcccgtaatttcttatggctcttgaaaaacttccctgtatgtaacgcaagattttgaaatgttattttaaacagtcttttaccaggagggagccttgaccttttacagtttttgcattctttggaaccttacccaaagacctagttggccagtgtatgcctcaggctattggcagtgatgcagtgaaggagttggggacctagtggttgtggtcagagtgtgaaatgtttgtttcacattttagagtgatgacaaggattagggtttctagacaagtggactctaagtctcttccacattaactggtatgttttttgtttgtttttgtttgtttgtttttgagactgggtctcactctatctcccaggctgaagtacaatagcacattcatagctcactgcagccttgacctcccaggctcaagtgatcctcttgcctcatcttcctgagtagctgggactacaagtgtgtgccactgcacccagcttacgttaagtttaatatgaaacctggccagaaagctcagtgaattcttaatattttcccttttctcccattccaaagctttctcccagtaaggcccatcttctcatgactgarttctccataaccacatagtcacctagtagccctccccctgtggcccccaagcccttggtcttctggaactcctccagtaggtagctggcttcctggagaagcatcaaagaatcttccatcattctccattggccagagctacacctctgtcgttctcctttggccagagctacatctcagtctcatgcttctgcctgcctcccctcctgtgttcaagtctgtgctagacagtgatagggagggattatgaaagctctagactgtgctgtcaaggaagccactcccaaccttcaaggttcaatcaagaaatcaagagagtaaggttctctccctgcaggatccccccccaaaaaaaacaaaagtccagactgagttggaggaaaggggaatcagtctaggaatgataggggcagagtaaagagtgtttcttacaggaaggagacctgaaccttcttacatatataaataagtggatgaatgcataggaaagtgggaggaggtattgcgagaatgccatatagactgccctggaatggggatgttaattctattttctagacaccacttggattctctggatacatgcacatatgtgtacacagaagctcacacctgtacattgatatgcctacacaaaaggggttactgtgtagtaagaaacatttagagattaccagaagtgtggattgagtcttattccaatgcactagaaatttaatggaaatttaatgaaattatctcgattgatggatggatgtaaggaagcatttatgactagaatgactaacgggtggatggatgaaagatttaatagatgggtgaagggttaattgatggatggattgaaatagatgaataataattggaaaggtggatgtaaatattaataagttgttgaatgatggaagggttaatgaatggatggatggaatattggatagatggataaatggaaagttaattggtacatgtatagataatagagcaaaagatatttatatagaagaaataattaatggattttttgatgaatttgtggacatatggacagaaggatgaaaattaaaaggatagatagatagatagatagatagatagatagatagatagdttgaaggatggaaagagtgtggtgagcctgcctcgacagcccgggacaggctcaaatatatcaggaagtgggtaagagatactgagacctgtggctagggtgaggagatccctagtgctgaagtgtaggtgctgggagtgtaaatcttttgcatttttctctagtaggtggggtaatgacttatggaattttcaggttcactatagtgaccaagaartgcccacacacacacacccaaaaggggacaagcagcaaagccctttctctcttgttgaattccagagccagagggctgggaaggaagccaggcatccctccttctgctctcaaaggtctctgttttggtgttttagaaactggattcctcagtcctcagcccagctgagttgggagctccccaaagcctccactggcatcttgattccactgcttttcaccttttctggcagctgagggagagccctgaggcctgcctgtctcctttgggaagctccacctgactgcagcctgtctcccagcctgagcccctcaatccctctggttctgtacgattcattctctgaccttccctggggaagggaggcagtgatctgacctacccacccaattcagtagccatggagctgggggaggtgtctatgaggccaggttgatggataggtgagaagaaagaaagtattccttcctgatctcctcctcatccctcaccccaccctctggaataatgacaattacataatcacctccgccttactccttcccacaggcagagagccagaaggagaggtatgtgggcaaagagcatgggtaagaagagagaaagagacaaaggttccagggggacagaaagcaagagagagagagagcaccagggagagatgggggagacagagagagatggagagagagagagaagagagagaaagggagacaaaaacaccaaggagagatagacaggggaggagagagacagagagatggagagagagaaagagagattgagagcaccaaggagagatgcaggagagaaagagacagagagagatggagagagagagagaggaaagagagagacagatagagagaaaargagacagatatcaccagggagagatgggagagagagagagagagaaagacagagacagagagggagagagagagaagacagagagagatggacagagagagaaagagagacaaggaaccccaaggagagatggagaggggaggagggagacagagagatggagagagagaaagagagattaagagcaccagtgagagatgggggggtgagagagatgaagagagagagagagacagacagagagcaccagggagagatggcaagagagagagacagagaaagagatgtagagagagagatggagagaaagagagacagatagcaccagggggagatgggagagaaagagagacagagaaagaaggacaaagagcaccaaggagagagggaggggaatggagagagacagagagactgagaaagagagagaccgagagcaccagggagacatggggtgttgagacagattaagagagagagagaagagagagagacagaaagacagaggacacaaagaagagatggagacagggagagatggggagaggaaagagagatggagagagagagagagcaccagggagagatggaaagaaagggagagacagaaagaaccagggagagacagagagagaaagaaagacaaagtgccagagagagagaagggggagaggaagggagggaaggaggggaaggagagggagggagggaagaaggtgggaagggatggagggaataactgggacccagtgaaacagggagaaggaatctgagaaagacacaggacactgctagagggagaagcagagagagatggaaagaggcacacacagagaaaggaagaggtggacagctagagagatgctcactccgaaaggtgtaaatgcagatacagacagacccagagccctggatagacttagacaagtgagaaaaagagactcagaggagagagtcagagaagtacagagcgtcagaggcccagagctctttggctctgcctaatttattggtttacaagctctttgttcttagggcagatgggagggtgaggaagggatgaggaaaaggattaatcaatgaaggagaactcgtgagtcattcaataagatgaacagcagtggcgatttctgtgtatttccttgagcaaaggcgtgtctaaactacttaagatctttaacttatcagaactgaaatgggtgggagtgggtttcaggagaaaccaagatgtttgattatactccactgcttctagggagtgctatctccctgatcaacctgtgaaatgccactgagcggttatgctctcagggcataaggacatgaaggcaataaggagacttttctccttagaggctgcccatggctccccatgggtgtctcacacgggggagaccaactcatctggcactccagaaactctttttcccgcaggtctccctttttttgtctctattaattttttttattaataaccgctattactatcatgtctcgttcacagtgtctggcttctctccgaaggcgtcgtctgcatctgtagactaaaaacaaacagcataaacatacgtaaaccaaaataaaatttgcaattgttgatccagctatggttttaatccactttaaaggattggtattagaaaggccatcagtggctccagcaagaatatcagctccgagcaacaggttgagacgagcctgagatacctcaaaaagttgttttttcagtttagcaatatctagggttaaattatcttcttttccttgtgggttacatctaatcatctcccaatggtgtacagtggcattataaaagctagaagtaatataaaaatcagaagtattccaatcacattgctccaagctcataatccaatctcccatccaaattactgtttgacggagatcactaatttgatttgccaatttttgatctatttggctttgggaattccaaagcttagaagaatttttctgccaactatccacaaagcccacagtttgaatagaagagtgcaaagcaacaccagcagcagcagcagtagctgtgacagctataaggcccatgatcacagctattaaagtaaatatgaatcattttgatctattaagtattccttttagtacttcagtgataatatgtatagagggagaggcctcccaaggtctattgaggggaacaggtatccaaactccttctcgggccctaaacagtaacatgctattatctttattaaaggtagaattaatgcaggtaaaaagatgacagttgaggcatgatatggtttgagaatcagctaggatattaatttttcccactgccaacataaaaggaggtttaacacaactctgcaatgggaccatctgattaaaggtcatggctacaacattccttcctcctctggatgagtaggaccttggttgtctgttggtccaggcatccagacactatcattaatataaacctcyactggggggtctaacaatgtaataggcctaatcagtggtgggaatggaatttaggtccaataagtgtaattttgatctgcctcagctacaaggtgacacaccarggagattaccaccatcatagctaccattagattactggtggtcagcggcttgttctgagacctcaggttctcttctgcaacgtgagctagtctcttcatctgcccccaggtcagtggagttgcttggtgagttttactggtttccatctgctcaacagagatgttcatctgagccatctgatgaactgggggtgcagagacattccgaggtcttttcctcttccttgggttctggctcatggcacaacttaagatgtcttgtgggtacccagasaggaagctgattctctcctggtgagatacaagcaaaccctcaaccccaacaagacccactggggccttttgtttgggccacttttttggtcattgataaagagctatgatggacacatctgctcctgtgtcgaccacaccctcaaattgttttccttgaatagtgaccatacaaatagatctattgtcagagacttgatttaccaatagggaggcttgcctgctgaatttgtgcttccaaattattctgttcttttttctgagctttcttctaaattaatatacagtaaaagccacagttgagctattctgtcacctggattagcactccagggaacagtggaggagataacaatttgaatttctccctggcaatcagagtccactactccagtgtgtacttgaattgcctttaaatttaagttggaccttcccaccttgccatctggcaatgggtcataagctcccattgggaccttcctaggaggctccccaggaaggagggatacagcttcagtacagcataaatctactgccccacttttagctgtggaggggaacaattgctgcacatttgtacagggaaagactgggctgggaacaccccatttgtagtcagggacgtcctgtcctgaattgggaatgccccattttgaattagggcctgtggctggcccctctgtccatttcctggcaagggctgtccgctgttatcaaactttgaatgacagtgattagcccagtgttttccttttttacatctgggacaggtacctggttccctgctttttcctcctragttttgccttttttgtacactctctttttgtatgtcctatctgtccacaattatagcaagatctggggaacactcatatgttttttgttacccttagtctagccattgccggagcaagaaggctggccttattcaagtgcctccaatgccatcacaggctttaatgtattcacttaaagttttttcctcatttagatctgcctttcccttaataggtctaatttctgcctgacattctgtatcagcattttcataagcaagcagctgaactatcactttcctgacatgagaatccaaaatagccttttgagccgtgtcttgcaaatgggtgataaaatctggataaggctcctttggaccctgttgaactgagttaaaagaagtataagtagtaccagggtcgtgaattttttcccaggctctgaggcatatagttctgagctgatcaacagtctcatcacccattaccatctgtcaatttagagtaccccatgcctgtctgattccaagcaagtgatcagatgtgatattaacaggaggttgggcttgagcatttctgcatgcctgatttgttgttgcttgatctgtccgccaggttttaaattggagaaactcagtgggggacagggtagagtgggctaatgcctcccaatccataggtattaaatgcctgttataagccacagattgtaacaaggaatgaacctaaggagaatttggcccatattgtccaattgcttgctttaagtcttttaatattttaaaaggaaatggctcccagcatgcttcagcatgttgtctgggctcctcagctggagaaataattaccagaaactgccaagcatccaaatcccccacatctcatgcctggtaaatagatgcctggattgtccctgcaccgtaatttgtatttggacctgctcacagcattcctctaccataattaaaaggtggacaagcctggatcattccctcaccataattggctgttgggtgagcctgaagcttcccttcaacatagttaattgtggggcatgcaacaatgggagcagcaagtcatgtctcaggctcccattccaaaaattcataaggctgaggygggggtggccattctggaccttcccctaaaggcgcagtgggtggcactgtttctgcagtaggtggaaatgtttcttctataagtttttggaggttagcatatatccctttctccccctttttaaaactaaactgtgatggttcactttgcagatcatcaaactcctgattattaaacttttctatgtcatcctgaaacttctcatcctcctcagtgtggaaaggctccagtggtattttgattgctgaccacacagaccaagcagacaagggaatattgtagccctcttgttgtgctcattttaagtctgctccgaacttgtcgcagtcttttacattcatggttccatattccgggaaccaaggggaatacttttctatgagctggaacaaagatgtgagattttgggtactcacaattgcccctctgtggcacaataactgccacaccaagcttaagtaattagcaaatttactctcagcctgacccgttttcccgaggttaccgtggaattctccaagcacactacttatccacagagcttgaagtgaaaacatattcaggcaccctttttctgtcatcttccactttccatgctctagcattccttcaccagattatttgtagagataacggggagtcccacgttgggcgccagatgttggggaaaccagccccacaccaccctgcaggtacygcgagtccaacggagactaaagagttagaaagaaacagagtgagaatttaaaaggtgggtccgggggaccagagtgtcagaggcttgctcatggcccagagctctttggctctgcctaatttattggcttacaagctctttgttcttagggcagatgagaaggcaaggaagggatgagaaaaaggattaatcaatgaaggagaactcgtgagttattcaataagatgtagagcagtggcagtttctgtgaatttccttgagcaaaggcgtgtgtctaaactacttaaaatcttatcaggactgaaatgggtgggagtgggtttcagaagaagccaagatgtttgattgtacttcactgctttaaggaagtgttatctccctgagcaacctgtggaatgccgctgagcaggtatgctctgggagcataaagacataaagacaataaggagacttttctcctcagaggccgcccatggctccccatgggtgtctcacataggggagaccaactcatctggtactccagaaactctctttcccacaccagcttggcctgggaagccttgtgagcagccggcacgtcattatttttctgataccacttctgtaccaggccctgacagacctgatctcttttaatcccaacaagaagactcaatgataattgttacagtgcattcttacagtgcacaatgatatcccagacactttttggaagtgcaaaaagctctttgcacatacctcactgaatcttcaaacagccccacattagaggtgctatgatgatctctgcttacagaggcagaaataaggcacacagagggcttaagtcacttctcaagggcaccagcaaggagctgggattcaacrtccagacaatctggctccaatcagtgatattatctccttcattcctgacagacgggaagctgagaactctaaagatgtggcccccagatttggagaagtgggagttcttatatagatgtcaaaatatcacccaaaggagccaatgaacaccctgaaatagtcatgcagctgggtggcattgtacccacctagaaaaactccatgcaagtattttggatcccttgaaggctcagctcttatttactccacaaatatttattgtgaaccctactatatgtcaggcacttgttctggagggtgggggaacccacagggaccaaagcaaaccatgacaacagtaataattaagtaaatgagaacctgccaggtgcaatggctcacacctgtaatctcagtgctttgggacgtcaagatggggagatcatttcagaccaagagtacaagaccagcctgggcaaaatagcaagactacatcctttcaaaatatttaaaagttagccagaggtggtrtcacaaacttagtcctcactactcaggaggctgagatgggaggattgcttgaatccaggagttggaggccgcaatgagccatgatcacaccactgcactccagtctgggtgatatggttttgctgtgtccccatccaaatctcatcttgaattgtagctgccataatccctacatgttgtgggagggacccggtgggagatcattgaatcataggggtggtttcccccatactgtcctcatactagtcaataagtctcatgtgatctgttggttttataatggaaaacccctttcacttggttctcattctctctcttgccagcgccatgtaagatgtgacttttgcctttcagcatgattgtgaggcctccccagtcatgtgtaactgtgagtttattaaacctctttttctttataaattacccagtctaaggtatgtttttatcagcagcatgaaaacggactaatacaatgggcaacagagcaagactctgactctataaataaataaagacagatggatagatacatagatgatagatacatagaaagataggtgattagatagacagatagatatagatagatagatagatgatagatagatagatgatagatagatagatagatagatgatagatwgatwgatagatagatagatagatagatagatagatagatagatagatgatagatagatagataggaaataagaaccctgccctcccagagctgtcattttaccaggaggaaacattatcagaggcaatgcctgcttgctcccggaaggtgccaagtttgctttctcacctccgggccttttaccttgctgttccctcagctgagaaggcttctcaccacaccttctcatggccaactctcagaagccttctcaaagaagccctctctgaccactcaatctgaaagaatcccccatggaacctttgtacactgttggtggtaatgtatattagtagagccactttgaggaacaatatggagtttccttaaaaaaaaaagtagaaataggccaggcgcagtgacttatgcctgtaatcccagcactttgggaggctgaggtaggcagatcacctgaagtcaggagttcaagaccagcctggccaacatggtgaaactccatctctactaaaaatacaaaatcagccaggcgtgatggtgggtgcctgtagtcccagctacttgggaggctgaggcaagagaatggcttgaacccaggaggcagaggcttgcagtgagctaagatcataccactgcactccagcctgggtaacagagtaagactccatctcaaaaaaaaaataaaataaaataaaaataaacaaacaaaaaagaaaaacattaaaaatcgagctaccatacaatccagcaatcccactgctaagtgtattccaataaaaggaaatctgtataccgaagagatgtctgcactcccatgtatttcgcagctctgttcacaacagccaagatatggaatcaacctaagtgttcatatggtgcccatacagatgggagtactattcagccattaaaaaagaaaaagatcctgatatttgcagcaacatggatggaactgcaggaagttatgttaggtgaaataagccgggcagattctgctgtcactcttaaaagacatgtttctctgtttgttgttttatttctgtggttggtgagggaatgtgtgccatgcatttgcacaggcagagtccctgctaactcttcagaggctacaaggagcctaaagctggcaggtgctgcagaggccaaaaggttagcatctcagggctgagtcccagaaccagcttcccattggccacaggctggctgatgtatccttgcgataaagatattaaacttgcaacaactccctcagggaagggtggtggtcctgctggtggaatatgtggaggttgtatttatttatttatttatttatttttgagatggaatctcgctttgtcacccaggctggagtgcagtggtgggatattggctcactgcaacctctgcctcctgcgttcaagcgattttcctgtctcagcctcccaagtagctgggactacaggtgcgtgccaccacacccagctaatttttctatttttttagttgagacagggtttctgtatgttgggcaggctggtctcgaccccctgacttgaggtgatccacctgactcggcctcccaaagtactgggattatagccataagccaccgtgtccagcctggaggctgaatttagagtggttccacttcaagaatagcgctaagctttatcaaaaggtggcattgcagcacaggggattgagagtaactggcaggcagaactgggggcatcctgggccctttggggatgataatttattctgggccaaagaaraaagtgggatatggaggagacacagtctgatggagtagcctagctccattttctgtgggctgtgggggtagtgggtggctgatttagccactcattcattcattcctcaccaaatattttgaacacctgtcatatgccacatgctgtattgagagtacagtgacgagcaagacaatggtttggcccttcacagagttgtcactgaggtgagggaggcgttctcaccaacattccttccagaaaaatccctagggacctgacaataaaagaatcacacacaaaatggcacagatcacctcttgacgtggggaggtcatgctttagcgatgtttatttaattctcagtggatttgaaggaacatatcagggaatccaaagcaccagtgcagaatcccacagctcagggaacctgcgccaaggaggctttttgatagagggaaacagtaggaggaggcagctgggaatgaggatgggggaagactacagcagtgtgtgactgtggtctacaacaggcacgaacctcaaaaatagcgttcaacgtgaaaggaaccagacacaaaagatcacatattacgcctgtaatatcagcactctgggacactgaggcgtgtggatcacctgaggccaggagctcacaaccagcctggccaacatgtccctactaaaaatacaagaaaattagccaggcrtggtaccacatgcctgtaatcccagctacttggragctgagrcwggagaatctcttgawcttggaaggcrgaggttgcagtgaacmaaaatcacgccacagcactccagcctgggagacagagcaaggcttagttttaaaaaaaaaatcaaatattgtgtgattctgtttataggaaatattcagaattggtaagtccataaggacaaaaaccagattgacaggggctgagatgaaaaagagaatggggtatggggagtgacagcttgataggtatgggttttgttggggggagataatgaaaacatttggaactaggagaatcacctgacatcaggagttcaagaccactgaactcgagcctgggtgacagagtgagactccgtctcagaaaaaaagaaaatgtttggaactagatggtggtggttgtacagctttgtgaatgaaccacacaccactaaattgtacactttaaaatggctaattttattttatgtgaatttcatcttaatttttaaaattatatatatacatggccgggcatggtgactcacacctgtaatcccagcactttgggaggctaaggtgggtgaatcacttgagttcaggagtttgagatcagcctggccaacacggtgaaaccccatctctactaaaaatacaaaaattagccaggcatggtagcacacacctgtaatcccagctactagggaggctgaggcaggagaatttcttgaaccccgggggtggaggttgcagtgagccgagatcacgccactgcactccagcctgggcaactgagtgagactctgtctcaaaatatatatatataattttgtatattataattttcaataatctcactcctccactcatttgcactgcgacctcagacaactggtgccatggaagggaaggaagctggcttgcagcaggtctctcagaggcaggaagttgcagggagtcagagccattatctacagaggtggggacactgaatgaccctggaatcctttgacccccttccctcagccccttcagcggggcaggaagcagatctggtatgttgggggtattttgcccacaccacactcctggggtgtcagatcgatgtcttcaggagccacggggctggccacggagaagttctggaggatggtggtgaagaagaggaacaattccgcacgggcaatgccttcaccaagacaaatccgcttccctgtggrcacagaaggtcaccagcatgggcacagggcaggtgcatacacttcgctctgccatgtccctaagcccagacatgtatgtccactgcaagagatttgcataagactggcctttaacctacaattcagggtggacttttaggaagctgctctgaaaccaggtgcaaatctttgaatggatgtgccatgttcatttctctctctctcgctctcgctctcgctctcactctctctctctcaatctctttatttatttatttatttatttatgtatttatttatttatttttgagatggaatctctctcggtcacccaggctggagcacagcggcgacatctcggctcactgcgacctctgcctctcagggtgttgaaacgattctcatgcctcagcctcccaagtagatgggattacaggcacctgcccccacgcctggctaatttcttgtatttttagtagacatggggtttcactatgttggccaagctggtctcgaactcctgacctcaggtaatccacccaccttggcctcccaaagtgctgggattacaggcgtgggccaccgcgcccggcgccatgttcatttttctagtagagagtttgtagcttctgttacagttccaaagggtttggtgatccccacagtgtataatgacccacttctggttgtgtgtgtgtgtgtgtgtacctctacatgtgtgtgagcacatttatgacaacattcttagtgttcacttctcatacggggagaatggcacctctctcaaagggctcttctgaggttaaaggagacaattgtaaaaattcttagaacagcacttggcttctgctaaggagccttaaggtttggttatcgccttgtgtttgtttctgggggtatctgtggggtatgtgtttctggccatgtgtctgtgtctgtgtctctaggctgttttctggtctcagcctgagatccacaggcttcaagagctcagggggtaaaaaacccaaattgtatataaattgtgaatgggactgatgcatatgagacagggagggtctatggcttccaccgattctcagaggtgcaaggaacccccagtaggttctaaaccacagattgggagaaaaatgagaacaaagggagctggaaaaagctgaggcagagacaaagggagcytttcccttcacttcagtgtttcataatctgcaaaccttggaaaggccatgtcaagtgtgagttttcaggcattccctatgcctgccaagttgttggacaagtgtgtctatgtggaggtgtctggaaatgggtccatgtccctttggcacatccagaagttgggcaacatgagcttagaaacaggcaggtctctgggcctgttcttctgtaactctttgtgtgacctaacattttccacaacagcctgatgcttattatctccctctcatcacgccctccccatctctggggccrtctgtttggacacctttcgaatttctttggctgcagtacccttttggcttgggttatacctttctttctgcccctggcagccctactcctgtctttttctctgtctatacctgtcagacacagtttttcttcttttcctctccttttttggctttcttccatcttgcttaacctcctatctccatctatttgaatctgattgctccccaatctctctctctctccttctttcttttcatctcyctctaaagataccttatttgtctccttcattctttcttcctctcttcttgtgtcactctctctttttcctatctcttattctgtttctctcctttccctccttccttctcccctccgccttccttttcctcctccctctcctcttattcctcctcctcctcttctccttatgtggctctctctgtgtgtgtctctctctcttcctctccgtatactgcctgatgttcacctgctgtctgtccttctgccactgtctccccatctctatctctcagtgtgttccctctttgtccccaactatgtttctcaatcttattatctttgttacttatctgtctctgtccttatttccctacatctctgcctctcttaaaacaaaatagcaggcctgtcacaatggctcacgcttgtaatcccagcactttgagagactgaggaaggaatatcaccaggtcagaagatcaggaccatcctggctaacatggtgaaaccccatctctactaaaaacacaaaaaattagccaggcatggtggtacacacctgtagtcccaggtacctgggaggctgaggcaggagaatcgcttgaacctgggaggcagaggttgcagtgacctgagatcatgacactgcactccagccagggcaacagagcaagaccctgtctgaagaaaaaaaaaaaaagaaaccttaagataatgtctcaggcatggtggctcacgcctgtaattccagcactttgggaggctgaggcgggtggatcgcgagatcaggagatcaagactattctggctaacacggtgaaaccctgtctctactaaaaaacacaaaaaattagccgggcatggtggcaggtgcctatactcccagctactcaggaggctgaggcaggaggatggcatgaacccaggaagcagagcttgcagtgagctgagattgtgccactgcactccagcctgggtgatagaacgagacggtgtctcaaaaaaggaaaaaaaaaaaaaaacaagacagcaaaattgagagaagacattgaccctcaagccatcaccccatgtgttcctaactgtcattgaagataaaatgtggaaggaggtcactgtactgcacaaaaccaggggctgggccaggaccctgggttgctgaagtcactgatgaaactcaagactagggatttgtttctggggcctttcatggatggtgcgtgttaaattaaattaaatttggcctaaagcagcctccctgcataacaaactgtaacgtaactcaacatgtaaacaaactgcaatgtaacttgagagtatattcttgtaacaagtaaccttggacaatcagggcagccaagcttcagccagtcacaggctrcaagctgcccagacatgctcagataaggcaaacacagagctgtaaccaatcaggctgtttctgtacctcagttcctttccctrtggataaatagtgcctgatcacattgctgggtggagctctctgaacctttcctggttccgtgtgctgcccaattcatgaattgtttctttgctcaaatagactctgctaagtttaatttgcctaaagtttttctcttaaccagccaaagagtggaggatgagaactgggacaagtcagagcacgtcaagaccttctccacctccccagtgctagaccataaatccaaactcctyccacagccttcaaggtcctgcccagctgagccctttgtcttattcccttccgcaatctacacccaaggctcactggacttcctatagattctcaatggtaccatcacatttccacctttagcctttgcccttgctgtttcctttgcctggaacacactttgcaatcattgattgacgcccacccatgaacatctcggcttggaagccagttcctctggtaagcttttccttaatgacccaccacaagattagctnstatttcctattttgtgctcccaaagntccctttagagcacttatcataattatgtctaattataataataattgcccctgtgagcatgtcctttgtgccaggcagttccaagcatgttgcaggcattcattcatttcatgagatgattattttattattatttgatgaatgtccatcttccctgctggactttaaatttcctggggcaggaaccctgtctccgtgtgacctgtttgatgcattgtcttcagcccctagtacagcactgggcttacagcggtgctcaacagatttttttctttttaagaaaatgaattcactgaggtttagagatgttaaaatacttgcccaagttcctgcttgcccagatgtgcctttgggaatgtcatcttctttctcaagcctccttacagggttgtagtgaagatggaaggggataaggcaggtgaagcaattggaatatattaagtgctcaattaataaggacctgtcattttttttctcaagttgaggataggacctgccctctggtgtctgggaaagaaactgtgggtccagcttacctaaggagaaggggataaaagcttcattctttttcagtgccccattggcatccagaaagtggtcaggattgaaggcgtctggtttttcaaagtagtgtgggtcacggagagcagtgctcaggatgagaaatacttccgtgtcctgaggraggatcacaagatcaaaagatattgccattccctgcccaccctccacacacacagcacaaaaaagaaaaagaaaaaaacaaaaacaaggggactcaattgagaagctaacaaaaggttgagtttggggattaagaaaatccaggatgcccacacaggagggatgtgggggtgcagccagtcttaccttggggatggtgtaccctcrgaagctggtgtgttgggtgacaatgtggggcacacccatggggagaaggtcagcaaatctctgaatctcacggatgactgcctctgtgtatggcattttggctcggtcatcaagcgctggagggcgatgtgggccaaccacctgttcaatctccttgtagactctctctgcacagagaagaagatgaatgaatctcattttaaagaggcatttgaggccaggcatggtggctcacacctgtaatcccagcattttgggagactgaggtgggcaggttgcttgagttcaggagttcaagatgagcctggccaacatggcaaaatcccatctctactaaaaatacaaaaaattagctgggtgtggtggtgcaagcctgtagtcctagctactcaggaggctgaggcaggagaatcgcttgaacccaggaggtggaggttgcagtgagctgagatcatgccactgcactccagcctgggtgacrgagcaagactctgtctcaaaattaaaaaaaagaaaaaagaaggaaagaaaattttttaaaaagagacctttcagcagggacactactttctattgaccaattaaaaacctacagtaaaggcttagatctttgatactcctcaaagcaatcagcgtggggtgaggagagcaggaaggaagcaacaagaattctcactgcttgaaatctaatgactattatggatcctcttcccacatgcacaggtacacacacacatatgcacacacataacacgattttgcatggaatttcagattaagaactccaggccacaaatcaraacaccctctctaagatgagtagaaaataaactaatatttattgtgtgtatattataggtgagacactattcttggtcctcaggtatataacagtgtaatagaacaatagatgaatccatgaacaactggataaaaacatcaatcaatcaatcaatagatcaattcatggaaggaaagattgatgaagaaatgaacaaaccaataaatggatgtatatatttacttaccaattaatagatggattgattgattaattaatcactaatgaatggtccatagacaaagaaatcaatgaacccaattaatgaataatcacatgaatggctagatttatggaagaacaagtgaataagtaaattagtgaagtatgagtaaataaaggaataaatgaatggctggattgaatgataaatagatcagaggtgaataaatgagtgaattattgtgataaatgaaggaaagcatggatggattaagggtgaattgaaagactgactgatggaaggataagggtgaaacctagttcatagaaggatggaagaatgcatgaatgaatgaataaatgaaccaatgaatcaatgacaaattgtccatcaacatatcactgtttcaaaggatcaacttgtggatcaagtaatccaaataaatgaatgacacagtatatgtccttggatgaatcataaatgaaaaaatcagtgagtacacattctttaattaataaattaaacaaagaatagatgaaaagataagtggatgaacggatcaatttttaagtcatggcacagaaagtcaaatattccatgttctcactcataagtgagtgctacaaaatgtgtacacatggacacagagagaggaacaacagacagtgaagactaagaagagcgagggagcagaagggggaggtgaatgatgagaaattacttaatgggtacaatgtacactgttcgggtgataaataccctaacggccctaacttgaccattacaaaacctacrcacataacaaaactgcatatgtactccctaaatttgtacatcacaagatcaggagatcgagaccatcctggctaacatggtgaaaccccatccctactaaaaatacaaaaaaatagccgggtgtggcggcgggcgcctgcagtcccagctactcaggaagctgaggcaggagaatggcatgaaacctggaagtggagcttgcagtgagccaagatcgcgccactgcactccagcctgggtgacagagcaagactctgtcttaaaaaaaaaaaaaagatccttgagtgatggaagaaaacaatgggagaacgcatggacagattcttcatgcgtccatgcatccaccaacagaattggcttgattggaagctagtccagagcctacagtgatcccggaayaggaagccagcatcccctctctcatccaggtggtacccatagccccatttctscagtccagaagacccccttgactggctgtccctggcccacctgcgacatgagggtatttgagcatgagcaggaagccgtagcggagagtggtgctggtggtctcagtgccagcaaagaagagcgagagcgtgttgatgatgaggttctggtggctgaattcactgtgtgggttggatttctcctgcgtccacagtagggaggggagggcagggtcaggagaggytgtagccttgctgtgcacacgcctgtctccctggctgccctccgtttgcctgaaggtctttgacattatctggcccaatttgcttttctctgtcctctacatgtccagctgcacatctctaactcatctctctcagcctctttttactctgcctggctctgtttctatctctctccacatctttttgatgtgtttctctctttttgtctcccagtctctttctacctccgtgagtcttttctcctgttgctgtatttttgtctcttgccccaaattccttcctcagccagtcttctctctccctctctctctctcccccacttcccaccaccactctctctccatctcagttcctcctattttctccttcctttcacctcatctttctttccttcctcatctgctctcctccttttcactattctcccctccctaatctttsttcttcactccccatcttccccttccctaccccttttccctccctcttctcacctctcyatcttgccctccctcccctcccttccctttttcctctcccagaccccactttttccatgtggagcaggtaggtgtcgatgaggtccctgggggcgctggggtccagggtttcacggtgcttctccacactgtggccaatgtaagcattgatttcctgtaggtttttgtaaacttgcctgtgtgccccaggaaagtatttcaagaagccagagaagagctcaaacagctgcaagaaagaaggggtggtgaggtttgcctagggctgagctagcaggtcacagggagagagcscctcctgggccccaatccctccatgggaaccccacttccccactcccctctgcctctgaacccctcactcactgactctatatctcctttgatctatctcacatttacctctttctgcatcttcctccctcatccttctgtctttttcttggcctctgccccatctccctgcctctctcctttctatctctcttagtctctgtctcacttcctttctgtgtcacccattgtctacctcggcctgtttatttgtctttctcatacttttctctccctcttccctcctctcctcatctcccttgctgtgtcagacattaataaaatgattcttacacaagataagcctgctgacatgttaggactatgtattttggaggttatttctattactttgatgaagaatggaatgcctaatttattgcaaataattgcaaaaatgcaaacgtatattgcgatgtaaaattccttcttaatctctccttctagagataaccattgttaactgtctggtgggtctccttccagacttttctctgtggttctcggtgggaggagaacattagaattattggtcgggcttgttacaagtactcaccttggaccccatcccagactttccagatcagaccgcctggaaagtagggtcctgaaaatccataactgtgacaaccccacatgtgaatccaacatacacccctgcttaagagctgtagctatgttgaccagcctggccgacatggtgaaacaccatctctactaaaaatacaaaaaaattagctgggtgtggtggcgctcgcctatagtcccagctactcgggaggctgagccatgagaattgcttgaacctgggaggtggaggtggcagggagttgagatcacactactgcactccagcctgagtaacagagcaagatactgtctgaaaacaacaacaacaaactacagctatgcatactgttctgcagcttgatattcttaaatttaatatgtaataggcatatttccaggttaatcaataaggagacattttattattttcttttaaaagagcagaagattacctttataatctgtggaaagttttttttttwaaaaaaaaaaaaaacagggagaaggagcaatgggagaaaatgaagaaatgctgttccttattgtcttgtatccttgaatttcttcaggtgaggagctttaccaaagacagagaagcaagcatacagaagaaccaggagtaggctggacatagtggctcatgcctgtaattccagcactttgggaggccaaggcgggcagatcacttgaggtcaggagttcaagaccaacctggccaacatggcraaaccctgtctctactaaaaatacaaaaaaattagctaggcgtggtggcaggtgcctgtaatcccagctactcaggaggctgaggcaggggaattgcttgaaccagggaggtggaggttgcagtgagccgagattgcaccactgcactccagcctgggcaacagagcaagattccatctcaaaaaaaaaaaaaaaaaaaatcttagccagatgtggtggcacatgcctgcagtcccagctactcgggaggctgaggcaggagaatcacttgaacccaggagatggaggttgcagtaagccaagatggcaccactccaccccagcctggctgagagagcgagactccgtctcaaaaaaaaaaaaaaaaaaaaaaagacatccaggagcagaagagcagagatcaagcccaaagcctgattcattctctctctccctctctttcacattcattctcatcaactctgtctctcaggatctcttgatctctgcccttctttgtcttgtttttgctcatctttcttctctcagtctctctctgactctgtttctgcctccccatcgtgccccattctctctctcactgtctctatccctgtctcaccgcctcccctccctccaggtctccatgtccctgactccacgtggtctctgcatttcttccagggataagctgcatttctgarcccccaagtcaggtcatccttttctcgtgtgtcctggatgttcacctcacccccaccctccctctccttctccctctcctggacctggctggatatagagctgatgagtaagaaactctggcagaacaagttcagcgtcttcaggaactcttgatcttggtagtggaagcgttttccaaagatgatggagcagatgatsttggcggtaatggaatggaagaggaaggtggggtccacgagggcycctaggaagaagcagcaggtcaaggacacagactgaagggcctggggaacatcaggctgtcacctatctctgtgtgattgtctgccatcactcagtaatggtaaacatgagaataaccataacagctaattatgtaycagcacgtcacrygtaattccactgaactctcactacaacaatgtgaggcagatgcaatttgattattagctccaaattatagatgggcagacagagaggttgagtaatttgaccaaagttgcacagctactcattcctgaggccaggatttagacccaggcaacacagctatcgagtccatgcagccggttctcactctgcacctcctctccggccccacctctgactctgggagtgaatacagctaaatcccaggggtaggggctgggcagagtaggtgtttaatcaattgyttgtataaattaaaaagccctgggtgggcacagtggctcatacctctaatcccagcactttgggagcctgaggcaaaaggatcaggaattcaagaccagcctgggcaccataaggagaacctgtctctacaaaaaagttaaaaatgtagccagacatggtggcacatgcctgtagtcccagttgaaggagtctagggggctgaagtgggaggatcacatgggcccaggagtttgaggctgcagtgagctatgatcgtgccactgcactccagcctgggtacagagtgagaccctgtccctaatttaaaacaaataaaaaaccatctttctacccccacctgttactcccccataatctcttctttctacatctagggctctccagtcatccgggcattattctgcacttgttaagtgatacctgtatacaccaggctcagcactggccccagctggagggagggtggtctgtgagcacccaagaatgtcaggttagtgcagcctctctctgggtctcacttgcctgtcttctctcattcctctgcagaccctttcttgagccttgtctgtctgtctctcctctaattttttctgcctcaatttctctttgcctttgtttctttctgtctctctgtgtgtatatttctctctctctttttttttttttttttttttttgagacacagtctcactctgtcacccaggctggagtgcagtggcatgatctcagctcatggcaacctccatttcccagggtcaatcaattctccagtctcagcctcctgagtaggtgggattacaggcacgtgccaccatgcgtggctagttttgtatgtttagtagagacagggtttcaccaggttggccaggctggtcttgaactcctgacctcaggtgttccaccagcctcaacctcccaaagtgctgggattacaggcatgagccccatgcccagtctatatatctctttgttttggtccctccatctgtctctttcctcctgcctgtgtcactctgtttcttcctgtccttctcttcagtcttcttgtccctgtttgcctatagctcctgtgtttctacctccccacgcagcctctgcatttacgtcccagagtctcttgagaaattttgataagagagatggtaaacacctggcataaatgagatggaggtactagccagagacccgtcacctacatgtcccacagacacccagttatggagaactcaaaaataacctagtgattctttgatgacccctccagctgcacccrggcagaacatcccacctggcctgcttgctcactgccagctcatcagcacttcacccagggcaaggaaaacacaggtcattatttgttaaatgtctgtagttttttcctttatctctttgctttcttttacataacttctgattttgccttcgatagacacaattgatccatgaaaatatatgtctttcagggtttgtttgtttctttgtttgtttgtctgagacaggatcttgctctgttgtccaggctggagtgcagtggcacaatcacagctcactgcagcctcaacctcctgggctcaagtgatcctgtagtcccaccatagcaagtagctgggactacgggcacacaccaccatgcctggctcatttcttttttatattgtgtagagacaggatctcattatgttgcccaggctgtttgcttcccaaagtactgggattacaggtgagagtcatcgcatccagcctctttgagtaacttttggacattatacacctggcatctctctctttccctggctctgtttctctcctgccaatccccgtccctctctattcccctgtctctctcactctctgtccctatacctctgtcagatcatgtctctggtttcgtctgtctctgtctctgcccatgtatacctctctgcctttctattcccgtgcctgcatctctcagtgtttcattgcctttctttcctattcgtctcccaggactcacccttggatttccgaagttcctctatcagacactgagcctcrtcctgaatccgctcctccacactccgctttcccatcccgaagtccctcatggtrgtcacagagaatcgccgaagcaccttccagcggtttccattggcaaagagcatgcctgcagtgcaggggaggtgtgagttggttgcagaagaagttggaagaaggctctgagtccttcttccccccatatactcccttccctgatgcacccccasctgccccctcccagtgcctctgaagccctcaycatatccctggtagactgggtccatgatgacgatttttccccggccagagaaggcctcagcgttgtccaccagggcctcccgtatggcctctactccacacagcatgaccacgggcctcggtcccaggtgtaccgtgaagacgtccccatatttctctcggaactgccaatcacatccacaccaggggtggctgttagtcagcatacacctcatttgtaaaactatcaaaatacttacataccagattggtaattagcccctcctcaacatccgcctccccaggctgccctttcccctgccaggatccagcaagtaagggttaacagttaacggtgtccaagggagagaatacagtcataggttcttagtttctgtttctgattgggccagtaaaaccccttcctcatccttcttttctgtatattactagagacaaaatctgaaaaccatggcttcaggctgctgaaagactgaaacaaaacaaaacagaacaacaacaacaaaataaggtgggttggacaagcttaggttaattggtggcccagccagggtctgctctaattggctgctgccctaaacagtagagatggttgataaaatactacgaatatcaccctcaccccatacttcttatgatctgtggttttgcttttgctttttttttttttttttttttttttttttgagacggagtctcggtctgtcgcccaggctggagtgcagtggtgcagtctcggctcactgcaagctccgcctcccgggttcacaccattctcctgcctcagccttccgagtagctgggactacaggcacctgccactatgcctgactgattttttgtattttcagtagagacagggtttcaccacgttagccaggatggtctcgatctcctgacctcgtgatccacccaccgcagcctcccaaagtgttgggattacaggcgtgagccaccgcgcctggcctggttttgctttttgcagtttcagttacctgcagctaaccacagtctgaaaatattaaatagaaaattccagaaataagcaatttgtaagttttaagttgtgcaccattctaagtaggatgatgatgtctctcatcatccactctgtcccacccaggacatgaatcatccctttgtccaccccgtctgcactgtgtataccaccctccctgtataatgtgattgtataggaaaaaaagagtatatatagggctcagcattatttggggtttcaggcatccactgggggtctcagaacatatctccggtggataaggtgggattactgtgcagccayttggggaaccgctgggcagtatttcctgaagctgaacaaatggataactgggaaaccatccacttcactctcaggtacatgcccagcacaaatgtgtatgtgtgttcaccaaaaaatgaacaaatattcacagaagctttctttataaaatactcatcaacacagatatagagaaacagtgagagttcacacaatagaatagtatacagcaacgaaaaagaacaaactacagctacatgcaataacgtggctgaaactcacaggcataatgttgagtggaagcaactagacacaagagagtccatgcatcataattttatgtgtatgaagttcaaacacagggccgggcatggtgactcacacctgtaatcccagcactttgggaggctgagacgggctgatcacgaggtcaggagtttgagtccagcctgaccaacatggtgaaaccccgtctctactaaaaatacaaaaattagtctggcgtggtggccctcacctgtagtcccagctactcgggaggctgagacaagagaattccttgagcgtggggaagtggaggttgcagtgagccgagatcacgctgctgcactccagcctgggtgacagagcaagactccatctcacaaaaaagaaaaaaaagttcaaacacagacaaaatcaacccatgatcaagatggtaggtggatagtgactagaaaaggacggggtgtggtgttttgggggactcttgctacttggcctgcatgtcaattacatgagtatgttcagtttgtgaaaattcattgagctgtgcactttttatagtgatgttcaatttcaataaaaacttgacataaaaattagaaaaaygtttaagtttacttacaaatgccctgcattgatctctgcaaagccccttcactggtctcctgccttacattcttagaccccttaacaactgtttcactgccccacaagccagggtaaccccactaaaatgtaaaataattaatatccctgtgctcaccaaggcctccaatactccaactttgctgagaataagatctgaagtctccacctgtggttgacatggtcctacatgatgtggccccatcacctctctgacttctcctcccactgattcctccatgttgttccctgagatttttcctgcttcaggattcttgcaaccaccctgcctccttctggcaccttccacctgaatctttcctggtccctgctaagaaacaaagcaaggcggagtctttccctaaccactcaatctaatgtagttctccatcactttctgaaatatcctcctgctttagtttaatcgtagctcttgtccacctaacatttccttatctgtttattttttgcttatctgtctccaccaatggaatgtccataagcacagtgttacctcgtatgtcttgtccaagatgccacatcatcaattcatagaatatttcctggtacatagaaagtgcccagtgaattgttattggattcatgaataaatgaatgagtggatcaaggtagttgccatttaatgagcacttattatatactagctgcatgcaatatcccatttaattctcacaaccaccttaggggcacacattctcattgtcatggtcttaattgacagaagagaaaactgtgactcaacgcataagaattgaatctgagacacgagcccgcatccctctggctccaaaaggaatctggaagcttattgggaaatggagaagcaacagcrccaccttcctcagccttgacacacacttgctcatgccctccctctttcccctacccccaagagatgcaatcataatagacggtcatgaatacctagaggacccttggaaggtttatgaaagagttttagggagtctgtgaagcctcacaactttatgcaaacatgtatgtgcctatttggaaaagagggggccacagctttaatcaaactctcagaggatttcataatccacaaaatgttaagcagctttagtctaggagggctttggagacagacctcctgctggagctcagcttctccttttcctagttgtgtgccactggacaagtgctttccccaggctgagcatctccatccctactgtttttttgttattgctgttgttgtgttgttgttgttttttgagacagaatttcactcttgttgaccaggatggagtgcaatggtgcaatctcggctcagggcaacttccgcttcctgtgttcaagcaattctcctgcctcagcctcctgagtggctgggattacagacatgtgccaccacaccagctagttttgtgtttttttagtacagatagggtttctccatgttagttaggctggtctcgaactcctgacctcagttgatctgcctgcctcagcctcctaaagtgctgagattacaggcatgagtcaccatgcccggccaccatccctacttctaagatgagggtagcacctcaccttgtccacaggtagttgtaaatgacacctagaaaatccccatgacaacacaggtaattcccagacacattactctagtgggaaaactaagtccattgattcacatgatagcatgatattctcgtgacacatggaaaatgatgaaaagaaaacaataggcacttgagaccttcacctatgtgatgggactctatttggtggggagggatccttagatctgcgaccccctactgggggcctggtagcactttgcaggcccyggccgactgtcagttctgctgagtcaggcttggagctttcactcactgactccttcatttgtttctatacacatatttgctaaacgcctattgtgtaccaggcactatgttcagctctgtggtgagtcctcgcaggccttccttgtctggaagtgtgagggagagatcagccacaggatcacaagtaaatgcagcattgtcaaggacataggctcagtaaggaggggcagctggtgtatgagagcctatggtggggacctgggggtcaggaagtcttctcaagggagctactgcttgcctggatggctaaggaaccccaataatgaggaacggacactgttcttgcactgacattaaccaagatgacccacccacatcctcaaacaacaacaacaacaacaaaacaaacwatttaccccaagycctccctgtgagaaaatggaaatctttgctgcaacgaagaaggggagagggtcaaacatgtctattcaaaacttatcccaatgctttgggatgttgaggcaggaggattgcttgaggccaggagttcaagaccagccaaggcaatatagtgagaccctcccccaacacgtctctacaaaaataaaaaaaaatagtggggcatggtcgttcacacctgtagtcccagctactctggaggctaaggcgggagaatctcctgagcccaggagttcaaggytgcagtgagctatsactgtgccattgcactccagcctgggtaacagactgagaccctgtctctaaaacaatttaaatgaaaaattcaatatcgttcctgacaagcctccactttctatgaactaacaagatagccacaaagatccttttgaaaactcattttaggcaaatatgaatttcattgacagttttgcttgtttcagaatttgtaaaggattgggatattcaatgaccatgccagctctcataaagaaagggggcagtgagataccaagagctagaaggagcagcaaattctgttaatagaggcatgattggtctccagatagtgtctgcagagtttagaaaaaacccttaaagagaaggttcagtgaattgtgtaggatgtctttgaccagaatttaaacctatgcacactttcctaaatgttgtcactcctcacactgcagatgattttttttttaagagacagggtcttgctctgttgcccaggctggagtgcagtgacgtgatcatagctcactgcaacctcaaactgcggggctcatgtgatcctcctgcttcagtctcccaagtagctgggactacaggcacaggccaccatgcctggctaaatttttaaaaaatttttgtggagacagggtcttgttcagttscccaggctggttttgaactcctggcttcaagcaatcctcccacctcagcctcccaaagtgttgggattacaggcataagccaccacatctttgagtgttgcccagtggggtcgtgagccacccaaacaatattttacctaatcataagactccttggctccctccatgtcattcccctgaaaaatctaagtgttccataatttgagagtctatgacccaattactttgtatcttccagstaaagtgacagtgtctaactcataaccaaaaaccacatgttttgactaagtgtctaagataaatatatatgtatgacaattatcacattcatcatttgtatgtccacatattctgtctaagcaaataattttaaaattcatagtaccattggcatatatactctgtatatatgcatatttactctatcagtaaaaagaccattgatcagaaataaaaaaactctattaatagcaaaaggataacaagcctaagattcaggagtatggtcaacatgagagggggaaggggaaggtattgtcagtattctaattctcccattggaaagtgggttgattgattagtaatgataagtagataattaatcataaaatcaggcatggtaagcagtgataacccaggtaaatactgagccagtggcagttaccggtatagggcactatgtgtactgttgatgagcactccctacccacactcctttgctgctctccctctctcctccactctcctggcactgacatgggctagtctgctctctctcattggcacagcaaaatctatttgattcgtgccaccacctcttttacctcattctttcagtggcaggcaggtacccaggatgtaacagaggatggcagagaagagtgaaattctacacctgtggctcatacccagacacctcgtcatgcccactcacccctccaaggacagtgcccccgtgcagttccaattcagagacagggtctcaatctgttacccaggctggagtgcaatggcaccatcaaattacctatgataacctatttaataaaccagtgttatgtacctgaattggagaagcataaattggtacttatggtattaaaatttgtatttaagaggctgtaattccagtgtgaagcatgcactcatggagacactggatggccgcctgatccttcctgagttcttaaaatttccattactaaaagctctgcattccacgactcatcatagaagagataaaatgatccaaattatgaaaaaatattgatgaggtgactgttctaatggtttataactaatatttgatttatcaaatccataattctagtaagacaacaaaaaccaaaaaccacaggtgatatatttctgggacttggtagatcatttgaacacttgaagatggagttaattcaactgccaccttcattgcatgttttctggttgtattaaagcttttttatgcacaaagatcaatgccataacagtagctaaaatgttattagaaaatgtatttccttacttggcattcctggagaactctccagtggtagaggtacttgcttcactagagaagtggtaaaatacttaaataaggtattgaagaaggaattaatgaaatcaactataacctaatagtagtagtaatagaaattttaaaatccttttaaagttgctgcaaagtgtgacccccaccttacattcaagttaaaagagaatattaacaacctttcttctctctgtggacaatggaccttatctcttcttcccaactccacattccttaaagtttattacaggcccagtgagttcctgcatggctgcagggtcataagactgataagtttaggttgcaacacatgtctttcttaagatgtaagaaatgttaattaactgctttgtttctcccttctgtaacttgcttcccacctcatgtagttcccaccttaagatgtttaaaagcaggcaaagccctttgttcggggctcagactctctggacatatttctggctgagccagtggtcaccttaatttaataaactctcctgaaccttttttggtctctccagtctttgattgtcccgcaacagtattacaaacaaaaggcattaggcaaagcatgctgaattgattggagtcccttggtcaaaggtattattgattgacggcaatcagatccactcctattggaaagacatagatagatcacttgtaaaatagtaataggaagtcctatgccccaataatagaatctcatgtatctcccactcttataaactctgatatgattcaataatgcaaggctttaatacattatgccaaggcatgttttcaccaggtaaaaggagtcattgatgacccatcagttgatgacaaccagacctttcactatctataatttagaggttgggctctttggaaatgacaccagagaaactgtccttgaactccattggaagtaaccataccaggttcttctaagactgtccttgtactccattgcaaaggacaatgccaagttcttctctgtagcaaaacttcagggtctgggatcttggatccacatctctcaattgaaaagggtccttctagactcctagaactttatgtctgttgagaccttaaggcaaagctgaccaggaaagtttttcccaagaagcagttggcatcttatatghggacagcttttccaagactgtggatcaagatttctcttccatcatgaaagcattatctyttatcctttcttccctgtttcttgctgtcctaaccctttccctttccttacaagaaaatccatagtacaataatctgtgaatggctttagcaaaggcttataccctaggaaaaaaracaagcaattgttgagtttgtgagccagttccccaaaatcaggaaataatttcactggcgccaatgcctctttgtgttcccaatgggaatcacccggaaaccccaaaggaggmgtggaaagctatatcttgatattctagacatcaattgccacttgcttttttgcactcactggaaatatttgatagtggttatgttattagttatttaatataataacagtatgtaataacatactattaactaataactagttattagttaatataatacaataacagtatgtaataacattctattaactaactaataatataatcactaccaaatatagaaaatgtatctgaatgatggctgcaaaaagcatattgtgcttccaggcatcccgcataggacctggggactacctatgtgggtacggttaattgcatgtgtaatgttactgaattaaatatggtaaagtggccaggcatgatggctcgtgcttgtaatcccagcactttgggagatttagatgggaggatcacttgaggccaggagttcgagaccagcctggtcaacatagcaagaccccaacgctataaaaaataattaaataaataaataagtaaatacagtaaagtctctttccaactaaatgtggctatgcacccttgcagcatgatagaaagagaccacaaaaaaagtgagcttcccaccttgttcaagagctgtgcagacttatgtgtaaacaaatttaactgatatctgctctaatgccagtaggtgaccctcttttccaaccccacaagtgcctaccttgggtctgctgaggttcgcttactctgttctttctcctcactggcccgtaacttgctatttggcctagctcactgctgctttccaaattttttccttgagagttccctaatacctcccacagttaaaagccaaaacagtcaataactgaaattactatcaacctcaaagtcgatgaagataagttggtttctgcagagaaaaggttccaatggagtccctgggtgctcacttttggtgatattggggtgacagttgtatggaatctgaggctaatttatacattaagggacatcttggattatgtagccaattgaacctccaaggagttcagatgggtagaagccactctccaaaaggaggatgagaacattgtattaaacaaaaacgcttaatggaacatcatgcagttttagatctcctctttgcccatcttggaggcttgtgtatggtgctgaacaaaaccaaatattgttcttatctttcccgtgaatttactagtacatataacttaatttaaaatgtggctgacaatgctgtttctctagacactgccaccaaatacactaaggaaaattctcaggggaaaaagaagatatgtatttacgggtgcaggtaacagttgatttgcaagcatcctgaatggtgatggcaagtgatatggtttggttctgtgtcctcacccaaatctcatcttgaattgtaatcctcagatgtggagggaagaacctgctaggaggtaattggatcctgggggcagtttcccccatgctgttcttgtgatagtgagtgagttctcacaagatctgatggttttataagaggctcttcccccttggctctctctctctctctctctcctgccaccttgtgaagaaggtacttgcttctccttcaccttccaccatgaatgtaagtttcctccttctccctcaacttctaccatgattgtaagtttcctggggcctccccagccatgtggaactgtgagtcagttacatcccttttccttataaattacccagtgtcaagtatttctttataactgtgagaatggactaatacagcaagcctatcacaaggttttctactcttaatgtttcttctagtgggtctccaaggtactatgacatgtgttaccaggtgaactacaaaaacaaatgcctctgtaaatcaagttattttatagcaagctctrgtccttaatcaccattgtgctctgaacaaagtatatgaccaattggactctaatactattgaactatctttattgcctgagctttgaattattcgattttgatcagtttggttcatggagactcccggtaaggtacagacttcattttctttgtattaccctcctgagagccatcataacagtctccctgatgtgttgtattttcttgagagtcttggccgggtgcaatggctcacacctgtgcaatggctagcactttgggaggccgaggcaggtggattgcttgagcccaggagtttgagaccagtctgggcaacatggtaaaaccctgtctctacaaaaaatacaaaaagtagctgggcgtggtggcatgcacctatagttccagctactcggggggctgaggcggaggatcacctgagccttgggaggtaaaggctgcagtgagacatgatcatgccacagcactccagcctgggtgacagagtgagaccctgtctcaaaaaaaaaaaaaaaagagagagagtcttaaatgctcatatgcagccattcttkgtacatccaatggcttcattacagtatgaataacaaaaacatgaagaaaacaaagaatcactcaactactttgacattgtccattgtgaattccatactgagagcaaacaagtccattatgatggtgacagaagtaatgttgatgcccaaggttttggtcaatctcaaaattttgaggctcatcaaaaggggagaattgtttaattaaattaaatttgacataaagttctctctgcatagagtgaactgcaacctaacttgggagggagtatattcttcttttttttatttttatttttttgagatggactcttgctctgtcgcccaggctggagtgcagtggcaccatctctgctcactgcaaccttcgcctcctggattcaagtgattctcctgcctcagcctcctgggtagctgggattacaggcacacaccaccatgcccagctaatttttgtatttttaatagagacacagtttccccatgatggcgaggctggtctcaaactcccgacctcaggtgatccaccgccttggcctcccaaagtgctgggattacaggcgtgagccactgcacccggcccagatgaatagattcttgcgacaagtagccaaatgttggctaatcagagcagctgggctttcagtccaccacaggctgctagctcctcagactgtgaccaagtaaggcaagctgtgatctgtggccagccaggctgtttctgtatgtcacctcctttttctgcctgtgaatactgcttgcccatactgccgtgtggtgtctctcctggtttagggagttgtccgattcatgagtcacttctttgctcaaataaactctgctaaatttaatttgactgatgtttttctcctaatactaccacccatcatgcttcactatgctctgtactcaccaaccatccccgtgccacccctgactctggaagtctgcctcattctgtttggtgaaggatccccaagtacagagacaagaagcagcccaccctcagaccccattcgtctgtgtcttaccctcagaaaggatttgagtaggcctcttctgtccatctgcagaaggttccccaaaaggggcagagggcggggccctggtgggagggtgccatgggagttagggtgacgctgaaccaggagtagcaagaggcctgtgaggagtgcaaggaagaggaggacgctgagctccatggttccagtctgactgccctgcacccmactgcagcctctaactgggccttttatcctgaacctgcctcttcactcagttatgaaacttcatccattccccgcctcctttctcattatcgtcaaggagcattagcttagaaaaaggtgttagggaacccagacttcctgcttaggcaacccagcgacctaatgcctatcccttatccactctctagatgttggcagggatacagtggtagagatatcaaagtccacctaagcatgtgaacgtgtgggtgtttgtgtatgagtatgtgtatttttgtaagcacaggtgagcatgcacacttttttacttagctttgtctgtttgtttatgcttccgtgcatttctccatgcttgcttgcatccgtgtatgtgcttatatgatttttatatgtaaagtggtgtttgtatttatgcaaatgtgcaggcgtgtgtttctgtggttgaatctgggggtgcttatgtgtatatccttgcacgtgtggagcttccttgtatttatacagtttcatatatgaaagtgcatttacatttgtgtgttgtggaggtggtggtagtgtgtgttcaaaattgggaggctggctgggtgcagtggctcacacctgtaatcccagcactttgggaagctaaggtgggcagatcacttgaggttaggagttcgagaccagcctggccaacatggcaaaaccccgtctctactaaaaatacaaaaattagccgggcrtggtkgtgggcacctttaattccagctactcgggaggctgaggcaagagagtcacttgaacctgggaggtggaggctgcagtgagccaggattatgccactgcacactagcctgggtgacagagcaatactctgtctcaaaaaaaaaattgagaagctgatgaaaagaaggaattgttcaattcaatcaaatctggtccactgcctttgtcgcatagcaaactgtaacctagcaatatgtgaaccaattgtgtgtatctgtgtgtgctggtgtatttgtgcttctgtgttggtgcatctcctagcccctctctttggaagcctgcagacgcttgtggggaaaagaaagagagatcagattgttactgtgtctatgtagaaaaggaagatataagaaactccattttgatctgtactaagaaaaattgtttctgctttgagatgcgttaagctgtaactttagccccaaccctgtgctcacagaaacatgtgctgtattgaatcaaggtttaatggatttaggaatgtgtgggatgtgccttgttaacmatatgtttgcagtatgcctggtaaaagtcatcaccattctccattctcgattaaccagggacagaatgcactgcggaaagccacagggacctctgcccaagaaagcctgggtattgtccaaggtttccccccactgagacagcctgagatatggcctcatgggaagggaaagacctgactgtcccccagcccaatacccataaagggtctgtgctgaggaggagtagtgaaagagggaggcctctttgcagttgrgataagaggaaggcttctgtctcctgctcatccctgggaatgsaatgtcttggtgtaaagctgaccattcccattcattctattgagataagagaaaaccacccggtggctggaagcgagatatgctggcagcaatactgctctgttactctttgctaaactaagatgtttgggtaaagagaaacataaatctagcctgtgtgcacatcygggcacagtacgtttccttgaacttattcatgatacagattcctttgctcacatgtttctgtgctgaccttctcccaacctgttgccctgctacactcccctcactaagatagtaaaaataatgatcaataaatactgagtgaactcagaggccggcgtcagtgcaggtcctccgtatgctgagcgctagtcccctgggcccactgttctttctctatactttgtctctgtgtcttatttcttttctcagtctctcgtccaacctgatgagaaatacccacaggtgtgggggggctggccgccttcaatgctcagggtctatctccagtgtcccctcctttatcagtccttctgtgacagccataggtggaagtgatgggagaaacagaaggaggggcaagaaatgcagaaccagtgagtctcagaggaagaggtggtcagttggagggagacagaaactgagactggcaggtgcagtgatcgggtccccttggtttctgatcactctaactagcgctgagggggttcttcccaactatcttcctggtgcaggaaatttctctggctctatctctctctaactttatgtctctgttttccccctggagactcttgagctccatgtgtgtggaaactgggtccagtttgattgatgtctactggactcccatatgtctctatcttcactgtgagcctgcacccacacagcctctgacagggtcagtccatatttgcacaatttggatgtgaatgtgtccgtgtctgcctgtctcatcctaggcctgacttttgaccatgaggcaacatctttcttgcaatgttaaccaaactctttgctggatccaggatcctgaccctgaagttactttgacccagsaggagaagacaaacagtcctgatttttaagaggtggaagctgtgctttcctgaccctggagaggtgccagcacagacctgtccaacccaaggacctgggtcttgctgtgctgtgtcatctgacactaagattgagtcctcattccagccccagcgtgaagcaccgatggggaggcgtgaagtgctttacacacagtgactcagtgtttaccctgagcccagaagttactttgacccaggagaagcaaacaatcctgacttttaagaggtggaagctgtactttcctgaccggggagaggaggcagcatggacttttctgacccaacgacctgkgtcttgctgtgctgtgtcatctgacactaagatcgggtcctcattccagccccagggtgaagcaccagtggggaggcgtgaagtgctttacacacagtgactcagtgtttaccctgagcccagaagttactttgacccaggaggataagataaacaatcctgatttttatgaggtggaagctgtactttcctgacactggagaggtgccagcatggacttttctgacccaaggaccagggtcctgctgtgctgtgtcatctgacgctaagattgggtgctcattccagccccagggtgaagcaccagtggggaggcatgaagtgctttacacacagtgactcagtctttacccttttagggaggtattgttgccatccccattttatagatggagagattgaagcagtgacagtttgcaagtcttacccaaggtcatatagtgggttgrggctacattgtccaatatggtagtaacttgctgcatgtggccactaattaagtacttgaaatgtggtccaaatsctatttacaatagcaaagatagggaatcaacagatgaatggttaaataaaatgtggtatatatacaccattgaatactatttagccataaaaaggaataaagtcttgtcttttatagccacatggatacaactggaggtgattatcttaagtgaaataagccaggcacagaaagtatcacatgttctcattcgtaagtgggtgctacacaatgtgtacacatggacctagagagtggaataatagatagaacctccagygcgattttgaatcagagtggtaagaaccgccattctttacttgctcccaatcttagagggaaagcatcaagtctttcacctttaagtatgatgttggctgcagatatttttgtagatgcctttagtcagggtaagaaattctgtttatttctagcttgctgataatttttaatcaggaatggatgttggatttccatcaaatgtttttcatgtctgtattattattgggagaacccaccctcaatatttcaacataggttctttctattttccataagtgttggccagctgagaaataaagagagacagtacaaagagaggaattttacatctgggccaccaggggtgacatcacatattggtaggaccatgatgctcacctgcgtctcagaccagcaagcttttattaagggtttcaaaaggggagggggtgtaagaacagagagtaggtacaaagatcacatgcttcaaagagcaaaaagcagaaccactgataagggtccaacaaagatcacaggacaaaaggcaaaagcagaaccactgataagkgtccaacaaagatcataaggcaaagggcaaaagcagaaccactgataagcgtctatgctcagcggtgcacatattgtcttgataaacatcttaaataacagaaaacagggttcaagagcagacaaccagtctgaccacaaatttaccagggttragttttcccaaccctagtaagcatgagggttctgcaggagaccaaggtttatctcggtccttatctcaactgtacaaggcagacattcccagagcagccatttatagacctccccccaggaacgcatacttttaccagggtattaatattaatattctttgctaggaaaagaatttagcaatatgtttcctacttgcacgtccatttataggccctctgcaagaagaaagaaagaagaaaaatatggctctttttgcctgaccccacaggcagtcagacgttatgtttgtcttcccttgttccataaaaatcactattattctgttctttttcaaggtgcactgatttcatattgttcaaacatacatgttttacaatcaatttgtacagttaacacaattatcacagaggtcctgaggtgacacacatccttagcttctgaagataacaggattaagatactaaagacaggcataagaaattataaaagtattatttgagaacagataaatgtccatattaagatgaaatcttcacaactttttttatgtttcaaaaataattgtaataastggagaacagttttgctccttccattaaacatatgaattttacaaattatagtgatatatttttctctctgggtaaatatgagtaatacagagaacaatgtgtaaaacaaatggttcctggaaaaataggaataaacaaaaagtactgatcagtaccggtggctacccataattaacaccactagtcaaattctcaataaccacatagaaaaagggtttaactgtatatgctgaggtaagtgtcttacagagcatacctctgtatgacacttacatacagcatgtaagtgtatagagaaagcatgtactttctctatttcytcttatatatatactttaagttctagggtacatgtgcacaacgtgcaggtttgttacatatgtatrcatgcgccatgttggtgtgctgcacccattaactcgtcatttacattaggtatatctcctaatgctatccctccccatggtgtatatgtgccatattttcttaatccagtctatcattgatggacatttgggttggttccaagtctttgctattgtgaatagtgccacaataaacataggtgtgcatgtgtctttatagcagcatgatttataatcctttgggtatatacccagtaatgggatggctgggtcaaatggtatttctcgttctagatccctgaggaatcaccacactgtcttccacaatggttgaacgagtttacagtcccaccaacagtgtaaaagtgttcctatttctccacatcctctccagcacctgttgtttcctgactttttaatgatcaccattctaactggtgtgagatggtatctcattgtggtttcaatttgtgtttctctgatggccagtgatgatgagcattttttcatgtgtctgttggctgcataaatgtcttattttcagaagtatctgttcatatcttcacccactttttttattatactttaaattttagggtacatgtgcacaacgtgcaggtttgttacatatgtatacatatgacatgttggtgtgctgcacccatcaactcatcatttaacattaggtatatctcctaatgctatccctcccccctccccccaccccacatgatgagttcatgtcctttgtagggacagggatgaagctggaaaccatcattctcagcaaactatcgcaaggacaaaaaaccaaacactgcatgttctcgctcataggcgggaattgaacaatgagaacacatggacacaggaaggggaacttcacccacttttcgactgggttgtttgtttttctcttgtaattttgtttgagttctttgtaggttctgaatattagcccttggtcagatgagtagattgcaaaaattttctcccattctgtaggttgcctattcactctgatggtagtttctcttgctgtgcagaagctctttaatttaattggagcccatttgtccattttgccttttgttgccattgcttgtggtgttttagacatgaagtccttgcccatgcctatgtcctgaatggtattgcctaggttttcttctagggtttttatggttttaggtctaacatttaagtctttaatccatcttgaattaatttttgtataagatgtaaggaagcgatccagtttcagctttctacatatggctagccagttttcccagcaccacttattaaatagggaatcctttccccattgtttgtttttgtcaggtttgtcaaagatcatacggttgtagatgtgtggtattatttctgacggctctgtcctgttctgttggtctatatctctgtgttggtaccactaccatgctgttttggttactatagccttgaagtatagtttgaagtcaggtagcatgatgcctccagctttgttcttttggcttaggattgacttggcaatgtgggctcttttttgattccatatgaaatttaaagtagttgtttccaattctgtgaagaaagtcattggtagcttgatggggatggcactgaatctataaattaccttgggcagtatggccatttgcatgatattgattactgcaatccatgagcatggaatgttcttccatttgtttgtgtcttttttatttagttgagcagtggtttgtagttctccttgaagaggtccttcacatcccttgtaagttggattcctaggtattttattctctttgaagcaattgtgaatgggagttcactcatgatttggctctctgtttgtctcttattgttgtataagaatgcttgtgatttttgcacattgattttgtatcctgagactttgctgaagttgcttatcagcttaaggagatttggggctgagacagtggggttttctaacacaatcatgtcatctgcaaacagggacaatttgacttcttttcctaattgaataccctttatttctttctcctgcctgattgccctggccagaacttccaacactatgttgaataggagtggtgagagagggcatccctgtcttgtgccagttttcaaaaggaatgcttccagtttttgcccattcggtatgatattggctgtggggttgtcataaatagctcttattattttgagatacatcccgtcaatacctaatttattgagagttttagcataaagggytgttgaattttgtcaaaggcgttttctgcatctattgagataatcatgtggtttttgtctttggttctgtttatatgctggattacatttattgatttgtgtatgttgaacccaccttgcatcccagggatgaagcccacttgatcrtggtggataagctttttgatgtgctgctggattcggtttgccagtattttattgaggatttttgcatcaatgttcatcaggcatattggcctaaaagtctctttttttgttctgtctctgccagactttggtatcaggatgatgctggcctcataaaatgagttagggaggattccctctttttctattgattggaatagtttcagaaggaatgttaccagctcctccttgtacctctgttagaattcagctgtgaatctctctggtcctggacttttttggttggtaggcaattaattattgcctcaatttcagagcctgttattggtctattcagggattcaacttcctcctggtttagtcttgggagggtgtatgtgtccaggaatttatccatttcttctagattttcaagtctatttgcatagaggagtttatagtattctctggtggtagtttgtatttctgtgggattggtggtgatatcccctttatcattttttattgygtctatttgattcttctcttttcttctttattagtcttgctagttgtctatcaattttgttgatcttttcagaaacccacctcctgtattcattgattttttgaagggttttttgtgtctctatctccttcagttctgctctgatcttagttatttcttgccttctgctagcttttgaatgtgtttgctcttgctcctctggtacttttaattgtgatgttagggtgtcagttttagatctttcctgctttctcttgtgggcatttagtgcaacaaatttccctccacacactgctttaaatgtgtcccagacacactggtatgttgtgtctttgttctcattggtttyaaagaacatctttatttctgccttcattttgttatgtacccagtagtcattcaggagcaggttgttcagtttccatgtagttgagtggttttgagtgagtttcttaatcctgagttctagtttgattgcactgtggtctgagagacagtttgttgtgatttctgttcttttacatttgctgaggagtgctttacttccaattatgtggtcaatattggaataagtgcgatgtggtgctgagaagaatgtatattctgttgatttggggtggagagttctgtagatgtcttttaggtcggctttgtgcagagctgagttcaattcctggatatccttgttaactttctgtctcattgaactgtctaatactgacagtggagtgttaaagtcttccattattattgtgtagtagtctaagtctctttgtaggtatctaaggacttgctttatgaatctgggtgctcctgtattgggtacatatatatttaggatagttagctcttcttgttgaattgatccctttacctatgtaatggcctcctttgtctcttttcatctttgttggtttaaagtctgttttatcaaagactaggattgcaacccctgcttttttttttttcattttccatttgcttggtagatctttctctatccctttattttgagccatacgtgtctatgcacgtgagatgggtctcctgaatacagcacactgatgggtcttgactctttatccaatttgccagtctgtgtcttttaattggagcatttagcccttttacatttaaggttaatattgttatgtgtgaatttgatcctgtcattatgacattagatggttactttgctcattagttgatgctgtttcttcctagcattgatggtctttacaatttagcatgtttttgcagtggctggtaccagttgttcctttccatgtttagtgcttccttcaggagctcttgtaagcaggcctggtggtgacaaaatctctcaacatttgtttgtctgtaaatggttttatttctccttcacttatgaagcttagtttggctggatatgaaattctgggttgaaaattctttgctttcagaatgttgaatattggcccccattctcttctggcttgtagagtttctgccaagagatctgctgttagtctgatcggtttccctttgtgggtaacctgacctttctctatagctgcccttagaattttttccttcatttcaaccttggtgaatctgacaattatgtgtcttggggttgctcttctcgaggagtatctttgtggcattctctgtatttcctgaatttgaatgttggcctgccttgctaggttggggaagttctcctggataatatcctgaagagtgttttccagcttgtttccattgtccgcgtcactttcaattacaccaatcagatgtagatttggtcttttcacataatcccatatttcttggaggctttgttcatttcttttyactcttttttctctaaacttctcttctcgcttcatttcattcatttgatcttaatcactgataccctttcttccacttgatcaaatcagttactgaagcttgtgyatgcatcacgtagttctcatgccatggttttcagctccatcaagtcatttaaggtcttctttacactgttcattctagttagccattcatctaatcttctttcaaggtttttagcttctttgtgatgggttcaaacatcctcctttagctcagagaagtttgttattaccgattgtctgaagcctccttctctcatctcatcaaagtcattctctgtccagctttgttctgttgctggtgaggagctgcattcctttggatgagaagaggcgctttcatttttacagtgttccgcttttctgctctggtttctccccatgtttgtggttttatctacttttggtctttcatgatggtgacgtacaaatggggttttggtgtggatatcctttctgtttgttagttttccttctaacagtcaggaccttcagctgcaggcatgttggagtttgctggaggtccactccagactctgtttgcctggatatcaccagcrgaggctgcagaacagcaaatattgcagaacggcaaattttgctgtctgatccttcttctgaaagcttcatctcagaggggcacctggctgtatgaggtgtcagtgggcccctactgggaggtgtctcccatttaggctactcaagggtcagggacccacttgaggaggcagtctatctgttctcagatctcaaactccatgctgggagaagcactactctcttcaaagctgtcagacagggacatttaagtctgcagaagtttctgctgcctttttttcagctatgccctgcccccaggtggattccatagaggcaggcaggcctccttgacctgcggtgggctccatgcagtttgagcttcctggccactttgtttacctactcaagcctcagcaatggcggatgcctctcccccagcctcgctgccaccttgcagttcgatctcagactgctgtgctacctgtgagtgaggctccatgggggtgggaccctccaagccaggcgtgggatataatctcctggggtgccgtttgctaaggccattggaaaggcacagtattagtgtgggagtgtcctgattttccaggtaccatctgtcacggcttccctttgctaggaaagggaatttcccgaccccttgcacttcccgggtgaggcgctgccctgccctgctccatgggctgcacccactgtctgacaagtgccagtgagatgaacccagtacctcagttggaaatgcagaaatcacccatcttctgcatcactcacgctgggagctgcagactggagctgttcctgtttggccatcttggaacctcctcctcaaattgggattattttgaagaaaatgccagaccttgcatcaattcacctataaatgttttcaccacgtatctctaaaattatccccatttaccactggggaaaccaaggcatgaagagatcacataacttaatcaacgtcacttttctgatagcattcagagccaggatcaaagcccagctccctggatccagggcccttgccattaactgttgagatgcctctggaaacttagatgtgagtctttttttttctttgtgtattttgtttgtttgttttcttttttgtttttgtttttggtaatgacagggtctcaatgtgttgcatgggctggtctcaaactcctgacctcaaccaatcctcttgcctcagcctcccaaagtgctgggattacaggaataagccaccacgctgaaccatgagtgagtcttaagtgtggcatcactcaggcaacaaagaaactaccatttcgtttcaaagttgtcaaattacttctcaaaccaacagttggaatataaacctcagggatgaaagtattgcatcaacgttaaatttactatagctgataaatgtaactgcagttatatcagaaaatgtccccatttttaggagatactctccaaagtattgagaggtaaaacctatgttgtatgtaatttaccctaagtggttcagaaaaagtactaaatagatattgctatggtttgaatgttttttatccatgttggaatgtaatccccaatgcaacagtattgggaggtgtggcctatgacaggtgattgggtcatgagggttccatcatcatgaatgggattaggtacccctacaaaagggcttgatggatggagttcacctctcttggtcttccaccttccayyatgtgagracgcagtgatcctccccttggaggatccaacagcacggagccatcttgaaagcagaaacctgatcctcaccaggcaccgaacctaccagctccttgatcttggactcccagtctccagaactgtgggaaataaatttgtattctttataagtagactgggtgctactgctcacgtctgtaatcccagcactttgggaggctgaggtgggcagattactcaaggtcaggtgttcaagaccagcctcrccaacatggtgaaaccctgtctctactaaaaatacaaaaattagccaggagtggtggtaggcgcctgtaatcccagctactctgaaggctgaggcaggagaatcacttgaacccaggaggcagaggttgcagtgaaccaagatcatgccatttgcactccagtctgggcaacaagagcacaactccatctcaaaaaaataaataaatatgttacctagtctgtagtattttgttatagtagcataaaacagagtaagatagatagatgattgattgatagaatagaacaagtcatattgggaatgggttaaaatgttaaggtgaatctgcataaagagtacttttttaaacattttaatctgggcctcagccaggcgcggtggctcacgcctgtaatcccaccacttttggaggctgaggaggacgttcaagaccgacctggccaacaaggtgaaaccccatctctactaaaaatgccaaaattagctgggcatggtggtgcatgcctgtaatcccagctactcgtgaggctgaggcaggagaacttcttgaactggggaggtggaggctatagtgagccaagatcatgccactatactacagcctgggttacatagcaagactccatctcaaaaaaaaaataaataaataaaaataaataaataataatctgggctgtttgcagtggctcccaccaaaatcccagcactttagggggctggraaaggaagattgcttgagcccaggagtttgagaccagccagggcaacatggcgagatataatctttacaacaaattttttaaaacattagccagatgtggcggcatgccttgagggcaagaggagtgaggttggcctaaagccccctctccctgcaggaggagaagaaccccaacacagagttctacttgaagaacctggtgctgaccacgttgaacctcttcgttgggggcactgagaccgtcagcaccaccctgcactacggcttcctgctgctcatgaagcacccagaggtggagggtaaggctggaggggaagggaagtggagggtcccagaccctcaaaactcccctgagcctggtgcaaagtccccacctgtcccagatcccaggaccctgagacgtgccttgctgtccagagacagggcaatattcagctgataggcatcagctgagtctcattagctatttaaatattgaaaatgtcykcamtgattggtcagtcactcctgtcccaagcccactgagtgcccgctgcccgctcctctggatcatcccctgaattcctccctgtgcctcccctgtgattctggcacgacctggttaacrtgatcctgcgccaacaatgctaattgctgacatctgttatgaatggtctacctccgtgtcatacacggagscaagtcatccaccccgttttacctattcaggctatcatccctgctctgagacccctagatacctaaacgcattccccttcctcccccagcaaaggtccatgagattgacagagtgatcggcaagaaccagcagcccaagtttgaggaccgggccaagacgctctacacagaggcagtgatccatgagatccaaagatttggagacttgctccccatgggtgtgtcccgcagggtcaagaaggacaccaagtttcgggatttcttcctctccaaggtgctgcatgtccccccaccagcctaggacttccaacacactctctgtgacctcagcaccccatctccatgagaagctttctagcccctgtctcactctctcaatgaaagattttttgaaccaccacatcccttccatcttccctctcagagactcctgaatcctgtatctcccccagaatttttgccacatggagaggaatgaactccatgtccacaaactccctgtcccaagggacatgagtctccttttcctttccccttgcctttttgctttaaggacataaatttcatgttccctgaacaccctgcctaagaggacatgaaccccatgtctcccaaacttcctgtctcagagacgtgaaacttctatcccccaaggctcctccctcagaggtccccaattcccatgcctgccacttcccctcacctggggcaccctagttccccctccagcccctgtgtactctcaacaatcccccaacccgcctcatcacatacaccttcctcctccctcccagggcatagaagtgttccctatgctgggctccgtgctgagagacctcaggttcttctccaacccccgggacttcaatccccagcacttcctgggtgagaaggggcagtttaagaagcgtgatgcttttgtgcccttctccatcagtaagagaccactgtttgctgccwggctactactcacaccagcaggggyctcccttacccagctcccctctctgccgtgtagcctagtatttccccagcttggaagttcctgttagaatctaccgttgagccaccagctgatactcccttaactaccaagcacccagtacctgtgcccaggcaaaaggaaaggaaacatcatacccctttcagaggcggggaaaaccaaagcccagagagaatcagagatttatttccctagggtcacacagcagattcttcagatccctaaaaaggagatgacggcacagcagtcatatttgcgagtgttatctgggggaaggggcatctaaacctcccattgtgacacctggcatcgatcaccccatcttttgtacatcttttgtacactcaaggaaactgaggctcagggaggatcagagcctcctctgaaagtctctcaggccataatattccacccctcctccctgggagagccgcagctggaggtctgtagcggggcaaggctgcactaagagtgggcttcacctccacccctcccgcctctcctcctcaggaaggcggaactgtttcagagaaggcctggccagaatggagctctttctctacctcaccaccatcatgcagaacttccgcttcaaatcgcggcagtcgcctaaggacattgttgtgtcccccaaacacgtgggctttgtcacaatcccacgaaactacaccaagtgctacttgccttgctgagggagggctgtgctggtgccggcgtggtgggcgggatcagaggaagggcggggccaggagcgggcctgcgggaggggcggggctaagaatgggggcaggacagggggaaaggaaggggcgaggtggttagggggaagagaagaaacagaaggggctcagttcaccttgacgatgtccttcagagctgggatgagaggaagggaaaccttaaactatgctacaaagagtagtaataatagcatctcatttcttgaacaagtacctccgtgtcagctctgttcaaaaaccgttgcatgctcacctcacttaatgcccacaaacctctgcaaaggggaacagcattcatgcccattttacacatgacaaagctgaggctcagaaagttgtctgtagctgaggtgtcacagaatataagtgcccagcaaatctttgaacacaaccctctgggcagattcttaaaaagcaccccttcctcaagtcaaacagcttagtatagcatcacacagcctgaacagccctgtcctggggttttctccagagacctggccggcggttgtcctggcttcactgcacacttgcccactctcacctactcaagcacactttgtgcaccagggtgtagcctgcaccccctaccaggtaaggccactgtcgtccattgagagtcagttcagggacacaatgagaccgcttaatgaagaaattgacagagagaaacattctgagagaatgctgggagaactctggatcaggacataccatatgcatgtgtgtgatcatgtacagttgtgcatgtgagcatatgactgcatactctccccatgtatgcatgaaaaacattccactatgggtttctgaaggttgggttctcttgatggatctagggtctgttgtaagacccagctaagagtttcacaattacctgccctctctcaaataagttagtgtgtgtcccccttagaagctcccttacagctttcacgaaaattaactccaagtttattgtagacctaaataaaaaatgagtataaaacttctagaagataacataggagaaaatctagatgaccttgtgtttgctggtgacttcttagacacaacaccaaaagcacaatccatgaaagaaacaattgataaattctacatcattaaaattacaaattgctctgcaaaagaattgtcaagagaacgacaatacaagctacagacggagagaacatatttacagggcacatacctgataaaggacttacattcaaaatacacaaagaactgttaaaactcaacaatagaaagcaaacaacccaatgaaaagtgggcaaaagatctgaacagacacctcaccaaagaaaatatacacatagcaaataagcatacggaaagatgctccacatcatatgtcactaaaaatttcaaattaaaacaataatgatataccactacccacctattagaatggctaaaatccaaaactgatcaccaaatgctggcaaggaggtggtccaacaggaactgtcattcattgatggtgagaatgcaaaatggcgcagctaatttggaagacagatttgcagtttcttgcaaagttaaacagattcttaccatgtgatacagccatcaggctctttggtattaacccaaatgagctttatatccacacacaaaaacttatatccacacaaaatcttacacagaaatgtttacagcagctttattcataattgcaagacttggaagcaaccaagatgtcctttaacaggtgaatgaggaaacaaactgtggtacatccatacaatattatttagcaataaaaagaaatgagctatcaatctatgaaaagactgggaggaaccttaaatgtatatggctcagtaaaagaagccagcctgaaaaggcttcatactgtgtgattccaactatataatattctggaaaaagtgagactgtgaagacagtacaaagatcagtagttgccaggagtttagggaggagggatgaataagtggagaatatgggattttttctttctttctttctttctttcttttttttttttttgagacggagtctcgctctgtcatccaggctggagtgcagttgaggatctcggctcactgcaagctccgccttgcctcccattctctcctgcctcagcctcctgagtagctgggtctacaggcgcccaccaccatgcctggctaattttttgtatttttagtagagacggggtttcactgtgttagccaggatggtcttgatctcctgaccttgtgatccgcccccctcagcctcccaaagtgctgggattacaggtgtgagctgctgtgcccagcccatttctgttgtttttttaagccactcagtttgtggtactttgttatatgtacctaggttcctaggcagccctaggaagctaataaatccatccctggataaactgataaataaaaggtgatatatccatacaatgcaatttcgttcagccacaaagaggaatgaagcagaacttcatgctacaactagcatgaacctttaaaaaagtattagtgaaagaacgcagtcagaaaagaccacataatatatgacttaatttatatgcaagtcaggaatagagaatctaggccaggcatggtggctcatgcctgtaatcccagcagtttgggaggccaaggccggacgatcatttgaggtcaggagttcaaaaccagcctggccaacatggtgaaaccccatctttactaaaaatacaaaaattagcctggcgtcgtggtgggtgcctgtaatccaagctactcaggaagctgaggcaggagaatctcttgaacctgggaggcagaggttgcagtgagcagagattgtgccattgcgctccagcctaggcaacagagcgaggctccatctcaaaaaaaaaaaaagtgaatctacaaagaaaagtagattcgtggttgctcagggcagggaattgactgtgggggaaaaggggtaagacctagaaggtatgaggtttcttgtagaggtgatgaaaatgttctaaaattgaccatggtgatggttgcagtattgattaatacacccaaacccacttaattgtacactttatgatctgtaagttatatcaataaaggctttttcaaaaagaaaagaaacaaatataaagaaaaaaacctcacagtaaagaaaatgtcctctctgacttgtaggtcttgattagttctaggaagaaaattgattcacctagtttctgagaaatgtttactctaattaaatgaattacttccaggggatagcaggagtacggattccctctaacctgcctcatacttcctggtgttacctaatccacctgggcttcctccatcacagtcctccacattctactccgtgcttccttcatcagagctatgctgggctatgctgggccgtcactgtaaaggatggagcactcttccctgctgggctgtgagccctatgtggtgagtcactgagcttttcctggtcaccattatgtcattaggtccttccgtgggccccttggaaggacccgatgtgtgttgaataactacaatgtcttagattctcagaatttctaggaacttttttttttttaacagaatctcactctgtcgccaggctggaatgcagtggtttgatctcagctcactgccacctccacctcccgagttcaagcgactctcctgcctcagccacacgagtagctgggactacaggcacgtgccaccacatccagctaattttagtatttttagtggagacgggctttcaccatgttggccagattggtctcaatctcttgacctcgtgatccgcccacctcggcttcccagagtgctgggaatacaggcgtgagccaccgcgccagcctctaggaactttctaataggctcacgtcataaatagaaatgaaggctattttgaggacctatagctcttctgtgctttacctaaagagagatcaacaattctctctcctgcttattctttttttttttttccttaagacacagtcttgctctatcaccagactggagtgcagtggcgtgatctcagctcactgcaacctctgcctcacaggttcaagcaattctgctgcctcggcctccctagtagctgggactacaggcacgtgccaccatgcccggctaatttttgtattttcttggtagagacagggtttcatcatgttagccaggctggtcacggactcctgacctcaggtgatccacccgcctcagcctcccaacgccctgggattacaggcgtgagccatcgcgcccggcctgctttatgtattctatttgcaagtaagatcattttaaaaaacgtttcacagctaaaaatgtttgatgcccattgtactgtgtacttgcgaggtgtgtttgtagctctgagatgctgcatttatagaagggggtgccaaggctttaatgatgtgggtttgtatgttggtgtctgtggtgggcatagggatgtgctacttgaatcttcattcatggagaactttccaatcagcttcaataagggcagtgagctgagagtctccagttgcagcaccattaggacccacctcagtgtggagcggaacccatgcttttccaaggaagccccaaatagtaattaaggactctgggatccagggcatgaccctatctgtccaacataaaccatccccaacagcatttttctctggattatgggtctgttatctctgcctggtggtcttggcctgtctctgtccaatcctccttccttccttcttttctttcacaagtgttggatctgcatcctgttctgaagacttttctgctaccagtgtcatctgcttccttcctttttggtctttcacatgcattaccctcctccctccaataaaatgatggacccctaactccgtctaaatctcagcttcccggaggatctaattcccataatgtatataatggcatttattgtttgtttgtttgtttgttttgagacagtctcactctgttgcccaggctggagtgcagtgacactatcactgcaacctccacctcccaagttcaagtgattctcatgcctcagcctcctgagtagctgggattacagggatgcaccaccatgcctggctaattttttttctatttttagtagagatggggtttcactgtgttggccaggctggtctcgaactcctggcctcaagtgatctgcccaccttggcctcccaaagtcctaggattacaggcgtgagccaccatgcctggccgcatttattgtttattatacacacagtctcaaaactcttttctgattttctgagtacctcctattgtgtggctcttgatcagggacaaggctttgcctcccactacaacagctgaaggaggtattcattcttcctcacctcaccttgaaccctaaggttttaacatgtggctagatgtctggaactcttaatcatgaggatgtgagacaaaaacacagacacaatcaggaaatcatctatagtggcatcagtgggtctagagtcccatggcagtacccagggggtgggtcaggtgttcagtacacaggagatgggtggtgtggcagcaggtcctaccagatagctttgaacattaccttggctgttggtcccctaccacagcctctttttcctactcatattcttaccctatttttccagaattgctgttaattttgtgagctaaacaatcaccttccagtagctaacagcctttctatttaaaataaccaaagtcactttatattgcttaaaaataggaaccctggccgggcgcagtggctcaagcctgtaatcccagcactttgggagtccgagatgagtggatcacctgaggtcaggagatagagaccagcctggccaacatggtgaaatccagtttctactaaaaatacaaaaatcagccaggcgtggttgtgcgtgcctgtaatcccagctacttcagggagctgaagcaggaaaatcacttgaacct

SEQ ID NO: 94076 - DNA, 139110 bp, Homo sapiens
  misc_feature (1)...(139110): n = A,T,C or G
gtttttattaaaatgatagacaagcatttgaagacattcatttctttttctttttttttctttttgtgagactgagtctcactctgttgctcagctgggagtgcagtggcgcatcttgtctcactgcaatctccgccttccagatgcaagtgattctcctgcctcagcctcccgatacagttagtttctgagtacaaccgaggagaatattttccaatagaaattttaagaaacacagcattttttcatgactatgcctacccccacaacacacacactctatacagaaacatacaccttattatagaaacattttctgtaagcaaaaactcctaggacggagttcctgggatactgaagggagaatgcggaaagaagaacctagtgactccctttaagagctccactgaggtcatcacctgccagaggttttaatccaaatgaaactggctttttgtcagatgcgagaaaaaactataagatctttgcattcatttaacaaatatttgttatgtgccttttggtgtgatactcagctctaggccctgggactacaaaactaaatgaaggcttcattcctgcttcaaggaggtcaccatctggtggagtgagagagataagtaaacacaagagtatagtctagcatggccggttctggaatcaaggagtctaaggggacatctgaggggtcagggcacagattgtaaggtgtaatgaaaagaggtcacaccttagcagttttcaaatgaagcttcacatttttcaaatgaagcttcacattttggatcctccattttctcttctttgaaatgrggcaaaaagaattagcctgccagagttgttataattcaatgatataaaagagactcagtgagtaatttctaagaaagaaaagcaaaattgagacagcaagagctctctcccaaaaggcagtgaaccattctgcggacctgtggatttgaatctcttttgtggagtttgcagtctttctagcgggttatttgttagaataagccaaagaggttcacctagagaatgactaagttgcgaaagaaaaatctcctctggttcagaaatgaattattcctaggatgttgcttcatgagtctttgttacagaaattggagtttgtgcaagtaattggggatcaggaaacaaccaccctggggacaattgcaggcaattctgcgaccacctggcttaacttgaattctaggaagtagagcttctcttaggttaatcaaaggtttcatggtacaccttgtggctcttttctttatccctgatttttcctcccaggcttatgaataaggcttcagttatgtttctccctccaaaattgccagcagccccamctgctgggcttggaggctggggcctgcagcctaaggacagtgtggcagtctgctgccatctgctggctcacgtgtcaccagctcagggctggctttgcaaggattccccaggaatagaaaccaccaggagaataactgtgggccagagaacgttcctgctcatattgaaaaatgaagagatgagaagatggcagacacaagctggtataagaaggcttttctcctcctgcgagtttgtgtaaagatgtgaccatctcaaacagctaagccagtgatatttctatgcagatttgttttgctcagggagaacatagcagtgctttctaaaaaatgtatcttattttatttagatcactgtctcacaaggccgaacaaataaattaatgacacatctctgtagattcatttaaaggaaacagcagaaacacaaggcagtggggtctgaggtgggtatagggaagcagaaagaggggagggattggagaaacatttcgcagtaagttatagtatattttagttggttctgtccacattttttgaagacctactgtttacaaggctctgacccaggtgcctgggatacaagaatgagtaatacttagtaatactgagtcccttctggcttggagataacaatgtattggggagcagtaaataaatagagaattaaaacagaattgcaagtactgtgataaagtactatggtaaaggaatctaggagagcacagaggaggagcatgtgtcaaaatcaaactggactgcagtgtcagagagcgcatactctgggagatggcatgaactgaattttgaagatactagctcaatggagactgtaatgggaaagacattccagttatgggaagcaccacttctcatacagcccatcacccaccatcactgcctggaagagctgagaacactagatacaatgcaagagaaggctgttaaaacattaggtctcagatgagcaattgattcagtccagggatattggcagaggcagggagaagaaggcagatccaagtgagcaggcaacataaataatcttgaagatcagagagcagggcttggcagggtctttggacccagggaaaaggccactttcaatgccgtgtatatatgggcaaccccttccaggcaggtataagtcacaatcaaatattcagaaacttgtgagtaacttcctgtcttaatctatctgaaacttctgtgtgacctcatttaaatgttgaagtagctacaagctcaaagttatcaactgcaacattattcagaattgcaaatatgaagagtgaaagtagagaaaatgcttgagaaaattgtgatacagcaactgaatgaagcagctcatggaaaatgctaattctgaaaactgtagcacataacaaatacttgtgaaaaaaatcaagatccaaacctgcaggagaaaaaatattcagaagagaaaaaaataaactgctagtaatgatgttgttcttttctctattgtctacgttttatataatattcttatatttcttttataatgatttttttaaaatataaagcagcctaaaggtgaaatatgtgtcctgatgaaggcagaggcaaaaattaccctaaacaaataatggccctatttatgtgtttgtttctgctactgtagattccattttcttcctaattgtatttcagtttgtgtggtatattcattttgcttattaagcctgtcctcagccttccctttgcccacacccctcctcactccctggatctgtgggacgtattgtgatgtctgcccgctaattttgctgtgactggggctggtgtctggttggtgattcatgtttgttccaaagttgtacatctgtgttggttgctttgaagcagtgccccagggaatatgaaaggccatttgtctccctaagactgcttctttgcatcagagacttcttccctggcttcgtttaaattccagcaagctctcctgagtttaagtagggtaagaaggaaagaaaacaaaagcaaacaggggcatcatggagagatcattggagtcagggtctaaccccagtttacctggcataagtgaacttcttggattctaatactagggacagaatgcctatgacactcattttaagggtaatgctttgtggacttaccctctgcccactaggaatgcctttagcaaaaaagaaggcagaatgagccttggtggaaaccctgaatggaaagagttctaagagctcggtgggcatacccacttggcacctgctctaagattttagcacagatacacacagcagtggtattcataatatttaatgactggcactgcatgagcactgatgaattaatggacacaggcacagtgcttccagacaccaatcctttagttactggatcaccaagaagtccagctgaccctggagggcctggggcagtggatggatgctaacagttttaaaagtatgttagtgttttaatatccagaaaggttgcacagatacataccagatgaataacaacataaatacatgaaatttctaaactcatgcccaccattaagttttgtgtaatcccctcttcactttttaagaacctacctactttgcccttaaaaatagttcagagcccatgacctactgtttctaggggtttgggtggcacacaaaaaagcccttatccacagaggggctttttattttgctcaactacgatagatctcacccaagggaagtttgcaagtcgctttattatatttttgcttgctgcaatgtatgtggctaacaacgtagctctgcctccaggcaggctggcaagcaggctgctagtatgagtgattgtccacctgcctgtctgcctgcagtctttgaaaggcagccccatcccagaccattagcctactgagaaaattcatctacagtaccttgaaagaccaaacatattggattgttatagcttttctttggccttttacccagacattatcattttctgcttcttatcagacacctggagtttgtgggttgtctaaaagcagcttctgtgaatggtctctggggaagccttataaccctgccttctgtcatttcttctcctcatgtttcaaggaaacctacagcttcagggtaatttgctgcctccccgttttcattcaagagagcagccaaggttgcttatagtctaactggctctttatgtaccaaattacttttggttgaattcagagactaaagaggaatttcactcagttatctattgggccattctggagttctgtcattaggaaagtctgaggttgtaaagaaattagttgcaagacatgagtcttccaattctgctctgcaagttactagcctatgactctgagaaaggtatttacatcttgctaagcctcatttacctcaaatgtagagtaggatcattttatatacttcacagggttgttaggagtaaatggaataatgtattgggaagcactttgtaaagtgaagaaatataagcaaaatccacccaaagtgagctggttgtaagaactagtgaaaggaaagaaccaagaatgtagacataaatcatggccgctgaattggtatacaggaaattcactgttgtggtctaatttgaaaaaaggagcatcctcagccccatatcttttgttcaccatctctctgcaaagctttagctggggagcagtgagagttctggagaaatactagggaagaggattactgtcaatttgaggctaagagagattgtgtgtgcaggaaaaaatgcatatgtaatgataaaggagaatgtgaaaagggcacagtgcccagggaaataccaggagcgtggatacagaaaacaagagacaaaatctctactgctcccgtctgtgtgttcattgatcagagcatgttcaaataattctgggcttgagggcacctttctagagtgacgaagaccgataggaaacctcatgacactcctctgtgggagccagtgaatgcatcctcccccagagacaaagctctgcagccttggagagtaatttggtgttagcagattaattaagtcattttctgtggttaaatttgcagatgaatattaaatctcaggctgggcctcccatctaataacccagtggaggttgtcaggataacactttgttcctgaaacatttagaaatacgtgtattgtatatttaatgagactgtgatatttattcatgacaggaagaagtcttccagacaggaagactttactcatgtgatagttcagggtctgacacctagagctgtgctgaatgccccctctaaagttgcttattatcaccaagttgttgtatgcctggcaccaacgccgaatttgtccaagttactcatgtcactgaaaggccatggagtttgctcctgggttcaaattctggctccattatttgctaatggtgggcatgggtaaataactgaacttcagtgcgactcagtttcctatacataacatgaaaataataatgactgcaactctaagctgtgttgaggatgaaaactttccatagtacatacagttttatgtaaaatgcttagtgtatagtacctgccacacgttggttctcagtgtatactatgtgtcctcctccatggttatcatgtgaccagagtttcccactttctctttaagctttgatgtggaaaatggcccttccccaggtcggagtccactggatccccaggccagctcttccgctgggctggtacttcacgccacctttcctgggcacagccagcgcagagagtcatttctctacagatcagacagcgactatgacttgtcaccaaaggcgatgtcgagaaactcttctcttccaagcgagcagtaagtacaagctctgtctggcttccagtttcacatttacctcatctctacccaggtcacagtggcagcaacaacaattccccattaatstatggtaaggatgaaggaagaaaatgaatatgagcaggggtgacgtgatgaccattttaaggacattaatgctctatagcatgcggaatatgtagctggggtctccaagggttttggaaaacctagacacagtgtttactttacatcttttactgataccttaaaaaaattattttgcttcatttcctgaactgttgagtcatttatggcatgagaaccttaacactttttatacatcacacttgaaatttcagctgygtgtgcagttttcatgaggctccagcaaagaggaaaaatggtgattggttatatgcatgctgtctcagtagcctttgcttggtgactttaataagatgycattcagacacatgcctgtgtcccttctctgaaactttaacacaatgcccacttgttgcctggctccttggtgagacacaacacactccaccgccctgtaaagcactgctgatatttttgttttgccgctattaattgtaaatctctaaattttatttaaagaacaagatctaggttgtgtcacccatttattaaatttccaaaaccaaataaaattggattctggaattcatgccttaaaaggtttctgggcacagatacaattgtttttatattataygtcataaaagtatcagtagctccctaaggtctccagtttggaaaattccactctgttctcttctgctattggaagggaagtcaaaaatttcaccctctggtgaaagggggaattttgaagctaccagcaaaaaaatattccttgaggcatttctgccagcacattttaatagacgcacccctgccctaaaatatctcaatcattgtgtgggcccaaattcatttttcagtcatttggcaaaatttactgattctctcctttgtgccacacattgtgtcaatctctggtgataaaagacaaacaaaacagtgtaaaaatcacagatgagttaaaagcatatctcattctcaaaaaatgtgcatgctgtcagggaggttacagctaaataagaaagataagaggaacacacacatacaaacataacagagtgaaaggaaataacatttaatgagcacttcccatggagccgagctcatgttcttatgttatctctgttaatctgtcaggtaggtgtctttaktatccccactccatagatgatgaaactgggactctgagagattgagaaacttgcccctatcccatgactgtgtatcatgctgtgtcccatgatgtggctaagcctgaccatattaaaaacttttggaatctttccatccatgttcttcaaattgcaaagtggcatctctaccactaggtagaaaacaaatgactgcagagtagaggtgtccaaggctgcaggagaggtaggtagccagcaactttgctgtagatcttgtagaacccaaggcatttctgacaaaagtttgaatgggggtctttgaatgcaaagatattgggaattctttccttcaccaagataaacacctttctaggcttcatcatggaagaccgtaggtcatgtggtgagctcaaagtaattagagcttaattcacatagtattttacaggtgcaagattagctttgaaatcttgtcattccccaaaaactaattccctggctaagagctctccagactcaagccaaacggcaggaagaatctcaaggtcattcagagtcgccccagaaaactctactgcacttccagattaaatcttgtgtttcattatttggaatcaaaaggttgtagaaatgttaaatttgaagagaccttaaagatcacaatccaactgaatctacggcagtcaaaaaagaggtgtagttctaaatgacaccgcatccagcatccctgttactggtagtttactgtcctttcaattttactggccagtaaaattccccaccacccgccccaccccctgcccccagtaactttagaacctaaattttccaactttaaatttaggcaagtaaaaattatatatgtaaattatttaatatcattctcactttttaaagataaggacttagataaaaagtagtatgggcacaatttcataataaaaagcagcctttcccaagaaaacaaggttggcaacataataccaccctatcaaaaatactgataacaggatatattaaaatctttgtgtgaatgaaaatagcacaagattttgttttccaaatatttcagtaccacagaaaaaaacttttatatatttgtcagttttggaattatatttcacaacacgctgagaagtagagtttgaataatattaagcttcttctagtaatttagttttaagttggcaaatccagtttcacataaatatctgaatctgaactaaagtaatgctcttaaagctatttcatatgattattaactctttaagatgaatcgaaacagaggaacagcagctccccacacttcccgcccctttttttgccttctacccatagatccaggaagcaagaagggtgctaatagaccaagagtctagatgtgaaggccactgggtgggggctgccggatgttccctgctcacagacctcatacccagcacagagctgtcatgaattttttatgaatggtggaaaactttgcataattctactgcattaaatcctagtaataaaggaaacactagcttttaaatttttctcatctgaattttttcagaagagtaacagaaaattatagtcaggggagagtgagtgaaaagatattaagagtaaaaatgtgaacaagaaaaattaaaagtrgctttaactttgagcaacaaaggagaggatcagaataaggctttatagtgaagtaaagcaagatcaccattgggtcccaaaaggcaatttcagatgctttcctagatgtggcaatagtttgctggtttctgttcagttcctgtgttgtagtcatcccaaacgtaatgccttcgtatactgaggtacagattgcctcatgggaacataaagtactggaaactagtaaggccagttttactgctgaaaactgtggcaggaaccaccatggacagaatggagttttgattatccacctgcaaagccacaggaaaggaaactccatgttttttttcatttggtcatcccattttgcaaagccttacacagacaagaagcttttgaaagccaccatttacgtgtggactaagtagtctctagagagagcctactcattttcaagggaaatgagacctaagaaccaagaggaaaagcagaaataataatccacttaaatttaaaacctgtttattgatggactagcaaaaagtgcagtgtggtttctaagacttgagttagacttacaccatcacacttactagcaccatggcttttaagacattgaatctcttttattgtctctaaattatctgtaagtaaaagcacacatttattgagtattttctgtatgctatctgttaaaatactttacatatgttaattcatttaatctccatatccccaatgtggtaggtactataactttcttgttttaatgatgaggatattagggcacagagaagttaagtgacttctccaataaatgggaacaagacgaacccaagaagtctaggaggtaaactatatggatatccagtatgtaaacagactctaagtgaggctgaaaaatacaaaataatgctattaatttctgttctgcctacctttccagctgttaggaggatcatattcattctctcttttaataagtatgtaaatttaggaactttgtgaacaaataagacagtttctgtgtcttcaagggtacggaaacattagaagtcaataggcaattttagcagtttcagataagggcaggcatagagagctatgcactggtttgaaaggtctggccaggcaggaaagcagcctactctgaggaggttacagctcagctagaggagtcaggcaggcagaggaagtgcaggagaggccaggtgctaactaatcctccagttagtgtgggagcattttggagaaccacagctcagtgtggttgatccagaggatatgagaggatgaggaagtggtgaaaaacaagactggaaaagtgagcaggaacctcatcatgaagggcctatgttaaggaattggcctttatgttgcaagtggagagttactaagcagataaacatataatgcaacattttaaaaaaatagctctgattgcagtataraaaatggtttaaagggtagggaagcttaaaggctagtactcaaacctacagagccaaacaggaggctgccatgatattcatgtaaaagaggatggggatttatattacagatgatctagtgagcagttagtacatatttgcaagtcaggatcagcaggagttagtgtttaattgaaggataaggaagagggaggtttcaggcttggtcgagaagataggtggttgcactatttcctgggatcaggagcattctcttactacatgaaataatgtacatgaaagtgctttgtaaactgtaaatataacataaatatgagtcctcttgattgcaatggacagacatgaattaagattaaagaagctctcatcagctggaaatacagacatgcaaccctttaattatggatgcccttcaacttacaatgtcccaaaaagcccatcctaagttgaaaatgcatttaacacacctaacctaccaaacattacagcttaacctaacctaccttaaatgtgctcagaacacttacattagtgtacagttgggcaaatcatccaaagcaaagcctattttataataaagtgttcgatatctcatgtaattgaatactgtactgaaagtgaaaaacaggaaggttgtatgggtactcaaagtatagtttctgctgaatgcatatggcttttgcgccattgtgaactcaaaaattgtaaattgggcagggcgtggtggcctgtaatcccagcactttgggaggctaaggtgggtggatcgcttgagtttgagaccagcctggacaacgtggcgaagccctgtctctacaaaaaatacaaaaacttagctaggagtagtggtgcgtgcttgtggtcccagctcctcaggaggctgagatagcaggatcacttgagccagagaggtggaggttgcaataagctaagattgtgccactgcactccagtctaggtaatagagtgagactctgtctccaaaaaataaataaataaataaaataagtaaaataatcgttaagttgaggaccatccatataaaaataaagatacctactggtattgataataactataactcaataactaatctgcttttatgtgctaagcactgttatcaagagttgtacatatgtaataattaatttaattttcacagaaccctgtttgacaggtaaaaatgttgagacatggagaggttacctaatgtcgcatagctagtaataatgcagctgagaaacaaaccaattcactttggctccaaaatctgtgctgttaaccactatagtatatatctctccatatgacagacaaaaattaaggaaattacaagttaatttctgtgtgtagtgagaaaacagagaaaggtggaatgaattaataaaattcagagtgtggcagtgaaaggcagtatttctgctttctagaaaatcattttattgtttagagcagacctacatacactcaattctatgactcagtactaagactggagtgctcatttcgttattctacaaatttgtaatgtgctggctttgtcactagatgttgctcttgcaatgcaatgattctgaatatctggacttgctcctgagaggcattgccttctccaggggtttgggaaagtaagaagtgtatcagttttcataatcaatcaaatgttttataatttctatgccatttgattcttaactagtgatttatcaaattatgatttttaaaaatttataatagttccataaataatctggttgcactctaagagaagttttttgttttgttttgtttcttttctgttactttctataaattatctgatagattctctaatagcaattttctaacatacagcattagctttggcagctcaaattgtttaagggaaccaatgctgggcatctgtaaaatccattttttgcttctgaatgttctgttctcctaaacttcaaaagttccataatgataaagtcatgttgacattatgccctattaatgtttctttatctccctttaatctttggattgtacagttttaataactcctccaactcattcaacagtacatcagctcaaggtaccacctatgcatgagatttacttatattaattagcttttattagatactagactctggaaatccgggagtcatagaagatgcacttaaatctaaatccgttatcttgtcccaaattcatcctgttgtcttatgaacaatgtgaacttcacatcagaaatcagaacacttcacttgactagcctaaaaaaaaagaaagaaagaagaaaagcaagaaagcaagaaagaaggaaagaaaagaatcagaacaaaccacaagatcttcacccatctcaaagttcatcttgggaaaaaaggttggaaagggtcagtttctgatacagttcaccacactccatttatcacaactgctcctgtcttgattattttttcttttttgtatctctccaagaaccctgaggctcttcctttggctccctatttatatgtacccccacctcatggggccacttcctgccatggccttaactatccctacttttgtaggaaacccctaaatctatagctcgaattcccatatctcagtcttcctgctcgatgtctccacccggatacaaatcagtacctttaagttcaacgtgtaccttaaaaactcagtgactaccttaaactcccccaacaggaggggaaactcctcatttccttatttctactcacggcttcactgttttctcagatatccattttttaaattgaaaattatatttctttatgaccccttatccaattaaatgtcaagttctgcaaaacctctgggctctcttcaagttgtctcattctgtccctttcttgacattacctattggttctcatcagaatgggtgcaatttctaactattctttccaggtctgtccccactccaatctatccctccacatccaaggcattttactttctaaaacacttttctgttggcccatctcactttccatctcactaaaaaccttccctggctcctttctctctcctctctctttttcttttcttttctcttttcttttcttttctttcattctttttttcttttctttttttctctttctttctttctctttctttctttttgagacaaagtgtcactcttattgcccaggctggagtgcaatagtgcgatcatggctcactgcaacctctgcctcctgggttcaagcaattctcctgcctcagcctcccaagtagctaggattacaggcatgtaccaccacacccagctaattttgtatttttttttagtagagacagggttcctccatgttgatcagactggtctcaaactcccaacctcaggtgatccgcctgcctcggcctcccaaagtgctgggattacaggcataagccaccacgcccagcctgggtgatttctttctatggagttaagtactgactctataatctttgtctggactgtccataatatgagcgtgggaggccttctatccttattctctacaaatgtctatagctaatatgctctgctccacccaaatagccatcaaacatcttaataagcgtgttcagtattttcccatttcagtacctttgttcctgccatttctcttcattggcagcatctaccatccctgactttttaaatccttcaaagttcctctgaaacactgctcactcaatcaagactttcctactttctctaacctgtaattgtcatgtttcctttggacttcatgaagtatacccattgtttttaattctcattctgtattaaaatgtctattacagtttttaaaatattttttgtttcccctactttgtttcagttttggagttcatggatattttgtatgatttgatatgtcaactatgcagcaagtcataaaataggaagcataggctgggtgtagtggtttacacctgtaactccagcacttgggaggccaaagtgggccgattgcttgagcccagggcttgagagcagcctgggcaacatggcaaaactctgcctctacagaaaaatacaaaaataaataaataaaatagctgcgtgtggtgttgtgtgcctgtagtcccagctactccagagtctgaggtgggaggattgcttgagcctggaggcagaagttgcggtgagctgagatcactccactacactccagcctgggtgacaaagctagaccctgtctcaaaacaaaacaaaataatgacaacaacagcaaaaatgaagcatagtgtttaaaagcacagatttttgaaaccaaacagtctaaattcttacacttggaatcagtctcagttcttctacttactaggtatgtgctagttaactgctctgtggatcgatgtcatttatataatagcaatattaagagtacctgacacacagccctgttacaataattaaatgagataatacatgtaaactgcttaccacaagacctggcagacaacagtagtgacacaaataatgcttactccttgtcagtattctttttattgtcactgtacagagtgggcacagaagacacttgccagattaaattgaagtttggaggtttctagctgaagaaaaaggtggaaataaaagtatcatattaaataagatgtcaagttaaaagcctatgacagaggagaggcccaaatggatgcatgtgttgttcractctggagccccaggcctcgtgtggtgcctggtacagggcacatgattaataattattggttgcactaatgtagttaacaaagaaggtgccatatttgtgtgacaatgatgaggacagggaaggtaggccagacactgagggaagttcactgttactaatttctgtgctgctatgatgattcacactgtaatagcaaagtggcctgattttgtgactgtagctcaaaccaacatgtcttctagtaccttcaatagagagtttgctgaatgtgggtttaagtagatttctcaaagtatgtgccagagagacagtgtgcacttctgaaaacacatttttgactcttcctaaatacagatttacataacactaggtacagcttaatctgttctttgggacaaaatggagtgacaatggtatgattatggcaggttcagccatacactcctattaaaagcttttccttaggtactttaagaaaaagttatattacaaacaaaaagtaatgggattcccagacagaaatctgtgtttaaatggcattaaagctgtggttcgaatcaacaaaagccaggaaatccaaagttaacctttatccagactgttataccagtttttccaactgtgtgtgtccctgtgagcagccctccctttgaatttcctggctctggcaaccaaaatccacaagtcgctttgaattacagtactctggatctgttatttaatgggaatatatcctgaggatatatgcttacttgcaaatgcttttatgtgtagtcactgtaaattcaggagtcatgaatctagtactaattttttcctttcaagctcttggaataccctttcgtgccaaattgtgagtcctgtcttatatccaggtagaagaacttgtataacatttgtgttgttaacactgataaaatttaatattatagcttatatgtcacagttataattcaagtaaatttctaaaggttctttttttctcttttcaccagacacggcgatgacttgattgtaactccttttgcccaggtatgtattatgctggccctggcttgctttcactgtcgctggtttctaagtctgaacctggccatttgtcttcttttgtccttaacygtttaaaacatttttcttctaggtccttgccagcttgcgaagtgtgagaaacaacttcactatactgacaaaccttcatggtacatctaacaagtaaggattgacttttttgtggagtttgaatccctaacataaaggcaaaaaatattgagcagcatttaaaaaaatacaactattacatggaaaaytgtcctctaagctaagttaatatacacaataaaatttgaaaacaggatggagcaccatagtattttagaactcatacaacactawaagtaacctagtctgggtcttattcgtctttgtacccataagactcagtaccaagtagaaattcacaaatgaaagaacaaaaggaagatttaattttcgttgacttttacatttactactttgaccagtaactgccataaattctattaaaattctttttgaataagttattaatgaattcagatattcaaacttaaaattaaatgtagcaaaaagttcaagttcaatttgcctaatttttgattgtctataaacaagttcatgcagtttaatgaataagagtgggattatcttctcctccaccttcaattaattatatgatcttggcatttaaattaatgttgctgatccttgatctccgtatctataaaatgaagggtttgaactttatattccttgcagtaacactttctccaaaatcatttcgaatctatgagcttaagctaagttctattcggttcactcttctgcatgttttaaaacagtatcacaaaggtcagagagtcatagaacccgtgatcctggaatgagaggactggaggaggcctttgagaccattgattctcttgtttagtagaaacctaagctctcaagaatccagtgacttgctaacaaccccctccccccgcataagttagagacacagcagggccaaaacctrtatctaatttttcagccagtgttcactacagagtatcctatatctccagtctttgtgaagttatttttcagtcctttactttgctttcacacacattttcatagaatagtttcattaaaagtgggagtaaaccctgctttgaatgtttgctttttctttcactgttttatgactaggctttcttgtgagatgactctgtatactctgatcaaacttccatgtgagtgatctttctcacatgttgtatgactgtgtcaccctccagcttgaggcatttcagtggtccagtgttatcattaagataaagtttaaatgctggtgcttggcactcaagacaaattaatttgattgatagttrcttgggtttatatgtagtgcaatgtatatgaaatctagaggcttgtctcagcctcttttgggtagaactccatttatttatttatttatktatttacttatctatttatccatccaactagtatttatttagtacataccatccattcatacatggatatatgcatttaacaaataactactgggcacccccatcagtaccaggcactggtaatataatagtgaccagagcagacaagtcctctcctcttttagggcttacattctaatacaaaatgctgtaggatgcagtgtaaacaatcagaccaggtctctagccacatggaattatgttcaataatcatggtctgttgttctctgcatactctcttctctatcctaattatggacttactgttctttcttcctaaaatgtctgtttccacttgccagtgtctgcttggccaaatcctgattgtctatgtcccatctctagtatcaccttcactgagatgctttccctgacctcaccaaacctggctgrgtggccctcatttggatccagagtactctgaaaaccttatcactatctttatggatctctgcccaccactagactgtgtgccctttaggagtaagaattgggtttagtttttcttgaattcccaagaatagcagaatgcctgacatacagtttgtgcttcataaaaattcatcacatatatgaacttctgaataaataattgttggaggaaagaccaccaattatttagaaaattatatttgcaggattgattccttctctatgtttttttctttgtagaatatggcctctggcttcatagcccatttctacccccttgaaaatgatgcacttgggcaagctaattactctctctatatctcagttttctaatgtgtaaaatagggttgttatgaggattaaatgaattgatatttgcaaagcacttaaaacagcatcttgcacaaagtaggtgctcaataaatgtgagctattataatggatcgttacatttctcttgctgaatccagaagtggtgtaacactttggggttttcatatctgttgtcagcttagatcaccataaatgatattcatggtattgaacaaataaaggtattgttacccccactctatggataaggaaacaaaacttagggagaataaatgacttgggcaagaacgtacagcttccagtgggcaacagagttttccttgaaacctgtaatcctgactgtcactgcagtgctcttttcatttgccaaacctgttaagtcttctgggttataggaagaagtccctggaaggctttggaacagaaagacatttaggaagaacttatggaatagatgaaggtcagaaagcctgaagacagagacastagctaaaacaatattttcaggaattaaacatgagggtatagctctaaaccagaatgatggagatggcaatggggaggaagggattaatatggacacattttaaaggcttcttaagcatggctggactgagaaccactacattgcacagcactagggagaaggcggggtgggtggtggtgttctcattcttatttgttagcatgggtttgaaggttttttacctctgttagtagtatcagaacattcagcccaaccctgctgattaataagctgtgccaactgaaacaactttctcaataatcaggcctttccaaacccttgagggttttggtccttgtgaacttttaggaaccaagtaccccaagaccataattgccatagcacagctgaagcacagcccttcccacactctggctgaggactacccttcaaatcacggccccttgtgtcacccttggtccaaagcaagccatgcttatcacamaaagcaggcctccagtggtaagatagttgtatctaatgatctttctcaaattcatacccatgtgtacagagttgatcctgttactgattgcaagtactaccttgtcaccaacaaaaattcaagagagggcacatttaccactagagcttcaccaaagggagttgagagtggtgcagtctagctcagactcagtcctgaataatrgatttcagacatcagggagctgaaatcaatgaaatcaattagccatctctggagcagtctggcaggggcaggctggaaaactgagtgtccatttaatgcactccattttatttctagatagtgaataccttcaaacaactaaagaaaagccaagagaaggaactgaagacaataatgtttggcaggaatggatacaacatacagaaagcatacccccacccgaacacacacacagacacacacacaaacactcacacatatacacagagttatcttaacagctgaaactgtagaattcatggaactcagatattcctttctgatatacttgacttcagatccagggtgccactccctgccttgaatgtagcatttaagcaataattgtgtcctaggagtggttttcatgagacatctggttagtgtggtttattgtaggaaaaggaactcccacatagaactatacttctcataagtcaagatttcttttatcttttggctctttgctgtgcataaaagcagtccattgtctgcttgtgctttaccactcaaagggtggaaatctcaaagttcctgttgaggtggtttccttgcaccttcatgaaatatcccattgagggatgcttgattggacctgtatttcttggctgcaaattaaaacctacacttcctttgtcccaggagttaattttgaaaatatggctttcatttagagttgttaattcagataagcgttcttaaagcacttgctgactttaaacagactgctggagtaatcaggtgcgcaagtgagtgtgcccaccattcagcagtctgatagccaggggatggagctgggagcaaataggtgtcatttatcaatcgactctgtcatcaacatcatgaatrtcacctgtggctatcaggaaataatgtaacttctttgtattaacattcttccaaagcatratttaatsaacatgtatgtaatcttcaggaaagaactaataaccacttaatttttttagtgcatatctatccaaaatgtcttttattgctgtatgtactttggcatgtgaattaaattaactgaggatcataaaaygtttagcgttcagagctggaatgaacctagccaaatttcctcagatgaagtgaagcaacataggtaaaactcctcacacaggactcagtacgttgtaaatcaccagtaaatgttagttgctgcctgctcttctcaagtgaggaagaaactaggaggttccgtgaattgcccaagggctatacagtgggaaggtgccagagccaggattaggattcctgtcttcttagtcacagtccagttctgtctccactgtgctattcagggytggaaagtatgaactgctatggccatattatcttccctatttatatcaccatcttcagcaatcagccacgtaacttcttatgattcttccataagttacggactttggaaactgagcaaccaataccactttcctctggcattccttacaattttctgtctggcattctcatgccctacaagcaatcatgtggcttgcagaagtcatttattcattgaaaatgtattgagcctcttctttgcaccaggtctcatgaataattgacaaaccaaataaacatggtccctgcctttccaaagcttccacacagagatgcttatctgawttgacaactctaaataaagccatattttcaaaattaacttctgagacaaaagaatttgtatagtatgagtaatttccaagaagtcattgagagaattaggcactgtgatttgacacgctataaagaaagtagagatttctgacatttggggtctcctagttcagtttcttctttcacaaaagtcttctttggaactcaggaaaaggtgtaagataaaattattaaaatgcattattaatccagtgcgtatgtgttgagtacctccatcatagcaaatattatgccagatccctgtgttacagtggtgcacaatgttcaatcattgcttaaatttctcatagatgagttgaagagaaagacaggaaaatgggaaatacaatatagaatgagcaatgcagtggttcagtaagcacaggaaactacagaacacaggtgagggccactcacagagggaaggctcctctgaggaggtgatgcctgagcagagtcctaggacatatgaaagagctagccacataaagagaagaaaagtatccaactgagcaaaatgtgtgcaaaggcacagcaacaaaagagagtgctgtgttcgaggaacagcaagtggcatatagaaccaagactgtatgtgaaaaggaaaccagataaaatattcatatagagtatttggttctcaaatcactttcacatcagtgggttattcaatctacattctattaacattttggagttcctactatttgccaggcaatatggcgggacctgaagagtatgtaagcaaagagatcagaactggatcctgccatcaacaggtcacagattaccagtggagataatatgtgccaatatggactgtaacatgaagaaatgaccctaaaggtacaaataaagcaccatgagagattaaagagaccattcttggctaagaggatggcatcctttggagaaggtttgatgggtaacttaaccttaagttaaccttaacttaacctttgatgggtagattgtttggtgtggagacagcttccttgacaggggaatgaatggcctgaataatggcaggaaaggggcagcacatattcaaggaaaaagaagtgttcaagtttggccttggcaagtgtgagtcagctctgtccctcattcattcactcttctattcaataagtatttactgaatgcttgtcatatgaaggaccatcctgggtgccagggatcaagcggtaaacaagttgttccctgctcacataatgtttacatttaatcaaaggaactatgtattgaacactaactagacmgagcctatttaagctataattttaaagtgctacaaaagagaagtacaggatgcatgagagcacagagccagtcagtggtctgagatgaaatgtcaggcaatgaggaattatgagagataagctgggaaaaggatgttggggctagagagcaaagactttgaatgccaggctaaggattttggaatttaatctcttaattttcctgaaaaacagccctcagtattagtgcaggtgttatcagcatatagtatagtggaaagagcatgcactttgggttcagaaagacttagctttgaattctggctgtgccaattataaatcatgtgtcagtatgtttcttaaactctctgagcttcagttttcttatccttaaaatggggtgataatactcccagtggaagctaagaaatacctagcacagcctagcagagaaaagcaatcactatatgataatttcccttctcttgtcacatgtgaaaatttcataccactgagagtttaaaagtaccctgcctaagatcacccagctagtaaattaatggtagatgtggaccctgtctatagactacggctactaggtatgggtacctacaagctagattgtccctaaaggaccagagattaattcagagcagtagaaaaacctagggaattaattctgtggccacaccagtaggaagactcttctttagcaacaacgatgcaggctgttctttgtcatttagaatttggcttcgttctcacgcttgcctgtgcaagagaatgcaaaaagaagtgaaaactacagattcccaggcctcatctcggatatactgaaatagactcttcagggttggaaaaagaaatttaatagctccccagatgagtcggctgcgtatccatgtttgagaaccactggactagagtctcactctcttgctcattgcaaatgtsctgttactccttagtggagcagagaatccttaatgccagtgtttctgaaaatgtggtcctcagaccagcagcatcagcaccacttgggaactttttataagggcaaacttttaagcccatcccaggcctactgaatcagcaactctgggggtagggcccagcagtgtgtctgaataagacttccaggtgattctgatgcaccctaaaatttgagagccccgctcaatagtattcctgagaagttttccagcagtgcatcaggaaacaggagagtctggtagaagttctgcaaaacatgagaagaagggtaagagcagtgaaattgaaaggttaggggcagagaaaggaaaagaaacaagaaaaaaggaggagccccagtactatgggaacatgggtttgcttgtttcatttaacccctgacatcagcaggcttgttatgatgtagaatgacgtcccagttcctccatgwaaattctgttccctaagtaaagcaagctggatgactgttcccagtggttgtgtgaccttggcaagtgacttcacctctctaggtctctgtctcctgaggtacaaaaattaggggcctgaagtgattgatcgccaagggttcctctggctataactttttacagcactgcccaaaggaattgagattcastctggcatdtcgagtgatgcctgagcaagtgactctttttctcagggcttcttggaacagcaaaacttaaaacagggggctggtttgggacctggagtaaacaacttccttcctggagagtctgagcatcctgaggacttgcagagggaaattccaggccatctggatgtgagagaattgcagtcatctacccgggttacaggagcttgccttccggagatggcattatgtcactacatagttcattatgacctggaaaagtcctcagtaaccatgagggtggggtgtcgggggtggaatgggcagttttgatacacagactcagtccttcttttctctgtctccacaggaggtccccagctgctagtcagcctcctgtctccagagtcaacccacaaggtaggccatgtcataaggtctatctagatgtttcaagatagaataataaacatgcctcttattcagaactgttttttagaacaatagtgttgtttgcatattgtggctctcaaaastatgtctcttggtgacttttttctaaggtacactggagcattacttcactctattaaaaccacattaaaagcwgtactaaataatttgcccattgtatgtgcaggctttcagaatrtgataaacatggggtaatgctgcctcttccccaaagaggagcaggagacagagttgtattgacagtgcagcttgacctcagcttgctggccccaataaactccaggagagctaacatcgaagacctaaggtgctccacgttcgcctgagggcccctgcggatatgttagtggtttccctcttaatgtcaactatagattccacttgaatctacatcctttccaggtgtgaaaccaaaggctctttccaggtcacgaatcatttcttttggagggcatccaactttgttcctcaacggtgttttgttttgttttgttttttgttttttaagaacctaacctctcatctttcaggacagtgcatccacttttcttggtgtgttgaragctgcagagaggaagggccaccttgaaggaacaccatggagttctgttggaactgaaattcttcttcacacaaaatgcaaccagttctatgatatttgttaaagtccaaataatgttttctcctaaatctgttccctactattgtagcagtagatttgagaaaaaccacaggagaaacaattaagatgaactcacactgagatcacctaatgcctgacacctaacgatgcctcacatgcttttctatttccagcagcgcttcatacttaaaatctttctctcttggttgttgtgttttctttctggtatcctgatcataagtataacggaagtattacaaaagcttagcttctaaaagaagggaacaaaagcagcagattctattggctcattggcttctgaagtatttgtggtgcatgctttttaaaatatttttataaaagaaagattgagaacgagaaaaaaaagtgaaagaaagatactaagtaaaggtgagtttactctagagcctcgtaatatgaaatataaagaagtaaacagtactctatggacttcaaaaacctggtgtgctgcatgtactatttcttttagaacttttataaaaagaaacaaaataggatgttttaacatataactcgtgttacatacttggagatcgaaggaggtagttttgaaactccaatcatttcatcatattggcctaccagtgaggcaatgttgctcacatttctgttagccaaatttacatcaatttgattatttagactatgttttctttttcttgtaataaatactgacaaacattaggagaatatgtacaatttatggttctataaattagctcattaaccaaagatgtggttggaaagatccttttgtgattattggcacagcaactacagcttgacaactagggattcttttgataaagtcttctcaaacaatggagcaaagaaatgacagtaccactcaggcaatttgtttccttctgtctctgtggcaaactacaaaaatcttggcttttcactgggaagagaatgtagtgataccaattactacgtaattacgggtttcaaaatctccttaacgtttagccacggttagaaaaggaaggaggagacacacatcccttgttttgttcttattatcagcttaaataagtcaggcagatttttcctgttattttaatatttatcagcatatgacaaagaggtgtgtttaaatagaaactttaaaggggaatgaaaaataactggctcagagcaaacagaattgagaactggagtgctgcttcaaaatatgatttttcatgatagtaagatcaggtttttatttctcagtactgaagttgaattcatgtatttcaattgaaatctaagataaaaggtacaagaaatctacatcaatttaaacagatttagcaacaacctagtttgctcagaaagcctgacttagataactgtattcttgtattggagcaattcagagagagagagagaaataccaaatcttaaaatgctttattattttgaacatataaatgagaaaaaatgcaatttattttaaaagctaattgtcagaaaccatggtaaattggtacatttacttttacaaattgattattaactgaaatattaaatggatacatcaaaggaaagctctccatttgaaatacccctcttcggccaggcatggtggctcatgcctgtaatcccaacactttgggaggccaaagcggacggatcacgaggtcaggagttcaagaccagcctgaccaatatggtgaaaccccatctctactaaaactacaaaaattagctgggtgtggtggcacgtgcctgttgtcccagctactcgggaggctgaggcaggagaatctcttgaacctgggaggcggaggttgcagtgagccgagatcgcaccactgaactcaagcccaggtgacagagcaagactccatctcaaaaaaaaaaaaaaaaaaaaaaaagaaagaaaaagaaaataaagaaagaaataccagaaatacccttcttctcactatccagccaaggttcttatcagctctcatggctcaatgcaaatgtccttactttgcaaagacatcttatttttttttaagttggcataattgctccttttttgtgctatggcaacaatttaattctctgatatactttaattcaaggcttcttgtgtgtctctcccattggagataaagctcttgaagacagggactgtgccttatctatctttttattactcatggtgctttcgcatagttattttcacatagtaagaacacagtaagtgttgaattgaccgggaaaactacataaaatttggggactttatgtgaagtaaaatacatataaaataaacttttaataatgagccaatatttttatctctattgctatgaaaattattcaaattgtgttttttcactgttaacaattagttattgcactgaagttaatagaggtttgaagcacactctataactgcttatatatgttagtgtgttcgtataggttttgaacaaaaagagtgaaatctaagaagttggcatttagcactttgaataagaaagccagagtagagcaatggagaatttcaagcccagaaagaacaacgaggaagccatatgctcccaggttgaggagaaagacgcagtaaatcctcctaggggtgtcgaaaatgccaatgttgtagtttaatgagcatctgaatttgtttcacattttgcctttcacaagcataaattccaggctctccctacatggtgctcaaggattgaaacagaaaggaaaaaatagaaaaagaaagaaaactccaaaataaggcaggaactcgaattctgtcacctgtacatattcacaacagaaaattgaagtaattctcaggatttcaggtcccaaaactatttgcaacaggaaaatggggtgcatgcatacacatgtgtgtgtgataattgtcgccttttttccattccatcctatcctttgctcttcaatagtaatcacacatatgtcatgacagtaagaatttactgaaaagataaattatcaagtgttcgctgtctttacaaaatgatttttttgctttatagaaggattggagaagcatccttttaatggctagcacatccgagtcatgtaaatgtgacttgatgtaaaataatatgtatcatgtatacaatattttagcagccaayttgatacataaggtggggtgctctctactaaatttctttttctaaaatttatcagtaaatttactgagcaggaacattaccactggtaacagatcagatgttatgaaaaacaccacagaagtctatgggtcactggaaatgacagcaaaccatagcaccaagatgactagggaatcactttgaggacttcaagccagattgctgcagatactaatgatatcaaagcctggatatccatagccttgatttatggtgattttcaacaccagtcaattagaatgcatttcaagaaaagactgtgttcagagaaatcgtatgagacatttcttttaatatgtgtctaggccattctggggaggaattggctttttaccaactgataaaacagaagaagaggctttctccttggaaacctatttctccmtacaggttctgcccatagctttacttgattatgactatccytccggaggttcatgtgggtgtaccagatgcagggtctcttcaagtagtggacaagagggtcagtgagttatcttcgattttaaggaattcagaaagtcatgacattgattccgttctcattctttgccagaactttcaggacctgtgatgagacagggtctatatgtgcatgggtaaagggctctctgagaaccacagcaatagcctgagagcagtgctgcatcagatgactggaaatgaggcccagcacaagcagaacctttgcttggtttctacattaagcaagaactgtcaggcaggattacaacacttacggacaaataggaataaaatcaatcttgtgaccaaaggctctgaccagtcatgataaaggaaagattagagggaattataagaaaaaagaaaaaggaaagaaaagagataaaaaagaatggaaaaagaaaaagtcagaaatatcaaactatgttttcttccttattctgaattctgtgtgctgaattaatggaataattgccttaattactcgccttcagcgtttagacagcctgcatataaaatgatagcaaaaatgcaccagaaaagccccagttattttgagaataattttccaaatggttgttttgtaataattgcttttgtctaaaatagccctcttatgaaagtttaccccagagcatcaacactgagctgtttatattgatttgcagttatttcatacatatctaaaattaagtattggtactcgcaaaaacattaatacctcagctaaagtgcaaacgttaaaatgtttcccttaagcagatattgtcaaatataacaccctgcttattatggttatttcactagttcaaaattaatttgcaaatttagcataaatatttcttctctttgaatgaaaccgaggaggcctcatctaagttctcactagctgcctgaacagttgagtccgttccgtgttgactccacttcacatttttgtactgctgagaaacamcatccacccaccctccccttgaaagttggaatcatgcatgttagtaagtatttcagttatgctattgacgtcaatggagtcattaaatagattgctggccctcccagaggcaaatcgctgccagggacctagatacagacacgttttttacaaagacaaccatcaggttttgctatagcagtaagccagagaaagggaaaagtttatactgtagcagacctatctccaaacacagtttctttctttcttttgcattttagttccggcctttctttctctttggttacagtaggctcaagcagatacccagatactgttgcctgaatgttttgtgtgcaaaagcatctcctgtaattgagaccatgaagggaggtaccccacttttaaaaatgagtctcacattttgctctacacagcctatcttgatgttgacttggttgcataaattatttaggcaaatcactattgtctgccagtaaggtcgtgtttgatatatagttccctgaataaacagtctcctccaaacacacacacacttttgtactttctgccatccctgcgtggcatgtcgctgcatcccctcatctatgaatcaacctttttgcagctagcactgtgctgtagcatcagggatctgcagcaaagggtggaggaggaagctgggaagaaagcttcacttctctcagctgcctcatctgcagcgctcccacaggaggctgtccacgtgcctgtgtcctcccaaaccctagctgctgcctgcctcgagcctggtcatgcagctcccaggcatggcaggcagagccctttaggaaacatgtgcctctttctgggcattcttgacagctctatttacctgcacagccccaggagtcagagccagagattcgcctcacacatctggactcttccacctccaggatcgaagttagggagacatcttgagcagacagatttcttcaaatctggttgtcagaaactatcccattggttttagaacccatttctctcttcagtcctgtaccttcactccctggagacccccaacccccattacttatcagtaagtttgtatataaatgccagacatctgactacctctggtaaccccttttggttcatctggagacccaaattcattcacctacacaactgtccctttttctgtctttctgactttgagtagcatcttcatcatccacccttttatctccctcttcacctaccacagccaactcctttagtctttttctctaatctttttccttttctcccccacttcctctgcctttgtttattgttccatcatcctgtacctaaagcattgtggtggtcctccaacttgttattattgtcctcattctttccccactctaaaccagcttccattctggtactagaattctttttttttttttttttttttttttggagggacggagtctcactctgtcatcaggctggagtgcaatggcgcacaatcttggctcactgcaacctcagcctcccgggttcaagcgattttcctgcctcagcctcccatgtaactgggactacaggaccccrccaccgtgcccagctaattttttgtatttttagtagagacagggtttcaccatgttggccaagatggtctcaatctcttgaccttgtgatccgcccacctcagcctcccaaagtagaactattcttataaaccccagttatggttacattattttcttctttagctatactttgccttcaagataagacctaaatgtctcaccaggcatgcaaaagcctttagaattttgctctctttctttgtcctcatctcccactttacgctgccacccccctgcacaactgatggctgaagtgcactgaatatacatccctgaaatacaccaggatcttcttgctttcctgctttcatatatgctgtttcttctacctggttgccttttctccaaaatatcatttacatattcagctcagggattatttttcacattgtcactgtgaacaaattctatatatcatctgattcttggattcaggattaaaataaatatatagtctcaattcagggcctgggccctgatatatactatgtgcataggaaatactacttcctttacccatttccttctggaaagtgcattttaacccttcatcttcttgatataccttctgcaactcacccaaaattactgttaattattatctcaaaatctctgttattacacttgtcatactgtattgtaattatttcattttttcccattctaaactaaaagcatcccaagttcaaatactaatcctctttttctatatcctcaatttataacataaagcccgggacatagcaaatgctcaataaatgtttatggactgaacaaatagggatgaaataatgcccatgcctgaaccagataagattagaaaggaagtgaggctcatgttcagctttgttaaggcttactgaaatatctgctagctctcaggacatgtgcatagtgctgacatcccttgctaatcttgacaacgtgtgactttcaaggcacttgaagtgaactctttgttatccatcacttcaggaagaagtggcagtgttaaaagaaatggaagaaaaacaactaaatgaatttttatcatactatattgttctcttagtgcctggcattgtgcttgccacaaagtaggcactcaagtagcatattgaatggaattggtttgagaacccagttaatccttcagagaagttacttctctgagactcacttttcttgtctgaaaaatgggcattttttttttttttgagatagagtttcactcttgttgcccaggctagagagcaatggtacaatctcagctcactgcaacctctgcctgccaggttcaagtgagtctcctgcctcagcctcccaagtagctgggattacaggtatgcgtcacaacacccagctaatttttttttttttatatatttttagtagagaaggagtttcaccatgttggtcaggctggtctcgaactcctgatctcaggtgatccaccctcctcggcctcccaaagtgctgggattacaggcatgagccactgcgcccagctgaaaatgggcattttaatattctatatgttaagattgttgtaagggctaaatgagaaaagctttatatagtgattaagagtgaagactctggagtcagactgcctctttcaaattccagccacaccactttgtgaccttgggacaaattgcttaacctctctgtgtcctaattgcctcgtctccaaaattaggatggaaattgtgtgttttggttgtaaggattaaatatgttaacatgtataaagcatgtagaaagtcccagtgttagtattggtgttattagtgttatataacatgactcagatagtacycagcacatagcaaaccaccaatgtgtggtagctaagatcccagccttctggtatcagtagagaaccacaacagaaagccctgttgagctctttctagaaggttctggtctactttgcttccataataataccatctgaagggagtaatttttgaagtttaagactttttttttcctcctgagactatagaaatcttgttatatagaaatagttttagagctgaaggtagagttctccagctcatacatgggaaagctgaraagtcaggagggagaatggagctgacaccaaatataaagggacacccctaaatacagcttttyctcttaaaagcagagtgcaaaaaaagattgtcaaattacttaggacttctggtaaaccaaatcttagttaactgaaagccctgtcttgcataagcctgacaggatgccactttatatgatagcatcattacagcttgtacagcacatcaaagttgtattgaaatacatgtttcagggttggtacacacctattcaggcataggtgttacaacccaggaagcttagcagggagtagcgctaggagctggtgcaaagcctccctttgcagagaggacaaaacccactagcagagtctgcaggaagggaagaggattggcccttttgggaaaaactttacaccctctccaattactgctgagaaggaaaaagcaacctcatacccatcttaacccattctcctctctttattggaagggagggagataaaaaaggaggttggagttagcctagagaagaatgaatatggaagtttgctaagagacaaggaaggaagaggaccaccgaagttcctttttctgcctcctgcttccccaagtgggtatgatcctgggggcagggtgaattctgcttgcttgcttctgatcaaccccgagccagcacattatgaagttgcctccagaactgttctcggaagccaggagcatttcagggaacagcctttcacccaagaggagggaaacaaagcagggactgtcccctcaaaatagagaacaggcaacagaactcactggatctttttcttggtttattgtcttgacttcctcccagtcagagctgttgacaagcaccaaaagcgaccccttggagttttctgtatttttcctaccccctgtctggctgtgtccacagagtaagctgggaccatggcgattatccagcttatttgaatcttacaggcagccaggtcagataatgctattttctctctgccccctcagttgtatttggggcttcaaatttctagggtctagtctggctagcactgctggtctaataaactagataatgtccaaagcccacatgtgtgcctctgatttcaggaaaggtaaggggctagtgcttattccatttctggtatgtgccaggcacagtgctagcccctttgaatatatcacgtcacctaattctccaaactaaacttctttgcgtatattattgcccctatttcacatatttggaaaaagaagattcaggaagtatgtggggctcactcaagaccacaaagttagtgatagaatcagaactgaaagctagatctgtatttcttgaaaacccatgctctttcctctgcagtctaaaccacactgtctctgcctccatcccactgtaaacctcagatgttatagcttatcaagaaggggatggggaaaatgtcatagcaagaaagcgaagtgactggactaccaacaaccttaataattattacatactagaggactttctttaatttctttctcatctatccattttattgtaagtagtaagcaaaggtgtaagtcttgagagaaatacatctcacacgtccattattcattcattaatgtatttaataaacgtgttaaattcatactgtatacaaggcactgtgttagccactgaggatgctgtgatgaagagaatgtattcagaccctgatctcatagatcttacggcccaggaaataatgcataaataaattcatgactatacacttgataattgtaatgaaggaaagtacagaatgctatgatattggctcactttttcacctgtaaaaatgggaataatactagtacttaccattagggttgcggcaatatctaaatgcgttattttacgtaaagcatttagaacacgcctggcacccagtagtatttagtgtttaactattatgatcattagttttatcactatttatcattatcatcattatcattagtctagtgttattattgttatcattctggggcctaaagtagattagaagataggaaagaactctataaataaatgactttaaactggagtcctgaacactgagtagctggggtagatcgaggggcggtggtcctgagagagtaaccaacacctcagagatgccacagccagagaactgggcactttgaacaacagtaagggacgcagccacagagactgagagatgccagrttaagcagaacatttgtaagtcatggtagacatgtagattttactgcaaattcagttgggagccattaaaagattttgagaaacagattgacgtgatctgatatgcattctatttattttattttattttattatttatttatttattttttgtttttgagacagagtcttgctctgttgtccaggctggagtgcagtggcacgatctcagctcaccacaacctccaccttgtgggttcaaccgattctcctgcctcagcctcccaagtagttgggactacaggtgtgcgccaccacrccaggctaatttttgtatttttagtagagatggggtttcactatgttrgccaggctggtctycaactcctaacctcgtgatctgcgtgcctcggcctcccaaagtgctgggattacaggcatgagccaccacgcccggccttatatgcattttaaatacacaacttctctttgagccccaagtctgggttagtgacatctcatacatgctcccagtacctgtattttctctgtaataatactcagctyctgccccttccatgtacctcctggttaagaagacaggctctgcagcaagactgcctgcacttagttctagttcaatacctttctttctctgtatgattgtagagaagtaattcaacatccctgggtcttgattttcttacatgtttaatggggataataatagaaccttctgcatagaattgttttaagagcaaaattaaaacacttagaacagtggctggcacacataaagcactaaataaatattagttgtttttaatatattgtaactgcctattttcttgactgtttatacactagactgtatgcttagttcctggcacaaggcaggtgttcaaaaatatttactgaaaaaagaatgaacaaggaaagagaggtagtgcaataaattgtaactaaaagaagagaaagattgctgtcctattcatgggaaaataggctttcttgaaactggggtatattctgataaggaggagcctgcttatggggccagagaaactgaatgactttgcagctgcccagctgctacagctttggggaacttgaaataacatccgtggaacaaaaatttgtttcagaatctgtgatgccaatctggactgccatctgcacaaaaagaaaactgggctcatgaaagagctttttcattctcttgggctatgtgactatctctctggaaagcaaatgcaaggctaaacctccggagttctccatttgctgcctttggaaggacagtctcaccaaaagagccagtcatcctactaagaacataacactatgacttccttttcatccctgcattgctaatagggcctcaaaggaacaagggctcagttctgtgaagtaaacacacacctttagtgtagtgaataaacactggaagaagcttttcacatatttgtaagctcggaagtcttttaggcattgagtagcagcagctcctttattgcttcatgcagctgcacggggtacctgcccggacaaacaatgaatccttcagctctctgaatgttccagttctgtgccgtgtgtgtgtgtgtatgtgtgtttgtgtgtgtgtgtggtgtgtgcatgcatacgtgcatgtgtgctggtttgttacttgtatatcccaggggaaaataagggttctttgcatgctttttgtcaacacaatgggtctctgttctcactgacctggttttcctttattccttccctctcatcacaagtttaggcagtctggctttcctcatccacagagcaaggccttcccctgatttacccctctctgcatgctcttcacacttccaaaccattttccatataggccccttaaatctaatttaaatacttccctctggaaagcctcaaatgatgagtcctgcctaattgctccctcctgtacatgtcctatgttgctttctaaaagcatcatagctctttatgtcatgggcataagttcttccttcattatttgtcaggtgtgtgtgcactccttaagctaaaattttatattatggcatctcactgagccaagaggaaggaggagtacttgtgtgaataagacctagactctgattgtgagtttaaaccrtttggaaataagaaataagatacattacttgaggccaggagttcaagaccagcctggccaacatagtgaaatcccgactctactaaaaatacaaaaaattagccagatgtggtggcacactcctgtaatcccagctgctcaggaggctgaggcaagagaatcgcttgaactcgggaagtggagattgcagtgagccaggattgcaccactgcactccagagcgagactctgtctcaaaaaaaaaaagtaagatacatcaagatagggactgtgtcagtcatggtcctctacagaaacagaatcagcagtaggacaatattcactttaagaatttggctcatgaaattatagtggttgacaagcttgaaatctatagagcagaaagtaaattcaggcagtaattaatgctgcagtcttcaggcacaatatgttcttttccaggaagccacagtttctgctcacaactgactgcacaaggcccaccaacatcatcgggggtaatctcctttactttaagtctattgattgtagatgttaaccacatctacaaaatacctttcacagccaacacctagatcaatattgattaaataacagggcactatagactagccaagtcagcacatacaactaattatcaaggacccatcaaccaacaaccccaaacacctgtctttggaattagactggaattatgcctagctcttctacaaacaagatgtataaaatccaggacaataaaaatttttgtattatttctgattgagtcttcacttcaaaacaaaataaaataatcattcatcctagctcacagaattgttttgaaaaccaaatgatagttcgaaagaccagaagcgcaagctattggtactttgaacaccttgacagtgcgcaagtagtggcagcacacctgttaaatattggtggccacacaaacacatcaccattctctctactgagcagacatgagagaagagaaaatcttgggcttttgctttacacgaatgccaatcaatttgtgcctagtatctggaacacacaactgattatcttaaactcaatggagggaaatatctttaaaagaagttaatttggaccagaaatatctcaggggaggtaggagtgaggttggagcattctttatgtacatttccacagagttgagtatgaaactttattccctgtaaaaacaaattggaaatttgaatgtgaatccaatttgccaggttatccttgagacgcccttccttctcacacctggatattaaaacttatctccatttccctgtgagtcttgtattcctgtcactaaaaattcctccagcctctttgcagagcacattggcaccaggcccccttctaaagccacaatgccgaagttctgattgcacctccgtattcctatgtttccggtaagtcttttaaagacatttggctcctgcctctggtcttgaatattttaggcctattgagtttagaatctagagaaaatagcagattaaatgtagctcaggaacaagagggtgttgtccagagaaagctgagagtgactggcacagcagacgtaaacatcgtcaccagggtgtacatagctttaactcaggtacctgcacgggcatcacaggcagcatggcacagatagttcacaggcctgggtatctatgcttatggactggccttccaagtgcagtttcctgctcactcttatttatcttctgataaaraattgctcccagcaaattactaaactaaacctactgctgatacttttactccagttgtaaaaacacattactccctctgcttctgcagaagtggaacatgcttctacaattcccttttctaaatttgttgatggattacttattgccccactcctcaagtttctgtggaggggattccatctaatctttaacagggaacagtttttgggaaatattaccttttctcccttctgtgctgcgagagcagagggcaaagacaagtaacagtgagtgggaattataggagaggtttttgcctcagtgagccttttaacccactagagatctggaagaaaatggagtgggtttctctgggaggtgatttgttctgcattcccttgctagaagatcacttgcctagacatatgtaggaagtttaacatgggttttcctcattcggaagaagggtggattcaatcacttctgagatttttcttgtgttaggagcatatatgatggaactgtgttttggtaaatcagtttcagttctacactgcccctaaagtattttgcttgttttcagaggtctgtccataaagcatttgtttcaaatacaaggcatgggggaggaggtgttatcacaatatcaaacccctgctaagtatcagattttctattaggtactctgcaaaggagatctgtttttatcctcaacaaccttctattaagtcaatatcattatcccattttttttaaccaataaaactatgcctccatgaatgtaactagtagtataaagacactcactcagcttgtaacagacagacctaggatcggaaccataaagacmctcagctagtaagcagtagagttaggatgtgaacactgccttgtttggctcagaagcctgtgtacttggcatgagctctctgtgctgtccagtaagtaaaggtgcatgtgatgcccacacaggtacctgcgttgaaggtacgtacacccttgagatggtgtttacatctgtggttccaatcactctcagctgtctctgaacaataccaacttgttcttcagcaacatttaatctgtttttttttcctccagattctagaactagagagaatttagaagaaaatacatttcaagctttagttttccctcatgggaataactgagccaatagggaggtggcagtgtcttcctctcttctaggaataagtctccttccctgaaagacttttgggttttgagtaagccatcctggcagggaaaagaggcaggggagaatttttaggacgtaacagagctgtgggagacatatctccagtgcattactcactgcttaaaagacacccccagcctctgacatcacaaggagagagaattagatttcagatcagtagtgaaactgaggtgtgtcttgcttgaacacaaggaggcagccatccaactctaggctggctctggaaagtcccattttgaataatttgcttcttatgatgctttgttcagcttccctaccttaagtgaaactgtgtgacttaaatgaaagagcactgagctgaaactcaggaaacctaaatttcagtactggcaccaaccaggtgtgtaaccagaagtaaatcctttaacctttctagactcagtcatctttagtttaaattattttgagtctttgagtcttagaattcaatcttacttcagatttctataatggctcctggcccaaaaatagtggtgtgtgggtgttgacatggataattctttgtcacggaggaaacagcccctcagtaagaatctggaattcaagcctaggtctctttggtctaactccaaaacctaggcttcttccacctctcctaccctgacaagaggccatactattgtttcataacaaagtgtatctttattatttttataatccctgttagccttgtcattggcacagttcattagcaaacattcattgagtgcttatgagtgctgggaaaataaaaaggaaggggacatggtgcctgacctaagcttaaaagcattttcataaggagattctggagccacactgcctggatttagatcccagttctactatttttagactaatcatttcttaaactttctgcatacctcagttgcttcatcctcattttcttcatctttaaaattttcctcttagagttgttttaaggattaaatttgttgcttctgtaaaacatttaaaatagtgccaattatagaggaaagaccaaatacatcattgccgttattgttactattatatatatatgtgtatatatgtatatatatatgtatatatgtatgtcagtccccttgtgtcaggagtcttagaaggttgcaactgggtcttgtttgctggcacttaataaatgtttgttggatccaattattcaacacatatttacaatgtttctactatgcgcaaagccctctgatggatccttggtagaatccagaatttttacaactttttaaaaaattaccatgttttagagcttgcgtaagtataatttggaattttttttctctttcaatatttctcttctttctttttctgtggcccttgtatagaaagtattgaggaactgagaggaagatatctcacacatatgcttgctaacttaatcatatgagccatcctggaggaggtggggttaacaacacaccaaaaagaagattcttctctttcttaaatgataaatgtcttttagaactctgatgtcagacaagagagtactgcttacttttaatgggttttctgtgtcagagagagagaagggagagagagcgagagaaagagagagagagagattcattcaccactttctcattgactcattcattcaccctaaaagcacctggcgagtactcaccacaacatgaatcaggcattatgcctgggtaatgctggataatggagatacagaaatgaataaaacatggtttcttctttgggagagttaacagtcgtggggcagacaaacataacttgatttataaygcagtgtaataagaatttttcagaagcatgaataaagtgctctggaaggacacaggaaggcaggtagttgggagcaagatcctatcctaagtacaaataacactctgtactgagctgtacctaggaaatttataaattggattttattaaattttaaaaattagtatttcccatagctcggtcattcattatacgccaagtgttcagccatttcagctcaagttagcatattctttgagcacctattataaccaagtggattaggagactacatattaattctgaccatgactaggacaaggaaggtataagatatatgatttgaactctgccttaaagaatagatagtatttcataaggcaaagtgagaaatagtttttaagagggcagaccatgctcaaacaaatggaggccagccaggtgcagtggtgcatacctgtagttcgatctactcaggaggctgaggcaggaggattgcttgagcccaggagtttgaagctgtagtgcaccaagatcattgcagtgaataaccacttcactcctactgggcaacaaaacaagaccccatctcaaaaaaataaagtatgcagatgaaaaagtataggtttaattgcttagttattggaatgaaagtcaccctaggggattagtgaagaaaggatagggtgtagggatatgcaggacattagacaggaaagatggctgggcaaagwaaaaagggctttgcataccttccaagattttattttgtgtgcagcgaggagccactgatatttgttcatcagggaaatacattatcaaagcagtgcttcttgggatggttaatgtggttttggctacagtgacaggaagcagattcaggcttggaatcagaaaacataacagagattgatgaattgggattacttgtgtgatcttgagcaagttcataatcatttctgagctttagcctcctcatctatatagcaagcaagatgaaattacracaagagcaacaatcacaacaacaatgtttattgatcattactctctgaatagcatggtggtagggcatttccttgtaatgtttaagcctcaaaacaactctgtgagttcttaaaaaggtaaacgtaaatttacccatatgacccaccaattccactcttagatatctacacaacacaaattgaagacgtatagtctttcaatatatgttccacaaagtcgaacacaaatgttattagcagcattatttatttgtttttaacttttgatttttaaaaatatatttagggggtacaagtgcaggcttcttacatgaatatattgcatagtgatgaagtctgtgggcctttattgtatccatcacccaaatagtgaacattgtacccattaagaaattttcaactctcacacccccttacccttccaccttttgtagtctccaacagccattatttcactctatatgtccatgtgtccactgtttaactcccacttataagtgaaaacatgcagtatttgattttctgtttctgagttaattcactgaggctagtggcctccagttccactcatgttgctgtgaaagataccatttcattatttttatggctgagtagtattccatggtatatatatcttagctgatcctgactcaagcagcagttgcccagacggattagaggagtgacaggaaccaagaaaagagctgtacaatgctgcaggcaggaagtaacaagagcttaccaaaggcactgtcaggaagaaagaaccaaaggtgttgacaatgaagccaaactagggtaaggctcctaattgtaccatattttaacttctctaaacaatcatttaggatgcttgattctatgaacaagagaagacaaagaatagaggacttcctttccttcagcaaacagctgacacactttcccatcataaacttcgtaattcaggatgtaaaaccagatccaacaaccaaacccagctagaaggttaaataaataagtgctaaataaataaacatgatttttcttttccttggcccatgagtctccatagaagatgccatgtgcttctggtaattgaagtctactagtcaattttcctttctttgtaaaattgggggaatggcctactcagsgttataaactgaaactttgaggagttggaactttttgtatgttttgttttacattttctcgtcatgagccccatcattaatactaattatgaatcacaggtgagggagtgcacctaacatttcatcttttattttgaaatgctattaaaactcaaaaggcagaaacatagcctgtggccttggcagatgcaggactaggtgatttaatggggtttttcctgcattactttctatgactgatattttgtggtgcagatgtgactgccacattgtgaaacattattattaataaatccacattccccraaacaaacaagacagcatggcaaacagtggtgtttgctctgtatacatttgggttggtttttcatcatttcctaggaccaaggccctgctgcttcccatcacattggtgaaaaatgtgagaattcacagtttgcctattttggcaacataaacatgggaaaacttgtggtcacagggtcaggactcttcgttctggagggcctggtagcaagtggatggggtcgtgagggagcttccttagggaggacaatattgaatctagaagttcacaagacttagcccatgtaataaagagaatattctgaataccctttaatattcagtctttcagtcactgtccccaaagagccaagaaaagctaatgtatgcccccccatggtaattaatgttcaagcttgaagaaacttgaagaaatcttaaacgtagcaacactaactgccaggtttgttagctgttataagaattcagccagtcacaacacattcaaaatgccattattagacactgactatgtgtgtagcagggttctaaattacagtcccagtcctcagagggattatagtgaatgcaggtggggataatatttaaatgtgacacatttacatattaactaacaattaaagtggatggtggttttcttctcagtgaagactttcagagctgtcctgcccccacaactggcgagtggagcctccatcttcgaatccaaacaattcgatctcactctattagagataatagaaaggtcatgagttttgacatcagaaactcacaagtcttaatcacacattgcctgtgtattaggtggattgtaaactccctgagggcaaagtctgtttaaacactgcgtatctcagaacccagcacagtgcccaacatttagtaggcactccacaaatatttgatgttgaacacataaaattagctgtaatcctagcaaagttaacttctgagtccagcgttcctcttggtgaaacaggaggaatcacacctgctttaaaggagctgagaggttgactagaacggagggtgaggaggaagactccagactttccttgcctgggcccaaattctggcctggcaatcattagctctgtgattttgagcaaataacttgtctttgcctctgtttcccacaccagcaaataaggacaataatatcgcctacgttttaggctaggcatagtggctcatggatttttggaggctgaggtgggaggatttcttgaggccaggagtttgagagcagcctgggcaacataacaagaccttatacctacaaaacaaaactttataaaagtagctgagcatggtggtgtgtacttgtaagtcctagctacttgggaggctgaggcaggaggatgacttgagtccaggagttggagatggcagtgagctatgattgtgccactgcactccagcctgggtgacagagtaagaccctgtctctaaaaaaacaaaacaaaaaactgtattagcccattattgcattgccgtaaagaaataccaaaggttaggtaatttataaagaaaagaggtttcgttgactcacagttctgtatgatggcctacaggaagcataataatgtcatctgcttggcttctggggatacctgaggaaacttaacagtcatggcagaaggtgaaggggaagcaggcatgacacacagccagagcaggggcaagagagagagggcaaggtgccacacttttaaatagccagatcttatgagaaatcactcactacygcaaacacaccaccaagggaatggtgctaaaccattgatgagaaaaccaaccacatgattcagtcactttcaaccaggccccacctccaacactgaggattacattccaacctgagagttaggtgggacatccaaaccatatcacaaacctactttttcagtttgttatgaggattaaatgaatatttgtatasttcttagactagggcctggtacatagtgtgttctatgaaaatagttttaaaatgccttatatagcctgctacaaatgacgctgaataaatgttaaagaacgtgaagtttgacccccatttcctaaactagcgcctggcttactataaatacacagaatggaatataattattaattgggtgttacaggttttctgaagctcaagctagaaatatgggtttgtgggctagaaatatggggaagagcttcatcaaggacaaggaacaaaattgtaccttagtggaattaaatggcagtgataaggagttcacagagaaggcatataatctgcaaaagctggaggaaagaaggatcaggtcacagtcacaagatgctccaccatcarcaggacttggcaccagtttctgggagaataatttgtcatgatccagctttttaagtgagcttgaccaaagctctgctttagttctgtggtttcaactgcacagattaatactttgatggctgcttgtttattcatttatttattgaggaagtatttatgtagattctactatgtgccagacattttgctaggcagtggtgaataaaatagaaatggaagactgggcaacatatacctgggtctacaaaacaataaaaataaaaataaaatagccaggggcagtgacacatgcctgtgatctcagcctctcaggaggctgaggcaggaggatcccttgagcccagtagttagaggctacaatgagccatgatggtgtctctgctttccaacctgagtgacagagcaagacctgtctcaagaaagaaaaaaagaaaagaaatggacttcctctcttttggaccaggagggagagacagactataaacaggaaaataaatagattttgataagtgcttcaaaggatattaaaagggcacggtattgctcagatggaaaaatgggaaaaggtctgtccaaggaggtgatatttctatggaatctagaaagataagaaggaaaaaggagactattccaggatgggaaacataatattcaaaggtcttgagaaaggtatatttgagaaagaaggccggtgtggctggaacagagtgagctaggagtgagtggtgaaaaatggggttggtggcatatagacagggccaggtctcgcaggatcttgtaggtggtggtaagctatttggattatattaaagcaaattgggcagccactgaaaaaaatggagaagagaaaatgttatatatatatatatwtttttaaaaatgtaactcagatttcaatgtgtaataaattggattggaaagagaggatatgaggggaatgttgaagaagtctgagcaagaggtgatgcttgcctaatcaagaatggtagcaggaggaagtgagggaagtggaccgatgtgtaatatattctgtaggtgaaatagataagatgatgctgataaattagatggggagggactgaaagtagaaatagtaagggagagaaaagattcaagaatgaaatccaggcttctggcttgaaccactgagtgagtattaatgccaatgactaagttgaaaatgttaaaagagggaacattgaaaggtggattgaggaaaaactcaggagtttggttttagatgttaattttcagtgatctgatgtagccaagaagagatatcaacacagcagagaaaagattaggcagagagataagttttaagagttgcacagatctagaaggggtgaagggcagtgggacccagaaagcaggttgaggtgttggcctttgttaacagcagggacacctggtgaaagaagaagaagggaagatgtgggtgtaagtggaggtgataatcatcatcaccatagcttatatttattgatgtgtaccaggtaatgttctaagtaagtttcatttattaactcaatcctcwtagtaaccttatgagtaggtttgtacgtacactgtatcaaaactgagagagtctcatctgatggtctacattgtggaaggggagtcaagagggacatttgaggagagaagctaggacacagttgggatagaaagtattcagtggaacttccaggcaagactgagagttcctctgagattttaaattatgaatataaagtgaatctaacccaaaatgcaaatggattttccacagcattcagcaatcagacttcagtggcctgacttaattggtgcttcatgtggaagcagggataatttccaatgccaggagtaataatcaagtacactattatcccttactagtatgctagcactttatgtactttcatgaagctgccttggggacttggccacaagaaaccttccacccaccaggctacccctcaatccctgctcagaagcagaaaccatggctccatgaaagaataatatctagagtgaactacaaccactcatcagaaggatgaagaaattgatggctgactttaagcctcaattctggaagaggtccaaactrgatgctttgtcttctacctcacagctttccaggttcctctcagtgaccagggtacctcctctacctaagaaatcaccatcagctctncccactgccaagagctcataaatgaagaagggatgcaaaatctttacttgacacagaaagctttagrttgacaacaaatagcaatagctaacatwtactgagcatgtcttttatatcaggctgtgggctaagtgcttttatatgtagtatttcccttcatctttaaaacaaaccagtgagataggaatccttatgatctcatactacagataagaaaagtgagctttagggaggttaaataatttttctcagaccaagaagctaacaagcagagcagccaagagtggaatccaggcagtctgactctagatactaggctcttttaacaagtacagtataatggcaaatcagccaacatctctgctggatcaagctgttgtatatatccatttgttgtcacatgttgtcacctttctatagatgttacttagaaaacaaatggattttatttccaactatatttagaccggtttctactctcccatgttctcaaaatgagacactaattgtgggggaattatggaattaatagattttattatttccctcttttgaaagcaaacatcctgttacagagtcaagtttatggtttgttggttttttgcaagcctggtgacctatgttaagagaatttcccctgaagtcaaatgtgctgacacatgtgacagcataagctgcactccatgggctccaaggactggcaataatgacctgtttttttttcccaccatgtaattatgaattgagatttgacttttaaaacaaattcccagataattgaggtcaatatgaaaattttagtttcaatatccgagtatcttaactgtgtagattatttgtgagtatactgataataagctccttatgttgwcctacttttaggtggttgtagcctgtgaattgtttttttcataaatgagggatatatggatttgcatggagccattcacgcattctgcacataattagagccaaatggtactcattaagattgaacatgagatgttaatttccattagcgcctggggaatctgcatttttaaataaagccccagatgattcttgtataaatcgaagtttaagaaacattgaatagatgtgctctaattgtttgatttattttctcttcttttcctattaaggataagaaaaattaaatgacctttaacaggcttgactatcactacaatagtaataatagccaatagttggtgaatgtttatctttgctgaatagtgttttatatatctatttcatrtgtaacacattcttaggcagagattatcattagccccattttgaagataaaaaacaatgagatggagagagtctaagcaacccaagatctcatagctactgagtggcaaagcgagggtttagaattatacttttgcctttgaaggccaagtcattatctggagacagataacaatggatataaatcacagctttgctacttaccagcttgaaagatgagtttaataatactgactttgcatggttattgtaaaaatgacagaataatgcatataaagcaccaagtatatgcctgccaagtagtagatactcattaaatggtggctattaaatgtcagctggaaagttgaacaggtattccatgattttgatcactgtaatcagtgaacacacgtaatccaaatacctgcctacatatcgtacaytgttcttattgttttaactctccaaattatttacataattatctctacctcctccttcccactatctctttagatatgatctgtgcctaagactccctaagacactaattctacatgatttgaaaagtaacataaatacttytattgtttttctatcctaaggaagtttgaatgaatttaagatattttccaatgactttagtacgaatgtttgcaaagggccagagctccctggaagtaagttgaaaaacaaacccagctgtaatagcctggtgacccagcagcccagacctgccattataacccatttggggattgcatggtaattgggtccatggcatttggcttagtggttctgattgtgacacatgatgattcaagtttattcatggacacactaaagcatcacaaaatgaccttttttgaggtccttgaggtcaggcggggagggagggagaagcactggggcactctaaacaaagcagctttgtttttacaccgcttgcttggacaagtgtctcctcacgtgcagcagtcatttgctgtggagctcttggcagagtaactaaaatgtgacagaaatgaagggcaaattctgaaatcccctggaaaatcaccctcccaagcaaatatttgccgtggtattgtagctcgatgacttattttttgtcattcactttttttggctcattcctttcctttatggccatttaaaaggtgggtaaactgaatatttattgagcatctactatgtgcattgcatgtaccgtactgagtttatggaagatagagtctgagctgaaatcatttaccatctctagaattcatcctccgtgtctgcaaaatggggatttgggcttcatcagtgattcccaagttagtttatagtttattaaaccatattcagcaagtgattcccaagttagttacatagtttattaaagcatattcaacattgcatcttctatttaaaacacacacacaaaatcttcagaaaaatctttagaaaccaagaaaataaactttaacaaaatcttctcagccaatagacatacaaaaagcatagaatctcaacaaaagggccacctgaatctgcataaaggctaggtatgtgattttgttgttgttgttctcaaccatataaaactggttgagaactccagatcagataatctctaagatttatctcaggttcaaaaagctctgtggcyggacatggtggctcatgcctgtaatcccagcactttgggaggccaagctgggcaagtcccctgaaatcaggagttcctgaccagcctggccaacatggtgaaacctcatctctactaaaaatacaaaaattagccaggtgtggtggcaggtgcctgtaatcccagctactcaggaggctgaggcaggagaatcacttgaacccaggaggcrgtggttgcagtgagccaagattgcaccattgcactccaccctgggtgacacagcaatactccgtctcaattaaaattaaaaaaaaaaatctgtgattttatttgggcttctctcaacaaagttggtgtttttgtagctcagagaagatatatctagcattagagaaggataaatcattatggcttaagagataatcagtcatttctaatatcaacttctgattgtttattcatggacatatgtatgtgctgacccacaaaacacaattttctaattgattctactgatattggccatcaaatctaattaatttagacccaaagtgaatttttttggttttctaaagtcagtcttcactatcttcgtagcccaaattagccaaataatttaggtaagaagtatttattctaccatttctatcaggtttctctctgatgcctgtgctttgcaaacaggtcagtaaaagagataaaagaaataagcaataaatcttaagtttttttcttgtctatctgtattttatctgtatttttttgttatattagctattttttttattaattcagtatgttccagcaaaagaggagaaaaaaacacacagtaaagggaaaatcaaagaggagagacacggttaagagactgactacattaaaagagaaaggggaggaatgaaatccaaaaagaattttcagggaaaatctctcagtaaaagaaaaaaagagaaagatattgcataggrtgtgtttcatgactcatgcctggctctgtacctgagtgattcatttggtggaaaacatagctggctcagagaacctttcacaggccccagactttgttgaaatcatttgaagcttcattttgtgtgtatattttcctcacttctttaaaactgaaatattaattgcttatgagaaataggccctgatcattggagtttatgtgtatggccacytgagatttagaagtagatcagggacttcgaagtaggggaagtgtttaagaacctgggacaggtttgttcctagtggcttttctttatctcccagcaggaataaatagtaggtccaagggaatcctgttggatagagttcaaaggggacaggcccttggtaggggcagactagattagtggctttcaaacttttttgatcatgactcacaataaaacatatattttacattaagactcagccccacatgtctgtgtgttttgtgaaataatacttacctttactatatatgctttacttgatattttctattctattatattttattccattctattctttttgttttgttttgttttttgttttctgacggagtctcactctgtcatgagtgcagtagtgcaatctcggctcacttcaacatccactgcccaggttcaaacaattctcctggctcagcctctcatgtagctacaactacaggtgcataccaccatgcctggctaatttttgtattttcagtagagacagggtttcaccatgttggccaggctggtcttgaactcttgacctgaagtgatcctcccatttcaaagtgctgggattacaggagtgagccgctgtgcccggctcccattcttttcttttgttgttttaaataaatgctggcaaagacctattaaaaatatttcacagctcagtagtagatttctatgtacaactttccagtttctgtcctctctgcagcaccctctaaacacacacattgttaaaatacagcacaatatagccaattttcaggaacatctctctggcactccatccttcacactaaaatacttgcaacttctcgaacaccatactgtctttcacttccttcacgtgtcgccctctctgctcagtgcacttgagtactttcccactccaattcccctttgttcatcaggctaatgcccgctggtttagacccaattcagaggtcaacgtctcttattagggctgtttgttttctgcactctcctgagcatccggggcttatctttatctcagccttatcatgctgtgttatgatgacccatttatatgtttttctttcccactagacttattggtggcaaaaactatgtcttatttgatatccacaggacctggcctaatgcttggcacatacctgattaataaattctggatgaatgagacctacatactggtaggcacgtgatagggagtgggctgacttcttggtaaactgtagtctgtttacgataaacaagaaagcatacttttatggagaatgctcagcttcttttagttgatgtgctgaccctcattgcaattctttttctgttgccaataggagataatgtagcaaagtagctatgaagtcagactgaggagctgcacagaactggatttgacttctggctcatcagttactagctttgtgaccttaggcatgttacttaattcttttaaatctcaggttcctcatttgcaaaataggaataataaccttctgtggctgtggttaggattgtgtgagtgttattaaataatggcatatgagctccatgaggtcaggatttttgtcacttcagttcattgtcatgaacttagaagagaggctggcgcatatttgttgaatcaatgaatattttgtacataatagaccatcaataattcatagcagctctyattcatgtgaatttttcaccaactcttacacgaaattttttggagtatgtatgatgtgcataataattctgtatcccttctttagtcagaagttagggacccacctgtgaggtgacccttccagagcctcaaattcagtgacacaagatgcatgtagaaacagttgcctttcgaaagaagttgttttcaggctagaaattaagtttaatcattccaaggctgtttgattctgtggaagttctacagttctgtttttgagtcatcgcccatyggcatttgactcttcgtgtctcttttcatacatctcttagccatatcaccatttgctgaatattagactcacacagattcagattcagagtctcgggggaaaatgattgcatttctaagtgttcttggaactgtttcacttgcttcctcgacagatatcttgtgtaaggtccataaggatagaaaatccattattacctaagaccctttactgtttcccatttcatgaatagatgtttgtatttcaggttttcacttgggtctttcccatgttcagtacttttataagtaacttattgtgctacaacgaaggtattgttttaggcttttttgaatttcatcagcatgcagacatccctacgtactatatttctacaaaaaacccacaaactttaaaaagtaattcccaaactcttaaagaagccaggccaaataaaaggatggcattgctttatttctatggcatattgaaacagtaagaatgaaaagagatcctcaagagagcggttttaccttgcttttactttctcatgcatttatccaaaaagtcctttttattatattattcattatatattattcattgcagctcactcctcagataattaacccacttctatgataataatgttactccattcataaggactctgccccttaaaggtgctacctctcaacactattgattggggattaagtttccaacacatgtgctttgggggacacattcaaagcaccagagggcctggtctaatgattaggagtaatcattagaatggtgtaattcatcatggtgtaggtagtaaagttaaatgatccaatttattagtccattattcattcattagtccattatggttgcttaccttacatatgactaggttggtgaacaaggttgtcctattacttatcctattatatgtaaaagtctgcccaaagctgttttaatcatttgtatgaatgtaggtaccatttcaaagtgcactccttatcataaactcttgagatacatactaagatgatataaaagagagtggcaaatcctatagcactgtgctaatttaataacttacaaagttcatcaatagaacaatatacttttgttctcatgctgactcttgttctcaagttgaagattactccaaagtcactatagtcatattatgctgtctggggctcttcattgaaattttgaaaataggaggaggagcatatccagtggtgaaagagaaaacattttggtaagtggaaatgggagaaaaggaagyttgcctgactacctaataggccttacttagttgcttcagtgatggggacctagtagaccacagaagggccaagctgtctggaaaagagaagggttgtcatttctggaacccctactatgtgccagatacttcatgggtcttttacatctttaagttgaacctatgggggattttattgcattcgttttaaagataagttaactgctgtccatttaaaaaagtaagtacagttgctttgcaagatcacacaacttttatggggcrgggcctgggcttgagtccaagacttcaaagcttgtgttctttccactagccacctactctcagaatgctcctgttaaacccattatgtggcaagtcaggtatgtgttgcacttgacatcttttttagttttccacttgtacaaacattccctgaaaaattgtggagaggttccatacagtggaacttgagatttcatctactcagccttctaccctgaaaggttcctctgagytcatcactgtaacctgaaatgtctttcacatggatctgaaaacatttagtgaagtagaaagtactgtgctcatagtagtcattctgtggtacctttttttcctttttaaaaaaaggaaaaagtttagttgacaccaaatagttgtatatatttgtgggatacagagtgatatttttatatatgtatacactgcataatgatcaaatcagagtaattagcatattcatcaccttaaacatttatcatttctttgtgttgggaacattcaaaatcctctcttctagctttgaacgtatacaayaaattgttattaactatatttaccccatagtgcaatagaaaactacaacttattcttcctatctagcyctaattttgtattccttacccaaactctctgtcttcctcttcccactaatcttcctagcttctaataaccataattctactstctattatgagctcaatgttttttagcctccagatattagtgaaacttgcagtatttgtctttctgtacctgacttattttacttaatgtcctccaagctcatccatgttgctgcaaatgacagaatttcattccttttcatgagtgaatagcattccattattatatgccatatttcctttatccattcatttgctgatggacatttaggctaattccatatcttggctattgtcaatagtgctgcaataaacgtggggtgcagatatctctccaatacattgatttattttcccttggataaatacccagtagtgggatcactgtaatatggtaattctatttaagctttgttgcaaaacctccataccgttttccataatagctgtgctaacttactttcccatcaacagtttataagagtttgctttcctccacatccttgctggcttttgttattttttatctttctgataatggccaaaagcttttagcttttcctcactcattgtgacattagctgtgtgtttgcctgttttgtgttgaggtttgtaccttctatgcctaatgtgttgagagtttttatcattaagggaaattgaattttatcaaatgcttttttctgcctttatttgtaggactttttagtaacaaatttcattatagaatgtaaatattataaggaaaaaatatatgttataatatgaattaataatggcatgaatattaaaaccaaacaaaatgcatattggaaaaattggcactattgcacaaacacagacatctaggggaatgtctttctctctggtgttcgtgtttttacctycttcagccatgtgaaaagactttcaaaggttctattttattctcagagttgacagactcacccttcaacagagtgggcatcaaaagccaatagctgccttgagtaaattaatttttgttgattttagttcccctttaagacttcctgagatactgatcatggaaatgaatattagcgatttaattctggcacctcgtcaggactcacactgcattcctgggtgcagcctggaacatcactgctggctggactcacttctccttgcccaccaagggacctgaaaaccacattaaggtggagaggagagtgtggcacctccttgctcagagatcggccagttcactgtactttattgactgtggactgttgatttatccagccttctcatttcacatgtgagggagggygatttggagtgacttctgtgcacttacatagctgatratagaggatggacgagaatccacatctccaactaccagtccagaattctttccattccccagtcactcacttattcatacattcatctaacatttattggatgcctacagtgtgtgtatagctgtgactacaaagatgaattggacgcagaccctgaactcaagatctttaccctggcttgtgtttttgatttcccagagggtctgaggtccattaggaaggtgactatctgccagggcagtctctccatgccggctggattaggcaatcactgctggccgtatgcagtcccgttttcagtgtccaagtctattcttcatagatggcctattctctgtttttctgactttcttactggggtttctcacccaaacatagcattactgataaataatatttaagtggctgagctctgaagattaagctattaatatcacaaacaggctccatattctctctagtaaagagcgaaaaagagtcagtatgtatgtgtgtgtgtgtttacacatatgmgcatgyggtgtggctctctgagacacttagaagaaaagttcctgygtgctcatgaaaggcccrtagtacagctatgagtatattccaggcctcacatggctgcagtattcaccagattaccaatattagagaagcagatttttttctatgggtaatttttaataatttaaggkctctcatttctcattatttcagaaatccaacttggagcttctcatttgatcagcaagtattttccaagggcctcctgtattctcagccctgtaagaggtttgggccttggaggctgagtcagagatcatgatattcaaaccgttttcactttcattttgttgttgtcattttctctccatttgatcctgaggtaaaaaaggactagtaatattatctctrtgtcacagaggaggaaccagaggcacagagaggcttaaygacttgccaggaccctcaaggctataagcaggaaagcaggggcgagaccaccaggcttcttaccgctaggacaatgcttttttttttttctaactatgccagattgccagtccatattttttttaattcaggaaggattagagaaaaaatattgcaagcatataaatgtaatctcatgatagaatagtaacaattacataaaaatactaaagttcattttaaatactacctaaactaggtcatgaattcatcctatagctttttctcccagcaggcataattgagttgctttcccaaatgccaggttattctacccatgcgagttataaagacctttttcttgaagggattactgctgaacttctcctaagtcatgactttgtgatgggagagatataagtaacatgttcgttgggcttttataactctagagaaagctcttcctaaatcttggagcttactgctcagccaacttattgactttgtttaggaggtggccattagcctctcaaaccacagaggtttggactgttcaactacagtaagcccagaagcaaagagagattagaacacagcatcactgggtgaaaatggggaaagctaaactgcttcgaaattgcagtgctctgtcctatactcatttctggaggaatcaagaagagcctgaagcagaagtgacccactggccttggagacaggaggcaatggaaaagcacagttcatccacaaaccagcctctctgagcatcagcttcctagctgcgtgacattcccaagactcttccctgcactaatttccacatttataaaaaagaaccacagatgtgtccttgatggtcatcttactgtcatctgttaccaccacatacgctgtcttgttatgtggcttgggaaaatctataaactggtcttttggctttgatcacctgattgatttactgtcagcagatgatattaaaattagctttcatttgttgagcaaatctggatgggcaattgaggtggaaacagggagtggcctgggtggtggctggaattagaatagtaatctcttgtgttttagaggttacaaagcactttcccacatgtagtctcattgaattactacaaagtcctgcaagggctggtattcttaacctcatcagacaaatgagaaattgatgttccgaaagataaagtgactggtcagcattcacaaaaagatttggtggcagtacaaaaagtggaataaaagcaaaagctcttgcttgctttctggtgcaacacatcagagattgattagaatctactataaggctttttggctatgctgagatgatcgacaattaattataaaacactgtcaacatagacactggtgctcttctctttctgggctttcatacctgctcttcttgaggtttccctccccaacctctatctgtgtgtaactccttcagtttatcacttggaaaccacttcctctaagaagacccaagaccttgctagatgcccatcctatgggtttccatggcatccaaatattacccacactctgttcataccactctaattcaattgcctgtgttggaatatagctccatttaggcactaagaatacttattcacgagtcattcatgagtggttattttttcaccattgtaaccacaacaccttgaacagtagaccctggataaacatttcttgagaaaatgttgcctgatctgctgtagccaagaggaagttttgcttccacattgccctcagggctgggagggaattagaatctcttcccctaccctcctgctttattaaggtataatggacaaataaaaattatatatatttatggtgtatagcatgatgtttatatatatatgtgtgtgtgtgtatatatatatatatatacacacacacagtgaaatgattaaatcaagcttgttaatataatctstcacctcatagactttttgtttrtggtaagaacatttaagatctactctctcagcaattttcaagcatacaataccttattgttagctaaagtcaccgtgctgtgcaatagatttccatagcttattcctcctaacagaaactttgtaccctttgaccaatctttaaagccatccaagacagtaccatttccagaaggaggctcttaggaatccaaagaaaccaaactctagctatttgcataaaatgttagatcattcccagaagtaagccttagagttgagagagtactagaagtgtgacaaggatggaggttagcatttgtgtatccttatgggaaaacaggtaagagcggatatttttggagttactgggaaacttaaccatgacacttggcctgcttatgtgtctggtattattgctgggaaccaagcttcatgccaaacctctagctatcagatgtcagttttgggaagagacttgaacttgcttatgtggttatttataacagtagttttctattttgtgtcaggttagaagacaccatcacaccactgaaatatgttatcagaaccacatgcagatagaatatcgtaaatatggtagatgatgagcaagacctaggactcacaattcaggaagatacagaacccagcatttaacctagtacctacatgtacaaaatcctttcaggtatttaggagttaataagcatattaatataatcatcctacaaaatgaatttgtccaatcttgtcagtgaggtcatttctgcaaaattttaaagggcttgtagagtttgacaagagataaacattacaggcattgtgctgaattttcagcaaaagcagtcataggcaatataaaacaaaagagcacgactgggttctaataaaactttatttacaaaactaagaagtggaccaccatgtttgctacatcacggttttctgaccctggtaaaaatacacctatcaattcccatttttactctttcatttccttctggaaatctttcctatgttctccatcatccataagctaaagcctaaactccttaactctgctctgatctgaacagtccctcatatttagtggtccttttcctctctttgtgctcaagtcacatttttccatgcggataatgccattctcaatgctttctacttagtccaattctacccatcctttaaggtagatgtcttcaaatgacatagaggggtcatatcagaatcatctgggaagccttttgacaataaacacagtgctcctctcccacactaaattctcgtagacccagygaggagaatggggaaagcagggacatacagggttggaaaatgtccctcgccttattcaagaaattctcaccttcttttaaaactactgctataggacattactaaaatccacttcctccaagaagctctccctgatcacataaacccatactcagcttttctttctgtggacctcctcagtcctcaatgctcacaaaattcattttaacacctagagtattatttggctatttaagcttttcctgtgccaggcactgttataggtactggtgtacagcagtgaacatgacagtgaatgcccttctctcagaagatgacactctaatgacttgaagagacagacaagtccatgtgcccaaaagagtgaaaagataatttcagacaatggaaacaagataatgggataaggagtgactggaaagcaaagcgtaagggatggttggagggataaggaagtgctgttttagataaagaggccaggaaaagcttaagaagtctgtaattgagcttaaaatcaaaatgcaaaaacccagaggaaaagaactgcaggcagagggaatagcacagttttatctttcccttctgtgaaaatcctattgaatatagaatgttggagaagcaagactcatagagatatgaaaaatagtcttcttatttagggttgttagataaaatatgggatgcctagttaaatttgaatttcagataaacaacaggtaatttttttagtagaaagactgattgtagtataataactgaaaaaaagtattatctgaaatttaaatttaactgggtgtctggtttgtttgtttgttttgggttaaacctgacaagcctacattttattcataggaaaaaggtggaccagggtgatttgtgtctaatatcctccagctcctttaaagctgtactgagacaaaatccgaatctaagcagaagcaatttaatttggtgttgctatttcagaagatcttatattgttttctgactgtctcattggatagtaatttgtcttcctggyaactccttaataacagattccctatgactttttaaaaatcatatactaagttcaatattaagtaattaatttattcttttatccttcatctatcacaagccagtaataatagtactttcctgaataaaaggtgacaggcctccattctcaagtatagtaggagaaattagcagacataactcatttaaaatcagcttggatcatgacaaagggccgcagcagaggcacccaatagactgcgtttctgagtagggagatccagcatgggaatcaaggaagcctgatgtaggccttgatcaatggcaagaatttcaataagggattatagaagacatcatccaggaaaaatagatcaaagacaatgtgctgaaaataacagaacttgtattggtaataagtccgtctctgtggttgaaacagagaatagctaaatgataagagcatgagatgttagacctgggttttcacaaaccctgtacaccaaattaagggattttatttgttgtctttatttgatacctttgaaaacttgtggacgtctaaatatttttgagctggcacttgatgtaaaaagggtcacaaatgaagaaaagcaatctgatgcggtgtaaaaacatggagaccagtaagagagtgactgcagaagtcctagttattcaaatgaagactcaactctaatttataataagacaaaaggaaagagggcactgaatgcaatagatatttttgagatagaaactccggagcctgccaactggtgggttgtagaagttgagagaaatggaggaattgaagataaagctgagattttaaatcaacgtgactgggagaaagacggtgccmttcacaaaagtatggaaaacctagggagattggtagattgtaggtggagaagacttaatcatttttaaatattgcattatagaatgtatagctataaagagcatcatgataatgcccaatccctttgtttcatgtagaagaaaatccagtgggagtaagtaacttgcctgtgatcactcagtaagttagtgaaatagccagttctggaaatctgatgccctattttccctaaacagtgtttcattcataagatgggctgtcttatgatgagtttatagaagtagaataattgtgtggtgctgtgcagtgatcagttggaaatacagatgtggcacttttgtaaaagatcggggacaatgatttgggaggcatctaaatgaaaataacatttgaaggtgygaaaacaaatgtggtagcygaaatagaygtagtgcatttaagtcaaatgtgacagatgacaatggggactaagaagaagtctccactgaatttcacatttagaaggccattgggatgagagagaaagagagggagagagagacagagacagagacagtgcagagtgaggagctggtgcagaagtggaaacaaaatttaaaattatttttctggaagctgacagtaaaatgagaaagatagaatatcattgaagcagggcctaaagaaaagctttcaggttgttgttggataggagaaaaataaatgcacatgtaggtagaagcaatgaaagccatggagagcaagagggtaaagatgtaaatsagtgaggatagtactgaaaytggtgaggtcctgcaagaaactagaggagacagaggagcaggaaccaggaggacactgaagcagatggttaaaagcggagatagagaagcctccacagcacaaagtggtgaagtggatggaattcraattgacctttatctcatcagtgaggtagaaagttgkgttcttggttaaaagttagaggatagaagtgggaatgggaatttgtgaatagtggaaatgtcttgacataatgactgtggagaatcagtagagagatgtaaacccagattgagggccttgctgagggtaaagtagtgcayttgtggtagacctaatcaatctagtttctatgctgttcaactatggaagcagaagagaaaatatgaacaatgggagatttccaggaattttcaggtggtggtgagtaccggtttttttgttgttgctgttgttattgttgtttttaaattactgttgatggaattaatgttaggtaaagagtcaagcagactgggcaaatgtctgcttgccatttgctgaatgaaggagttaagtcgagggccaaggtcaggttctcaagggtgcttttgtgccaggctttagctgcatgttgcacacattatttttttatccttgtgataataggaaaaattagataaatcataaacttatgaggtaaccattactaccccaaatttacagatagagatcctgaaactaagattgagtgaactgtgtacaaaaagacccacaggagtaaatggcagaactttttcaaaccctgccttgccgttgcctccagtagccaggaaggaaatgcaaaattgggcagataaggtagctgaggtcagatgaggaatttcagaaatagagatggaacacttcctaatgataagctccaaagtgaagcagtggtgacagaggaagaatcaaaatgctggttatagatgtcaaggtgcaaggaattagagagttcatggatttttttcyggaaacttattattgaagtatcatatgcagagagaaaagtgcacaaatcacaaatgtagaaatcagtgatttttaataaaatgaacatacctatgtaaccactacccagaccaaaagaacagataactgccaattccatagaaggcccctggaagtccctcctagtcactaaaccccaaaggtaattaccatcttgacatcttggcttaatatcaaagattagtgtttgtctctttggagctttgtattaatggaatcatactatttaatgtactttttaatatctgggcattttttgctccacatttgtacttatgagattcattcctgwtgtttcatgctacagttgttccagtagatttaaccactaatataaccatgcaaatagttgccaccttttctaatgagaaaagagtcccattatgtgaggcccataaacaaaagattatgtatatttttatgcatttttattggatagaaagtgtgggcaacttgacagatacatttctgacatatacagagctatgctaacattgcatttagatatagttactaaaaaattataagaaagttctgcatgttctactctatagtactacaaacagccttgtaattagaaaaaagaaggttcaaaatttagtgcaatttacacatacattgtcgattcaggaaagaggctaggattcaatgaatgcactgacattttgaaacaaacaaacaaaaaatcctgtgtctttatgagtgtttggaacttcaggattcaccaaactattcttggttgtttggaaatgatgtacacttagtcctggaagaagatttaaggaaacaccacctgcctttcagtagtatgtttctgggaaggctctatgttaaccattctgcaatacaaatataaataactagatacactttaagacacaagacgtaatggtctaaaaaatgatgttccagagcagttggaaatgcagacaagtacatgattaatattgcaaatgggtttataaaatctccaagttgctcaacctcccttgagactcagtttcttcttctataaaatagagataatgctccatctagctccctgggcttctatgtgaatcagatgacgtggtatataagacagtactttccaaattgtaagacaagaatatggtatgattcttacttgcggtaaatccttttcagttgctcattgcaggtcaatgtgaagggggaatacccagatacgtagcaccacagattgcagcaaagtttagccaggtgatgaataagtttgcctttggaatcagacagtcttggatgggagtacaggctgtgccactcactagcggctgtgtaactggaggcaagttattaatctcctagagccataaatttcatttctagaatggagatcatagcatttgttagacttacctagaggaataggtaattgtaagaaatgcacccctcatggcaccttgtgctcagaattayaccaataaatagtgtcggttaccataattctattatgataatagcaataataatagtatgatggcttcaagcagccacttagtgctgttgatgtacaaggcaaacattgacgtcctggggtagtacctgccaggctctcccactgttttgttacttcattatttaagggaatttttccaggctgatgatagcaggcttggaaccttggtagcttacatcctgtggcctctgggcacctacaaaattcaggtgtcaagggagcctcatgtgggagggcctctgatagaggaactactctcctcttctctgctcccagattctcaggtaagccctgtgcctttctgtaatttcttgatgagttttagaataatggaacatatgagcagaaagagacctctagacatcatttggtacaacacccacatttcatagcagaagaactagggctcatagaggctaaggggctttcttttagagtgagctggtgataaagccgggactataactcaaatctcccaatacccagttcagaacactttcttctcttccccgctgccctcaggaggtggcttcacctccactctctcaatgcaaatggaggattgttatctgctttagatttgggcttgaatcttattctcyatggaatcccttggacaatgctttgcacataatagttactcagaaaaaaagtatctttaagtggaattcaatttctaggataccctcttctcatattcaatttttagagcagaaaccaaccttaaatatcatctttaaatgaccaagttcatttctctgtgctgcacatgtcctacttcctaggaacattctcctctagttgtcctgggcagtcaagccatctttccattgctcttccactgcccccactgtacagctacgtgctaatgcttatgtcaagatagcacaatatagtggctaagagtataagacctggagtcaagagagaatgaggttcctggctgacacttactagatctttaatgactctaaacctgttttcttatctgtaaaatggggaaggtaatgcctactttgtaaggtgttaaacactaatagtatgtaaaatctttagtatagtgcctagcccatattgagtgctcgataaatgtattaatattagattgcatcacaatgtatacattgatatgtctgtctcccctgttgaactgttatctttgggtacagaaccttgccttagttaattttgtatccatgggatcttgaacggtgttgtctggtgcagaataaatagtcaagatttttaggagagggagaaagagaaggaagggaagaagggaggaccagttatgcggtgcagctgagcgccaacctaaaaaattaaagacctgggttcaagcttcagcttttccatctactggctgtggagttctaggcagttactcaatgtctgtgaaacacattctctttatcagcaaaacaggtttgctaatactgacatcatagcattgctatgaggataatttgagacaatgtgagactgtttgcatattgaaatgtactttacagatttatacaaatcatcattgctatgagaagacatgccttcactgtctcccttattttaccagataatcagccactttgcagtgactccatctatggagcagaaagcaccccgttaggtgctgtgaggaggcctttgctttcaatatgtttactatgcagaagggaggttagaatccacaacctccactcacagccatggcaggtagcttgagagaacttctggctgggagcctttgacctccactgacctacctctccgagtgcccagcagcagcagtctctgaagtgacccctaatacggcatgcacatgccaggcctgctcaagttcatctttggaatgctgtgtcctttgtcaaatgtcaccagcatcattttctcatttccctcatgacacacattttaaagcagcaaagtgtattccccatgatgtaaatggtacagtggcagagagtggagacagagggtgccctaatgccagtggaagagaaagtcagggctgattcctgaccgccacttccccgctctgagcaccgcatatagggwtctgctctgagacctttatctttaccttcatacagagcttctccttccttacgtataaatccccaaatgtataggtctgggaacctctagagaaacacggatatagagaaattcacctcagtgcctcttattcttcatcagggatctataaagctttttcaatagtaaaagcagctccttttaaacactccctgaaagcattacctgatttcctcacatctaaatccacatttctttaacctactcttttcatctaaatgagagctttaggtggatgttgagcctccattcttaattctggaggcttgggtttctccagaatgtttagaaggtttggctcacatgggtgttggtattagtttcctattactgcaataaatattacacaaacttagtggcttaaaaygacacaaaccaaggttttggcaaggctgcgtttctttctagagactctaagggaacatccattttcctgtctcttccagcttctagaggttgcatgcattccttggctcctggccccctttcattttcaaagggagcaatagctggtcagacctttctcaccttccgtcactgtgacactaaatcttctgcttccctcttcagcattaagaacactttcaattacattgggccccactggataagccagaataatctccttattttcatgttacctcaytagcaaacttaactccatctgctaccttttgccatagaacagcacatgtttacaggttgcagggattaggatgcagacatctttaggagagtgatttcaggatctcaaaatttctctatagcaggatcaacaaactacagcccatgggccagccacatgtttttgcaaataaagtgttactggaacacagccatttgtttatttatgatctgtgatgrccttcgtgctaaaatggcagaattgtttgcaacagagaccatatggcccacaaatctaaaatatttattgtctggctcttttgaaaaagtttacctctgctctgtagcactttctgtgtctttggttctgactgtgactctttagaacatcactcacaaccttgtggatatctgcttcatgttttaattacaaccccaaccccactttttaaattctagcagtgttctkcctgcctctccagcagttcctcctctatcatcaattaccataaaattatttatcccttgtagtaactccaagcaccatagagtgttaagtctctttactttttccctctgcttaaaatgcacttaccttctttctctatctcttgccaggcaagctcctatttatcctttaaaaccgtgccaatgcataacttccaggaagccttctctaacatgcccatccaaggagaagtactctactctgaaattacttctagaattctagaatagaattacttctactctcaaaacagtcttgctggactgtaagtgcctcagtggcagtgactgagtgatttacccttcttgttgcccctgaaccttgctggagaaactggttctttctatttcgtggagggaatggctcttttcttgaagattcacttcccttctcctggcctcagtctcatcatgtgtgaaccaaagagttggattaaatacagtcagtctctaaggtcccttccagattcaataatcctttccatcccagaagatttggcctggttccttacagatgctgaggagaaatctcctgcattaagcttgcaccctgcagagttggaaatcatccaaaacatttatcactcatagctttgctttgactgtgtggcaactgggaactgaggaaatgggggtagagtgactggaagagaacaaggagttgctgagataatttgggggagatctcttgtaagtatttggccctgacctttcttcaggaaccaatgagaaggcagcacagtggcctggagagttgtaatccttcgcagcaatccatgcctggggctcctccacttgttatggatgcaccctaaatccttgcaaccacgtgggagtcaagacaaactcaatgtggtccaaattcacatgtctccccctcctcccctaactccctcacatgtatcagtgagggagtttctgctcttgtgtcccactctaaggctttgtgacaattttggacacaattgtcaccctttgtgatgattttggaaactcgtctctccagtcctccatatcccatcccttaaacatatactttttccttccaaacattgcttagaacttagctcttctctgttatcctattgctaccatctattctagcctacacaggtaatcctgacagtagaatcttccccaggttcccaactctagctacttcccattgagagccatcttacatcctcctgccagcttcatagttgcacattccctctcccctcatgcctcacccctattcaagaacctacaatagctccatgcattcctgcatcaaatccaaacttcttggtctcatttcgtaatctggctccactgttttttgtttttgttttgttttgttttgtttttttggagatggaatctcactcttttgcccagcctggagtacagtggcgtgatctcggctcactgcaacctctgtctcccaggttcaagcaattctcctacctcagtctactgagtagccgggattacaggaacccaccactatgcctggctaatttttgtatttttagtagagatggggtttcaccatattagccaggctggtttcgaactcctgatctcgggtgatctttccctctcagccttccaaagtgctgggattgcaggcttgagccaccgtgcccaacctccactgtgttttcatcactctattcagtgaaacctatcttgtctctgcttcacatttcattttggccgccatgccattccgcgtatggttaccgttgcctggcttgtaattcagcttaattcagtgcattttcacaaacacttatgaagtacctgctctgtccaaagcacaagcacacctttgctgctcccagtccttctctgatgatccaactgcagtccatggtttgcccttgctgttttcactttgtgtctatgcactcctcccctcctggagcacattccttgaggacaatgacaactgtgtctttcactctcgtacttactgggacctactgttaagtccaggctcccagaccacctttacccatacatcattctcttcccacttgttctgtcatctataaattaatgataacaaatctatctcacaaggttgttttgagtattagagatattttgttcagggttgactatcagttgrtggttgcaatgattagcattatttttatatccatccccttagggtctttcagtttttgttgcacaagctcttaagcatttggagttagagaaagtaaaatgtgttttattactattaaacatagaagttatttctgttcctgagtcttgattggaaaattccacactcaaccccacgaattactgtaggttaatgcatctaatttcacctgttcataaggcaaatgtttatttattttattttttattttttggaggcagagtctcactctgtcacccaggctgagtctcactctgtcacccaggctggagtgcagtggcacgatcttggctcactacaacctccgcctcgtgggttcaagcgatgctcctgcctcagcctcctgagtagctrggattataggcacacgccaccacgccgggctaatttttgtatttttttttaatagagaccggatttcaccatgttggtcaggctggtctcgaattcctgacctcatgatctgcctgcctcggcctcacaaagtgaaggcaagtatttattaaatgcttgctgtttatcaagcactgttcagtccttaccattagcaacttcagtggccttcttttttttgaaggtgagtcattccctcttcctcatctcagacccagccctccctacctacraggaagtgtagtatgggaactgtggaattcagagttttcactgagggcttggttctgagccttggccacgtaaacctcactcactctccaccctcctgtgttcttctgaggctgtgtctgctgggtaccagctagagccttctgtctgctggctacctagcctattcagtttcagaaaaataatttctaatccaaactacaactatttgaaatccagtcagagtgtagcagtaattcattcattcaataagttcaatcagtgagtaaattcaatttagtaaatgattgctaaattaaagcaatcacccagcaaggctgattcaacaatctcaaaatgtctgctgtatgtttctgcaacgaactttgtagtgtaatctcttcattaaaagattaatattcccttgtttactactatttcaaataatacaaattcacataattcaaggaaatcttccaaactagataacatgatattatatggtaaatgccagaagaaccagcaaaacaaaaaacaaaaacatcaaaccttcactaatgagaaaacaacctttaaaaattgccttaggcatctataatctagattatcccagttttaagactttgcagaatctgtgtctagttgttatatgtgtgaagctggcaacaagaggccaaaatatcagaagtgacatgcaaaacatttacagtcctgtctgtatgtgtgtgttcagggggagattgatttaagccaatattttctacctagcctgcacatttatgttggcaggatttcactggtaaatattggtctaaaccaaacactgaaatctttaatcacatttaaacagacattgcattatactgcattagacactgcattagaaaggaaccaacagggaaaaagtaagcacagctgatagctacaatctttcaagggtaaaaaggaaaaatcagaattcagtaagagtcttcagagggagaaatgccaagaaaaccatagctgaaatacaaaattttgtttttctaaagtctggagctgagttcagttaagtgacgtagtttacaaaccaggggaaattagggccggaacggaagtactgctaaattaggagaaattggccaaaggaaagtgagctagctgtgacatacacagtgttggcttctttctctcattctcaaacaattcttgtttgctactgtgtggagttgggttgccatgaaacctgaggcctaattttatatttcattggaagttctgaatctgtcacataaagcaactgtttgtctacccacagaggctgcaaaaatcataactgttaatctttcctaacacacacagaaaaccccaacccaaaaagagttgcttggctttctttgttcagtgtcttcattcacatccaggggttcttactgaatcatccagaaccccataaatcacctcaagagcctgtgagtctcctactaaagtgttccttcctccatccctcaccacctctgctgcaccaaaccctaccccgcacacttcagacacagccctrgactgcttagatgcttactaagaaagtctttaggaggaagggctgttttatctctgaaatctatgcttatcccttcttaattaaactgtcaggccccacattttggtgtagatgataagatttgagagaagcagggatcttgttgggatgaatggtcagtcccactgaagggtgcctcaaagaaaaactgtttttttttttaaatttcttttctttattattatttttttaagtcaggcctagtgcagtgcctcacacctgtaatcccaatactgtgggaggccaaggtggcaggctcacttgagcccaggagttcgagaccggcctgagcaacacagcaagaccctcatctctacagaaaatttaaaaatcagccaggcatggcggtaagcacctgtagtcccagctactttggaggctgatgtaggaggatcacttggcctaggagttcgaggctgcagtgagccgtgatcacgccattgtgctccagcctgggtgacagagtgagatccagtctctaaaagaataaaatamaataaaataatttatcagctcttaggcaagattgaggaggtgggactcccaggaaaaaaaatgttgaaggactcattgtggttattgccaaacctggctgaggatggaaatcacctgaagcaattctaaaaagaacaaattcccagaactcagtctgccaagactgctttatacatctggggtttagcctgggaatcacccccaggagattcagatgcacctcttctatagactggtatagtgatgaatatcaactttgaattcaggctggattagaaaccacgatctaatatatacttagtgttgtaactttgggcagattatgtaacctctctgagcctcagtttactcatctataaaacagggataataactatttactgggggtgtggcaaagattaattaaatattatacatagtctctcacacactgcctgacttatggtgggtcaaaaataaagttaagccaatccaaatgtctccttgagactcacccaactgagatagcccctaaggcattcctgatcacactggaggcaaactgcctcagtctgaatscactaagtctgtgattctkgaaagttactgaatattagcaaaaaatcattatttttattaccacctcttttaagacaagcaattatggtggaatgaatgctggcctttgagtgttcacgtcctggctatagacttatgacctagaatagtgcttcccaatagaaatataataaacactctacaggtaatttaaaattttctagtaaacacataaaaagaaacaggtgtaattaattttattaacatattttacttaatatatgcaaaatagttaacatgtaatcaaatatatgcatttattgagcaatttacatcattttttcatacaaagactttgaaattcagcatgtatgttacacttacagcacatctgaccagagactagccacagtttaagtactcagtagccacatgtgactagtagctaccatattgatagcacagtgtagacattccagattctaaagcaagtcatgtcaccttcatgagcctcaataatctcatttgtaaaaatggagataacttyaatggctttgtttgcagaagaaaatcagtaaacttgaaagcgcatgtcaactggtaaagactgtatataacaggttttctgctctttacaacacttagactacaaaatacaatgcgattttcataaagtgatgtatccaaggtcgtgtgtgatctgagayatcactcaggatagcatcaggcagagacactctcctctaggcagatgaaagagattttagctagtagtgtttcaagaggttggaaatttcttagtcctcttctcctcctcacccagcaccttcactctcaacagcaaacacatttgcttctactcttcactgactcttgaaattccttcgaccattttcattctacaaataaagataaaattgagggataaataacccttgtgttccctctgataacatcttaatttgaggcctccttacttcttaagctcctatctttttctacaaatgatattctctgatgttaataatttaccaagtgcttattctctgcactcttataatttttataaaattctgctaccagagcaatagctcatcttcttaaagattgtattgtatatatcaagagcactgaacttggagtcagaaagcctagattcaagtttccaggttctacattttctagttatgggatttgaggtgaagcctgtagtgaccagaagacatgaaaattccctgagcttcatcaggcttttcctctataaaataaagacaataatacctctctcgaaaggtagatgaggattaaaagagataatgcataagaaagtggtctataactgcaaagaattagacaactataaaatggtatttagggatttataagccattttgtgcatgctattcttccattgagcagtttccaatggttccttmttgcctgccaaataaagtcagattccttaatctaacattaaaaacctctccaaaatttggccctgaccacactacttttggaagtttatcctactcaacccacttactcaaatcaaatgttctaaccaactagaactctcatatttgtcctacccaaacaacactgaatggtgtgacctatttctaatttggtatatttcttaatgctgtccattgccttacctcattttccaacctctcaaacttccacccattcttctttaccaggcctccaaatctctcatgatctcgttttccctcatgtccttgaactctatctctgcagcctctgaactttgcttgtgtctttcttatgacagctrtaaaaacccacgtgggattctagtaactcttggtgcacagagacttgcaacaagatgcctgaatgtgggtactcagtgagagttaaatatccaaatctgcaagtgattttgcagaagtgctattgagaggcaaaatgtttcccatataaaaactagccagcctagaaatctaatcaacacatgaatgcaaaagaaagatagagctgattagctgtggtaacactgaataaatcagtaaaaagaaggtgatttgtttggagactagcaaaaaaagaacaaaggacaagtattggacattgtgtctttgatactgttcagtagcaaaggcccctttctttttggtaatgcatagcccatctgttgatatgttgggcatgtctacatttcaactaatattttctgagcttctactaggtaatagatgcttgatgcacaaaaaactaaaaaaatagattctctaccctcaagaaggttagaatctaatagatgagaaaaaccaagagaaatatttgtaatgaaatatggtcatttggaaatagaggtttgcatatggtgttgtgagatcttagaggaaggaggcttaatccaacctcagaatatttagaaaactttgtagaggagatgacactaggctgcatcctaaaagataaggaagagctagccaggtgaacaaagttgggaaaggcattttaggcagatagaaatgcttgagcagaaacaactattatacaatctatctcagcaagggagctgagtatatcaggcttgaggaaaggagccatttaaaccatccaactagttctcctgctctgatttcatgcttaccaagccatcttatggttagaatttggcctcccacatagggaaacatgtgattaccagaagacataaaaagctttttataaattactgttctctattaattcattggactctgatttgccactgggctcttgtgagttgaactagtataaactgaatgaactcaaaatacactaacaaaattacatttctggacctgaaaggctgaagtgacttgaattttggtcatcaaccaaattccaccaccttagaggccatgtggttctaacttatgaatgtttcaaatccatttacctctcttcatctccattgctattacatggttgtagctatcatcatctccagcatagactgctgtaataaagaagtcataatgccatcttagtccattcttgcttctataacaaaatatctgagattaggtaattttcaaagaggagaaatttgtttctcacagttctggaagctgggaagtacaaaatcaaggcattggcaggttcagtgtctgaggagaactgcactctctgcttcaagatggccccttgtttatgtgaaggacctcttcaaggagaactacaaaccactgctcaaagaaataaaagaggacacaaacaaatggaagaacattctacgctcatggataggaagaatcaatatcgtgaacatggccatactgcccaaggtaatttatagattcagtgctattcccatcaagctaccactgactttcttcacagaattggaaaaaactactttaaagctcatatggaaccaaaaaagagcccgcatggccaagacaatcctaagccaaaagaacaaagctggaggcgttatgctacctgacttcaaactatactacaaggctacagtaaccaaaacaacatggtactggtaccagaacgcagatatagaccactggaacagaacagagtcctcagawataacaccacatatctacaacctctgatctttgacaaacttgacaaaaacaagcaatggggtaatgattccctatttaataaacggtgctggaaaaactggctagccataagtagaaagctgaaactggatcccttccttataccgtatacaaaaattaactcaagatggattaaagacttaaatgtaagatctaacaccataaaaaccctagaagaaaacctaggcattcaggacataggcatgggcaaagacttcatgactaaaacaccaaaagcaatggcaacaaatgccaaaatagacaaatgggatctaattaaactaaagagcttctgcacagcaaaagaaactatcatcagagtgaacaggcaacctacagattgggagaaaatctttgcactctacccatctgacaaagggctaatatcyggaatctacaaagaacttaaacaaatttacaagaaaaaaacaactccatcaaaaagtgggcaaaggatatgaacagacatttctcaaaagaagacattgatgcagccaacagacatgaataaatgctcatcatccctggtcatcagagaatgcaaatcaaaaccacaatgagataccatctcacgccagttagaatggtgatcattaaaaatcaggaaacaacacatgctggagaggatgtggagaaataggaacgcaaaaaattcctgtgttgaaaccagtaggtttcaacacaggaattttggggggacacatttagatcataacaaatgctaccagcaactaggatggataattaactaggttactaggtaatgttttatgtgttttggtatggtttacctcatttaatcttcataactatcccacaagatatgcttacccccattttagagatgaggaaattaaggcttagagaaattgagtaactcaaatggcaaagccagatatcaaactcgtgtatgtcttcctgtagatatggggctcttgaatactatttagctaacctcatatttctagtctctagatttcattcttgccttcaagttcattctccaaattgcagccagagggatctttttaaaatccaaatttggctgggccactcctttgaaagagctccaccaagttttccagttgcttccagaataaaatacaagatctttgcatggccttccatggctgtatataacttgatctagcttctcctatcagtctttccctgtctgcgttcmtgagcatactctgatgttccccttgcctggaatactttcctctcccttgacacttaattcttattcctcaaaatctcataactttccaaggcaggccttccttcacatcccacttttcagattttgggtccctggttatccctattataaatgtttatagcattctacacttcttagtatctctgttccaagttgtactaagtttttgcataattatttttctattcctcttaggatataggcttcaagtaagcaaaacctaatattcagcactatacccttagagtttcatgatgtgcctacaacataataggcactcaaaaattttactcattaattatttatcgtatcatattcaataaataatagccaacattcatctggtacttgtaatgtaccatgcactgtcctaagcactttacatttatttatttgttaaccagatgctacagcccattaaaatagatactattattattctcattacacagatgaggaaactggggcacagagaagtaacatcttatgtaacaaagttttataacagtaagtggtggtactggaatatgaaccaaggcagtctaaccccagagaccaagcttttaatcactgctctatatccttcataaatattttgtcaatatatttactttgttagaaaaataattggacagcagcttgcctctatccctatcactttcttgtgtcattggtcttcaataccaatacaggtagataattaagttctttgaacatcccttcacattggtggtacatgttttagctggatgagaacagattctcgttagcatataaatgccaaaggcagagttctggagagcaggttttcctaagggtaaggacattaaaagagtgggaggtagaccaaaaggaaacagtgctatgaggctggcacatcaaagacatagttttgccttgactaagcctatctctgtaaaagaaagagaaacttagaccatttatttataacaggcccagtggtttagcaaaaaagttatggaatttagaatcaatatgtcaatcaatataattaaaatgtctccttcattctccctccttttcccatcttcccctctcaatctctctgtccttcttctttgcctccctccctcccagccgcatcatatcactttgagcaaattgttaaatgcatccaagcctcaattttctcacattcataatggaaaatgtatgtcataatgataataatttctctcttggggttatttttcaaggaaaaaaatgagatatgcaagtgaaagtgcttggtaaactgtcaagttatatatataagagccagttgtgattagaakttttgttttacttgtagtcttagaggaatttgctaaagagatcggcatcaaaatgacctacttttcactgttatttcccttaagggcagtgaacctcttcttttatgaatccacccagagtgaaatccctgtcatatgcaattgcaaagttccatatctataaagacatgctaacaaagttctgcctaaagaaaggctatatagggcttgcaaactttggtcttggaagaattgcattgcagtgtgtacatgttctcctgttcttatgatttgttccatagatactttacccaaggttaaaataacatgccctcttgaaatgttgcactctaacctgagtgtgcttcatttaccaaatattatatatttggacataataactcatgatgaagaaaaattatatctaactctaagggaaaaaatcacaaccaagattgccaaataaatagataaataggccagtagcctcaacctaacacctttgcataaagagatgccaattcctatatgtatgaaactattttacattttatcaagtacttattgcactatgggaaggaaccgaagaatggagtaagtatgctaacttaaaggcatgtagagccataggagcaacccaaacgtaagacatctacagggctagaagcttgtgaatgaagctaaaagtaaagctgaatgtaaataatccaattaatacacacttctcatttacaaagatcagaagattatgggaggaagctgagaaggcgcctagcttcacagacttactatttatacaaggaaaagggatttccaatataatcattcgctacaatggacaataccactcctgaagtgtattgttcattgctgtaatccagcacccacccagcagcaggcttggcacatagcagatgctcagtgtacttttgctgaatgaatgaacaaacaacttccctakacaattctccacatctgaaaggccactgacctggtatgtcagttagaattttgtgaaaaaacgatccatcaggtcagctctatattttaraagtggaaaccaacagtctctaacttaagacaaatgtcaagaatgcatttttctgaagtcctacagtrggaaggacgctttaggatttcatggccaaccttacaaatgcttcctttcccagggccaaatcaaaactctgtcaatgactcagctgtcaaatacatgtcaatatatcatcaggaaagtgacccaggaccagagaagtggtgggaaggaggggagaagttcctgacacgtgccggatgctgtaccaaaggcttggcgtatactgattcacttaattctcacacctagtttaaactatcttcctgttttacaggtgaggaaatggaagcacagtgggctacttttcttgtctaagggcacattgctattaaatggcacagttatgatttataaacagctggggcagactctactgtgttccactgaattttgagttagtagggcatcctggtctatgtcacattaaaaccaacatttgtcgttgttttttagctatgtgagatttactcaaactctgttgatacccattgttatagctaaacaaaaggaaaggaaatgttttttagaaattctgctcttgtttttttaaactgggcttcccctagatgggactatctgttgaaagcctacatggacaaccagaaagacagcaaagtgcacaaatcacaagtttagaaatcagtgagttcttataaagtgaacatacctatgtaaccagttcccagaccaagaaatagatcattgccaaccctatagaaagcccttcaagtccctcctggtcactaagcccacaaggtagccaatatcttgacttctattactatagattagtttttgcctctttggaactttatggaatttgacccatactattttttcatatacattttaatatttggtttcctttgttccacatttatgtttatgatattcattcctgttgctgcatgtggcaattggtccaattgttttagccactagaataactttgcaaatagttaccaccttctctaatagaaagggagtccaattatgtgaggcccataaaggttatgtacagctcttttctgtgtgctttctgtggatagaaagtgtgggtgacttgacagataagtttctgatatatagagatatgttggaatatcatttagatataatttataggaaatttatatttgggtaatattgtgatgctttcaattgctaatcatgtgtaattgagggcagagcattttttcctctcagcctcagttttctcaactgtattacaagccatgagacttaaggtttcaaagttaaatgatgccagatacataaagggcccctgtgcctacttttccaagagatcagtgtagtcataagattacacttccctgcacggattgcagggccagcttttagggcacctgaggtctttcaccagtggggccactgatttcataactgctaaaatgtgtccccatgttttctaactatgagcaactagctatttgtggccaggcagaggtttctaattaccctttcctgtcactcttctctggatctctccctcttcccaacaggactctgctaactcacacacccatttctactagattggcatttaaaaagctggggaagttggtctatgaacctaagtattagattaactgaaaaatcattgaaacagaaaaaaaataaaaagatcattgactgaaaataagaatgttgctcagcagtttgtacaatgtgatcctatttatgttatatacatatgtatgtttacacagacacacaaacacatacatgacatgcacaaaggagtcaacaatggtgatctctgactgctaaaaatgtgagattttttatcatttgaatttttggcttctctgcaattttctatttttctaaatgtgcctatatcccatctgtaacaataaatgagatatttgcaaaatatatttaatactaaaaggtttacagtccatttttgtgtttattctctgattctacctttcccatgagaataggatatttttcttatcctcattttagagataaataaatttagtcttcgagaacataggtaatttacccaaggtaacccactgaagcaagatgcaggacaagaaccataccaggtcttctgagtaaatattgcacagcttccctgtgcattaggtagatcagaaaagggaagtggagacttcagaaatgacaacatttaggaaagcagttatgcaattttaaatggaagagatccgagggtaagatgcaactttaaatgcagcattttcaggaataggtgcatctttcagtgctaaactgaatcctctgtttcatagaccaagatatagtcttgctaggaatctggagggaactatttgctctaataatttaatctctgatttcttagtttatgccttaaggtaaataagataatcatcctacttccgtatctatcacacaaagatgttgcaaagattaacgaatagtgtgctgggagctcctttgagaaaagagctatttgaataccatatatcattagcagattaatattataattatttactaaatttctcttcctgtttctcagagtcaaatgcaatacccagcaaacttatagaaggaagaaaatctttctgtgccactcttgttggagtgaaagagggaaagaagagagcaagagaagggaggttggttctccctacttcttccctctggaagtttttgaaagcgaagttcaactgcatgaccatacatggtcccatgacctactcttactgcctctgagatttgcttctgtggtgttaaacattgtttcttttcagggccatcttatgtaagacaggaagagacccagtttcatgggcatgtaacctgttgggttgcacagggccctatgctcagaagggctccatatttgccatcttaaaacttgtaataatactatctttgaacttgtgttttataaatgatgtctgatgggacaatggagtatgtgccagtggcttggagccttggctcatgcacttcctcacttcctgtcacctgcctgtctccctggacaagatcctaaccatcctctcctctgctcgctggtgccctaggaatcgtccagcttcctttttcccacctgcacttgtgaccattgctgccctccatccccaatcagggtataggcacagggagggtctgagttagccacatgtgctttgtagcctcagatgggacatgttagcagccgtctttgccctgggctggcatggctgtggtagacagaggccaggtcttgatggggatgaacctcttgtccacccctgtttcaggtacccagcatgtccctgctaagaggttgcagtacccttagcagtatgctaagatccaaggggttgtctgctgtggataggggcttggggaccatgagaagggagaaatacctaattcgacttccccagctcttgtgcctggtggggacacagctygtcagtctggyggctatcaggaaggagtagccagctgctggtgagctatgtgcgtgcccttagtcataagaggcagggccttcaggttgctgtgagggtctgcactcacctcaaggtatcccagtgcctgaaataatacaatatttaaacacaccaaaccattaattgtgacaagtgtaccataataatgtaagacattaacaatggggaaattaggatgtgggatatgtgggaagcccctgtgttatctttgcaatttttccgtcagtctgaaagtattttaaaataaaaagtatatgaagaaaaaaccaccatgacaagttgaaagagagaatgcagaagaaaggaaaaaactttatattttagtatcttttatagcaattttactgctttttcaacaaggggccctgcactttcattttgtactgggcctttcaaattatgcagctgattcttactgtaaaatcccttattgaatgtgcaattcagctatctctctttcttttcttcctcacactcttttctacccttcaatgccaggccttaggatttctccaattgccattagtaattctcctatgcatctatcacctactaagaactggctaccatcctaggcacttcatatattttatcttatttaatccctttataactttatgagataaatattttatccttcttctacagatgtatgaaattgaggtctaggaccacacagtaagtggtagaagagaaagtcaatattcatgattctcactccaaatctggtgctttttttcacagtgctacagatggaccattcagccttcaggtgcccaggtatttgtaggatgcttaggcaatttggtttccattcctccaattatttactgagtatctcctaggtgctaaaactacaaagttatatcagggaggccagtcctgcgctgctctggtcattttctttgattgcattcataggtagcaggtgtttgatatccccctatttagtacactctaacctctgtgcccatggcttagttgccatgataggaagactataaagtggacacaaagtcttgactgtgaattaagaatttggaaagtgayactctagcctaactaacattgcttcaaaatgtattaatttttgcttaaacattttgatggctgatctgaagaagagaggacaatggagcaaggtctcttcatatccattacctgttcacccacatctcacgttgtaccaactctagaagtacctgagtgcttgttccatgcagtagacaatgaatgagctcactggtgtatctttgaagagtccttctcttttttagtacttctgcgggtataattactgtatgtatttccttggtcaagcttgaatagaaatcagatcccttttttcctctgcatgaaggagaaatgtgatgtatcatcttgcagtcattttgcatatcagtggattcaaaaggctaggagcaagctactttctcyccaccgtcctggtgaatgtccratattagttacagagaaccacaggttgtgatgtggaagacatgaaggtagtaaatccccagcagctgggaagtggttggactttttcctttattagaggcagggaatgagaatgggagggttctgtctcytcagaaaaggcttccttggaagaagtgctcttctggaagcaaacagaggaggcaaggggttgtttcggacacactagagagtaagtcagagaatcttcgtgttgaggcagcattgcaaaattgaagatgaagaaaggaaggaaggtatgtgtaagtctggcttgaaatgagttttattaaaaacacctcaattcttgtctgcacatttttgaagagtgtgaaaaaaaaatggaggaagttacctccagtggttttgtggctttttaagcatgacatacaggatattgaatttaacccctgtttatcttgaagtgtatgaatatttcggggataaacaaagcaactattctttgaaatatgcgtctgtggccaagtgattccagttacttggaatcacagttctgttgattctcttttctgcttcaagtatttgcacaccacagacataagattattcatataataatttttaaaaaccatgtggtcttgctagaatttctgtataaatgtataaaaatgtcttttaaatatggcaggaatgttatattagaactccatgtgagattttacattttattagtgcctattgtgtgtttgtatttcagaaatcttggtagagtttataaatgctatttctctcaaaaacagtcgtgtatataggagagtccaagtgctttttacaactctctgtagcttcattaattcatctagcatttataaagttatttcagtgcttattaagatagatttcttaagccagtaacctgaagtatttgtttagattcacaaacttttggatataaaatgacatgttaaggatatgtaaaaagaattttaattatctagcaaaaaaatgtgattttcacaacaatattttttgtgtgaaataccaacaatatttccagaaagtctagagtcttagggcaacaaattggagcccccagctttaatcaaaataaaaatctgcagagtgttcacatctggctccacctgaaagtccggttcagaatttccctgtgatcctggcacttgcagaagggaagttttagctttgtttagtataacaagagctgcaggactcccaggccaataaacgtgttcacgtaaaactccagacagcttcttttagactggagtcttatcagggagacctcattttccctctaattaaaggaaagatttaagggagagaaaggaatagcctatgcctcttacttgtgcgggtcagtgttygctgaattagaagttattccaacatgaacacaatcctcaggatgaatgactgcctagrctttgaacgtaatggtcaaccagttttcacccgaattttgactgtttcatttagaagaaaagcaaaatgagaaaaagctttcctcatttctccttgagatggcaaagcactcagaaatgacatcacataccctaaagaaccctgggatgactaaggcagagagagtctgagaaaactctttggtgcttctgcctttagttttaggacacatttatgcagatgagcttataagagaccgttccctccgccttcttcctcagaggaagtttcttggtagatcaccgacacctcatccaggcggggggttggggggaaacttggcaccagccatcccaggcagagcaccactgtgatttgttctcctggtggagagagctggaaggaaggagccagcgtgcaaataatgaaggagcacgggggcaccttcagtagcaccggaatcagcggtggtagcggtgactctgctatggacagcctgcagccgctccagcctaactacatgcctgtgtgtttgtttgcagaagaatcttatcaaaaattagcaatggaaacgctggaggaattagactggtgtttagaccagctagagaccatacagacctaccggtctgtcagtgagatggcttctaacaaggtaagagatgatctttttattcattaaagtgtgatcatgcagggagctccagctcccctcacccctgtctgcagcagagtgcaccagggaatgctaccaactctaagaatatgtttgttgctttgtctagaagattctcttccaaagtgtcacactctacttgtgtcttgatgctacagcaaaagtttaaaatcctcagtacgcttcaatttccagaaacaaaacttctctcttactgatgcagtttggaataggtttaaggtgagagatgtctgtctgtaaagcttccaaatcaatataacattgaaagtgctttaaaatttttttacaattatcaggaagctaaaatctgagttagtcttgttgcattgcaatcaggtgtcacatatttatttttaaacaagaaagtagtttaaccttcatatatcaatgggaaagaatggtctgtgttgaagtttgataaattccctctaaaaagaaggatatcctgggattttctaagatttcttttgcgatgctggcatgacctaagataaaaaagaaacaatatgctttgtctccaaaaccagaggttttctttaagtttgctgattttcatagtgaaatcatttgaaattgcttcatgcatactgcccccaaaatggttttatttacaatccccagacaaagcttaatgttgaagagccttaattatctatcattatatcatttgtttaattaacacctggacttagaatgctaatttatgtagtgagagttgttgctttttgtttgtatttttaccttggagaatattatattaaatacatattgctataaagttatacaaagttatatatgtgtgtgtacacacacacacacacatacactttgttaaaaagccttacaccataccctcataggtgcacatttcagagtcccagtcattctagcctgaagtatcatcttgttgtctacgtttctggggctgagaagatattttgctccacacctgccagcatgccctttccagccctgaggtgcaccagtgagtgtgtgtcccttctccagctttcctggggtaaaagtaccacctttggatcaaggcttgctggctgcggctcagaggatctgcgcagaggaagcagtgtgtcctcaggagatcctgaaggaggggaggggggactcttcctacttggaactctttgtttattggttaatgaaagggcaaaaataagtccctttctaaaattttagtttagagtttaagttggaaggraaaaaaaaagaaaagaacacatttgaggattaactatttattgacttttctctgaagttctcaattgaaggttaaactcagggattttccaggctggggtaaaactcaaccaactgcttccccatgaggagggctttgctgtgtaacttctccaaatcacactgggactccatgtagaaggactttcacaaggcttgagcctactttggagcattagcagacactctgttccctgtattttgtggtaattgacggctatgcaagatgtagatccaacatttatggggtagtttttcaacagctttcaccatagagaacatggcaaacttcaatagtcaccaaaatatactaactagagtcaccaagataaagcaggcaattaactccaagaagagaaaaagagtaccccctgagaaactacaaattgccattaattttcattttgagtgtcaatatgctgtagtattctaatcccattcatgcctagagtgctggaattagacattgactgtcttgcaaatttattaaaaataatcttattcagcatagtagttagtaaggctctgagaccaggcactctgtagacacgggtgaggattccaatccctcaggcttccgctcctcctttatggtgttgtgtgcaggaagcaatgaaagttgaatagagctaaccctaacaaaagggctaaccttcaatgctgacacagttagcttaagtaaaaagcatgcagcctcagtcattttctagttctacagtggaaaggttgtcagggaaagcaattatttagtgcatgaatgatgcccaactgacagctaagattaatttttaaaaatatctctttttactttactacctttaaaaaattattgattattcagataattgtctcaggttaagcttgagcataacatgcaccatgacacatatgatataaggcaatgaggccasggagtggtggctcacgcctgtaatcccagcactttgggaggtcgaggcagcactttgggattgcttgagcccaggagttcgagataatgcaatgcaaacatttttgtggccaccagaaagaaattgatctacaccagttctttgggaactgaattatccatggcaaaaaaaaactatattccatattcagttttcaatgttgctgaaattatctgagatttccatccaagttgacatcttaaaactttatcrtgatcatcactccctttactatgtagtcttatttggccatattttgcttacccttatcaactaaggagccagtgtaaatctctgagttgcagatctggaagtgatgtgaagaaatgttatagagggagtgtacttatcagtggtatccactacatttttgcaaaaactctgtgttcctagttctgtttcagctacgtggccactaagttttgtttgcaatgtctgatcttaagaacagcgataggtgaaattgtgttatgctgaggggtatttgggaattacataagtgcagtctacatgcaactggtagagagttaactgtgtttggtggaggaaaagcaagcatctttcatctttacttcrtctaggtagggttgtgcttttttagtttgtttgttttccttaatcctttaaattttgaagaaaactgagtgattcaaatctcctaaaagactttctcaaatgtacttcatagcctagagagttagctaagaaacatcgtcctctgtttggcccaaatttctctgatcccttaatgctggccacagtccagatggaattccagaattttagagaatggtgctgccaggtaggttagtcttgtaaattattttcctccaagaattactagaagatggaataagttcagcagaagttttacaaggcaatggtattgttatttaagatgaaaaggatggctagtgaacctcctgccagctgcccaaattcgrttagacatgttagagctagccgttttgcttaacaacagattgccttcttagaattgytcattaattttgtgtttcaattttcatcacctcctgaattagaagaattgtcttacacttcagcaaaatgcatcagagcatgagttcctcagtggcaaaacagtcagatgttttgaaaacaggatgctttggctctccattataaaaagaggaacggaaagagaaacagtatagaaaggaagaaagcaaatagcctcagcagggtccccagcccaacaacggcataaacagtgacctatcttcctgaccttcactgtggctcagttcctgacctcgtgtcaccaaagccaaccaacgtcattagaggaggataggaggaatggcgcagctgctgtgagggtgactacaatttcctgtctccttcctgacagacgcagtcagtaaagtacagggttgcaacaacagtggctgaggaaggaccaacccagaacaatcccagggaggcgtaattgtgactggcggggaatggggaggtgttccttccctcattgtactgagaaacctagtctttcacctagaattttcaggtgaaaaacgtcaaaagggtcattcttacccagaatgctaaatgtttttcaaaagatgaacatactgtggtattcagaaaagctatattcaagcaactagtcactgtcttcacttcccccacaaacgccctccactgtccttttcattctccattggtttggctctggggctgttttatatgcagaacaaaggttgggtgctgctgggtgaaaatggatattctgttgttgaagagtggccctgtgtattagtactttttttttagaatgaagcattaggacttagcacttgagtaaatgtttgctaagatagaaatggaagatagatggtccttcttctcttaaggcattgtgaagtcggctacagataaccatcatgaggaagtgagtcctcctggctaygcaggcttatttttccagttcttcaggtgcagccatactacagtactaaacatggagcacaaaggcaactaattgccagtgctcttgggtttgcaggataaagtcacackattctaccaggccccgagccagctgggaattaggctgcatgacactggatggtgatcatgacaggctgattgccctaatgaggggtgaaccattttgtatttaactaaataatcaataactatggaaaatgccagctcctgcagaactgacaggaaatagatcttactggccaatggattyatcttagaactctgtaagagagagggtagacaggcgctcagtccttgaaaggaatattcatgccacttttgcctaaaatgtaatgatatgattacagcagtgccgcccttagcataagatgcatccatttgctgggccctgtgctgtaatcagagggccttagcctggccttccttctgctgccctccacccaaggaagtaaggagttggccgggccaagggagcagctttgctcccctctctaaactacattttgcatctgctggacccccacattctctgtccaaatggctttgaacccacttccyggccacacaagcctcttcctgggatgtgctgcaggcatacacacccttaggcctaaggagtttaaccaagaggcagcaatgagaggtgtgaagagacttgtgtaggaggaacttgggtaagcaggctgcggtccagggctcacgacggctgctcacaggtccctggagatggaaggacatggggaaagargagggccaacccatatccaaggagttcaagaattctaaattcaacctgaccttccaggctgttatggagggatatctgtcaaggtaaaggagatagctcaatgtatatctttgtatatttagacttacagtgtgtggccccacacatgttagaggtgaccctggattagagggcagaatagaattaaaatcagttctggtagccaggtgggcactcacacatttttttggttcaacttttctctctttactgctcagatttatatagactaaattatggagggagcaaaataaagtgaaaagagcctaggaataagccatgagtttgagttctagccctgcctttacttaggtatagtaatatagacaataaaactatttggaatctttccatattctcttctataaaacaaaataattggaaaagacccagctcttcagtttattgattgaataatattagtaaacaacagaactacctttacaggtgtatgcaaacattgtgctaagctctttacctcattctgtaatcaatattcacagtaacactttgaaataggtactgttattattcctgctttacagatgagtaaagtgaggcatacaaagttgaaataacttgcttaaggtaaatcatagagccaggattcatatccagtccatctgacttaccatcaatgatcccaatgaggcatataaagaaagaaaaaagtttagagttatttaataattcttctaaggggattttggattggttggtgggtgatcttgttctttcaactgtggcaagcattagtgaggcctagttcaaatttatattctgtagctaccatactcacagcctctaggatggccattaattgccctaagctcagtcttcttgcctgggaagcagtgtaaggggaaagagcaatcgcaattatagaaaatggttataaagtgctcataaaaatgcaaataatagtattaaactaatccattgcctatttcagatcaatttgctcacttcactatctgtttcttaaaattctccaacatagcctaagataagatagtaaaggtctgttcaaagcactgtagactaaccccaaattccctttttccctgcttctcaaaataaaaagggaaatagagataagctattcttggccgggcgcggtggctcacgcctgtaatcccagcactttgggaggccgaggcgggcggatcacraggtcaggatatcgagaccatcccggctaaaacggtgaaaccccgtctctactaaaaatgcaaaaaaattagccgggcgtagtggcgggcgcctgtagtcccagctacttgggaggctgaggcaggagaatggcgtgaacccgggaggcggagcttgcagtgagccgagatcccgccactgcactccagcctgggcgacagagcgagactccgtctcaaaaaaaaaaaaaaaaaaagagataagytattcttattttttaatttatatgatcattcaaatgatttgggcaatttcattatatgccacaacctttccaaggcatggaacatgaccataaaacagagaattaatgcttcagtaatatgtaagggaaatttttggaagtaacatgtccactgttttccttgggcattgtcttcaaataaagatgaaagagaagattaagctatttattctttgtcattgtttcagttactctttctatgacaaaatggagttgtattagtgagtattagtattagtgcaattcagtattccaagttctagtcttctcaaaacttagcaaatcaaagagtttgaaagttatttggtgctttgtagtaagtttgatttgtaatctgttttgttttattcaaatagttcttcattggttttaacagaaccatttctttactcaatggtaatccatttggcccaatctttctgcctaactcacttgaaagtcctcaagtgagcaagtctctaaaaaacaaacagaaatgaagaggacattgcctttgattgttttacctctggctacctgataagagagcataatagtctcaaaatctgataaataaatcattttaaggggagtatctttctccacattggggaaaaaataatagttatgtttagattgtcaaatgtaaatgtaaatgtagaacactagtcttcaaaaatagaattcaacccgttagcagaataaatgtttagtctccatttttttaatacttttttctcatcttttaaaaattgtttagtttttttttgtttgttttttttgttgtttttttttttagaatatgtccgagtctaaaaggctcctaggttgtatgccatkgttgtctatgaaagaaaaaccaagggcgatggtgcttgcatttgcagtattcttccaaaacatttttcttctgagtaaaagtgtgctcaacaagtggagatagctcagacatctggaagccaggacttactaaacaagaagatgccagggcaaatttgtgccacagtcaataggtttcacactcttgaaggcatggtgccagttgtcaatatgctttcctgagcatcctttccctctagcatttttcagggacctaccagcacctctctgtcttgctcacttgtacgtgatgtttccctcaagtggtgccaaactgtttagtctcttgtgtatttcactgtaacttcctttgtttgattgactttaaagtagccaagtgcttccacaaagaaaggactgttaagttatttagaaacgaagaagacagtaaaactcctgtttcttttgtttctgctttgggaagtgccwgataattttttcttcttatggaatagattttaaagctataaatcttgccattctgttcaacagtcacttttttccttctgctaattaattgtaattttaaaatgtatcagttttgaaatctagagcccccaaagattgaagtttagtaaatttattaaaataaaatgtatcttcatggctcagtaactttcatcttctaatttttttagctactcaaaataattataattttttaattaactattaaatactttacatggctgccatcccctcactctttgctaacagcatagtgcataatgttttaactttaagcaattataaaaatgaaatttgaatacacatactgggaagtaaaaatgactaagccaatttttaaattttagatttaggacaagaggtgttggcatttgatatctaaaaagatagattttaagtagttgttttagaaagaaaatagtaaaaagaaaaattatcagtaaataaaaatagatttcaactcaattatataggctatgctaaagccaatcagacagggcacagtgaagtattaatttaccaactatctaatgtctttggtcactattgatgaaatttgataaatcaaaccaaaaaagatctaaacattttctttctagttatagttttacatgattacattagacaaagtcctagaactttaagcctagaagagagccttaagtattattttctatttctatttgaagtcattttatagatgagaaaaagaggtggcttttgccactaatgacaagtgaggattaaagtacctaatgtactccaaataactttgtaaaatatagagcacattctaaatgaaaagtaattttattatggcatgacttctccaaagtcttaaggtgtattagtgggaytcaggtattaaagtataggtctgatcataaatctggcttactgttcatcttcagcaaaaggctagatatgtttgagaaagacatgggacattctctcttttgtttacattgacttttagacttctcattcttcatttacgtttcttgagtaaaaggtatacataagtgtcttaataatttcaagtaaagagaactaatttagtatgcctgaaaatttagtgatcaaaacatagcaagaactagttggagtgagttactttaaatgcccctggttttaatttcagaatttttaaaaaagccttaaatttttgaggcttttgattgttgtttgctttctcactcattccaatgtcaaagtttaggtagtaaaaataccctgtggttagtgtaactgcccttaacttctttctatttctttctttcctctctctgaaactgaagatgataaattggaaagttttaccacttggattgttaagccttgggttctctctgccactttgcagagctgttagcatggaaagttgaacgtgagatggtgattccagtttgaccctctccctacaccctagaatgtttctgcacaatgarccagattatgtaaagctctcacagctcaaatataatttctagactcttgagtcatattacsaagatcctagtggagttaggtacaatggtgttggcagctgccttgtaaatagtttaaatcaaataagtctaattcacagcatatagagacacatttttatgtatttagccaacttaaaatcagtcttagtatgtgtagatccctaagttagctgatactgcaagtattttgccataaaatttggataaataataaactattaatgtaattatttaaatgtcgggaaaaatcaagggaaaatgactcgaggaattgagcatcttgggataatatttattaagggaaattattccagaagatccttgagagtctaacgttagctcttttttctccataatttctaatcattatttacatttcaaagtagaacaaagtaaaagaaaattccttagtatataatgtaagaaattaaaagaaaatttcgaattcttaagtgagtaagaaagcttagtgttttggttattggaataagatacagaaaacctgaattaaaaagctaaaaagtgactgggcgcagtggctcacgcctgtaatcccagcactttgggaagccaaggtgggcggattacttgatgtcaggagtttgagaccagcctggccaacatgatgaaatactgtctctaattaaaaaaaaaaaaaaargaaaaaaaagaaaaaaaattagctgggcgtggtggcacacactgtaatcccagctactagagaggctgaggcaggagaatcacttgaaaccaggaggtagagggcagtgagctaagatcacatccactgaactccagcctgggcaacaagagtgaaactccatctcaaaaaaaaaaaaacaaaacaaagctaaaatgaggccaggccagtggctcacgcctgtaatcccaaaactctgggagccctaagagggcgaatcacttgaggccaggagttcaagatcagcctggccaacacggagaaaccctgtctctactaaaaatacaaaaaattagccggacgcagtggtgcatgcctgtagttccagctactggggtggctgaggcatgagaatcgcttgagccctggaggcagaggttgtagtgcaccaagatcgcactactgcacttctgcactccagcctgggtgctgggtgatgggagtgaaaccctgtcaaaaaacaacaacaaaaaaaaacaaaaaaaactaaaatggagattttattgagggaaaatccatttacaggctaggagaatcatttgtgtataaaaaggaaaggcacagattttttttaaaaaagagagactaaaattgttagtagctcctcttgattaaaacagtggacttccaacttcctctctaccctcaatgtcagaaaatctatggaaaatatggcttaagaatattatcatcacttgagaataaagaaacagagggatttaccctccatcttcatattccattgactagaaaacttccccttggctcaaacatgtcatcagatcagaccctgtgctatgattctgctcctaggacgccaaactgtggggctttttttgaaaccctcccttagctattctaacttccataacattttcaaaggccatcctcttacctatcttatcaattaataccatagctaacattttagttatctgggattttatttatgtctgctcagattgcaagtttgaatgtttgagactccactttccttgcaggattcgggctaatacatgccaaggaggcatagatttctttctgtttaattgtaaggrtggaagtgaaaagcaaagaaagtttttgtcagttggtggtagttgatttttggtttattttaaaaagctgtctgcagttttcttgatcatttaagaaatttgttgacatggcacttttaatagattatcctgcttttaaagaatgctggcatgggtaatgacctcactggtgggcacagaacaataataaagatagaatttttttttttgtattttcagaaatttaaagttatgaaacatttttagactatccagtggcaatgtgcatttccagtatacttttgtatgatggtgagaagctagggaccttctaatgggtcactaatgaaatggactccaactcccactctggatctctcactcataatccacaaggattaatttaacctgccagatgctacccatttagcaagctgaaaggacacagtgccccccaatgcctgtagccttgtctgctgttattgctattgctggctccattctataagtgagtcagatgatttagatacatatatgtttactaatgcaatgggtagtttttcttggccaggctcagtatattatttgtgttcttgtcagggagagctaccagtgaattttttcctgctgtattttaacactcaggaactggttgtgcaaagtttatttgcatctttcttgtgcattgcatgggagtgtccttgagaatatcttgtaaacatttgctagtattgttttttaaatatttaaaaatcagtatcatttaatttcagagaatttgcttcaacttactggaattaattaaaaatgcttttgtatttatattttttcttttacatatttaaagtattaagataaagtcattgtctaatgytgtctgccatagtaaaatttgcaaactgagaaaggtcacatactgcttttcaagactctttagggcctttaatacagtgctaaaatagaagaactttgtcaaaaataaacaaaagtatgaactccttggtaggagtagattctctttgttttaaaaaagttaaatacattgggttaaaatgagcaaaatatgagctccttttcgtaaagttaataaaggaggaatagagattaggaaaaattcagaaatttccaatcactgcttttcaaatctaatcacatgatccaggacttcatttcccagaaaactctgcatctgcccgagggaacattagttatgagacagtgcagagatttctaaggcccatttcttcacttaaagtttatgtgctctcaaagcttcctgtggtaccaggatagagcattaaatagcgttattctctttgagttatagctgtttyttatttttgtgttgttagatccaatgtagcatggtaataaaacatatttgaagcatcccttcctgcatacacagcgctcttacctgtgttctcrtatgacactcaccctgaggaaggtcttattgtatccccattttcagatatgaaactgagattcgggaaagataaccgatttgtccaagtcctttacctactaaatgtcaagacatagaatcaaatcttgttctctttgctcaaaagttgagcaaagttgttctctttgctcaaaagttgagttaaaaataaaagttaaagggaaatccacaatttattatattctcgtataacttgttaacaaaacatatcatcacagaattttaaagctagaaatcagcgaagtcttgtttttcagacctcagtttagatatcacctcttagaaagaccttcttttattaccctaattcagctgcttgttggttttgcaatttactatcacaatttatggtttttggttttgatcatggaacttggtttttactgatatctttcattagactgtaaagttactgaagacatgaattgtgtctaccatgttcactagtgaagccccagcagttacactagctgtagacacatggtaggcattagaataaatattttttgatcaattgcatgaggttcagaaacttaatctaatttgtccaagaccaagtatttgttagtgataaatccattagaaccctggaatcctgtttcctgttgtgcggcaatggctacatgtaggggcctgccatgcctaattccagctttctaattgttaggttgcatgagaaaccctcatctggttcccaatgacccccaaagtaccctgaaaaaagggaaagcttattcctacccttctctttcatccagagtcagataacaaagaacaaagttgtcagggaccagtgctttcttcctgtgagcagaaatgtgaagcatggttttggttggggtttttgtttgttcggttggcttttggttcagttttgcaatatttggcttactattctctcaaaaagtctgcatcctgtggacaagaatctaagccctttggagactagcaatggctattccacactctctggggagcctatttatgagcacatgtgtttgtaattcagccactctccatatctgttggagaatagcagcctaattatctgccatcatttggttatgtttttcattcctggcatattggtgacactcctctcacctgagccacatattcaattaattcatatgtgttaccacattgatcttaactgtgaaaatctgagcaaaatgcatacttggtgcagttatcctcatgtcaggtagtctgtggtcagtcacagcttttagtcaatagataaaaagttgtaaagtgtcttaatttgagaaaattggctaaaccaaagaagcatgaatggatagttaccaacagctggatttctccaaatagactctttttttacggtttaacttaagcataagaccattttgagttatggtgcttttcatttgacttgcttcatctatctttctggcaattcttgtttacgctccttagactggtgaataatctaaatgtcaaccagagagtctgaacttctatgagtaactcatgtgtcacataatctatgtgacatagtagtgcatcacacctgcagcagcatgctatgggaattctgtaattaattatatatgctgctgtcaacaatgaaaagaaggtgttcaagtatcaaagaaccaactgaaacttccacccaaaagcaaagccaaagtgagaaaggtaccatgagctcagattattttgaaatttacagataaaacctagcttcaagtacaaatcctgtggaagaaagagcacacacttggtctcagacaccttggcagccacttcacatatgttattcctaatcttcccatttcaaagatagaaaattctagtctctaagagactcaatgacttgctaagtttctcagactaagttacagtacatattttatttccagactcagttgaattctcagatgctcctatgtcatattttatttccggactcagttgaatcctcagatgctcctatatcatgctgttatgacgttgggttagctgaggtcactggtaaggcaaacctgcaaccagcactccctctacttcatgtttgcagtagaagctgcctctataaaccttccgtgaacctaacaaacctatgcatcttgaggtgcattgttgttcaaagcatctctccatctcttctaaattatgatagctaataatggaaaacacaaaatacataacaagcccaactaccttttttaataggataaaattgcataagaaatagctgtctatgaaatttatgtctattttatgttatgaaactattttcatcttttatagttttagttaatagtttatgtgtgcaaacctccaacctgttacaaattttcctcaatttgccggtgcatactctagcttagggattactgaaatatcaaaacagataataatatatatgctttcagggaaggaaaggatagatctatgtagtccaaagctttcttttatttttttgataggccctagagttgatcttgaaaattgccagattaataggctgtcccagccctgagaaatcgctaatctagaagtggcaattcccaaggcaggttttgaagcattccattgtcttttacctcaagggatgtatgaaagtcactagctgaaatcaatacaattaataataaatacaatgtattctacatggtatttttaaggggtagagtaataatctcaaaaacaagctatgatagatttttgtagctgcaaaaaatattagaaacttcaataaggcaggatttaaaacaacctaagaggtactatagactgaaaatggaattaacttcttaaagagaatcatgaccaatacgtaagggttatgaaaagaaagtataatatttgagtggtagtttccctgttctgtgtaactactttcatgtcagatatgaaggtcctaaaacataggtgttatttttcactagtcaggaaaggacactagactggatggtctgtgggtctgatccacagtaagtgttctgattgctgaaaaatactataagttgtagagcttctagctgcgaaatgtttcaaaataaacctttgtcatctactttggaatcatattaatgccctgtggccttagaattgactctagaagctttcagttaaatattagccgttatacctgtacagaaaaagttgtagaaaggcttaaaaggaaaaacaaaagagtgactgaataatgtaccttgattccttgatttttctcagttactatgatgatttttgtcatctgttgaaaaaggtttctgctaaatttaattatcagatcatcatctcaaatcttcaaagttcctttttttgtctttctctattaacagacaaattaaaagggaaggatcaagtatatgaaatgaaattgtgatgctccaggaacagttttaggtcttacgtttctcattggaagaaaagtcctctgtcaaaaagaaaattttgaaaagtttaaattatctaaaaatatacagtgcccctaaacttaacatatataatgagtgtatggcctggaaatccaatctcttcataggctatttgcacatgcaatatcaggaccatacttacagttaaaaaaaaaaaaagataaagaaaattcttctttatctgaaattcaaatttaactaggtgccccgaatttttatttgctaaatctggcaaccttatatatgtggaaacataatatagtttataaatattatatatatagtttaaaatgcatagtgaatgtatcagtctttaggtataaatagttacagtatcttttgtccatttgattacatcactgcagcaactttcagagttgagagaatgttggatcatgagaaattgctataaacattcttatgggaatcactttgggtctaggaaacgtcaattttttagtgttccaataatgtgtgttatatcatctcttgagaagttttcagaaattctgagaaaaatggacagcagaaaagggttagatagataggaagaaatatgtaataatttggggagctgttcaagccctaatctcatttaggagattagttatagagcagctayattcaaatttgtttgatcttttgatatttttcaattctgtatgaaggcattaatggtttttccctgctttgccttttaatatgtcacttgagcagagacttgtcctctaactagcaagtagaattgattctattgttgcttcatcataatttttgatgcagaataatggtagatatattcatgcttgtttttcgttgtatacttacctattgattactacgttgctgagcagttaagacaagaakcactcaattctaacatgtttagaagagtttctttctgatttggcacatggacagtgagaatgatctcactgtgtttgttccctggcacaccaaaggtttgctgcagatgttagtacagcagaacttgtttgctaagatgacccattatggaacactagctgattaagcagacgttaatggacaattgcatgtccattattacttctttgaccatgttaccaactcaattcaattgcacttgcttttcaaataagacaaacctgtcaataaagaaactggacatcaagtttcaaatgattggtagagtttatagggaaacacaaaaaggagggaagagatgagatgcacattgtcaaataatctgaaatgttaagaattgtggaaattgttagtttcataaggagttttagacaagcacactatatccctcattctgtttatttctttttcatttaaaacttagatttgctttacttctttgggtcttcatttcttcccatgcaaaattcctgaaagtcaaaaggaagattagaagctagccattttaccactaaagaaactgagccccaagaagttaattcagcttacccaagattacatatttgcttagggccagagctaagacagggacagactctgtttacttcatttctcactaaactgtaccactgcagtttcgacttctttctaccactgaaggcacagaatgcactgaaggcattctgtgccttcaggaggaattttcagccccttcactttcctgatgcccgggaattctttttaagttatgactaacaaagtataaaacatgagtcaaaagttagtccctaataaagtcattgtgactttaatgacttcggcagttgtttcattctgcaaaaacaggaagatcccacacaataaggcgcctgtctcacagctgggctcctgcgtagacggccacccacaagagtaactaactgctggggctgccttcctctctttgacacctttttattctctgttcttacagttttctcctactgacctcatcctgaggttatccatgagaggaaggtacctgctttagctagtctttgatagggtgaagaatagttttaatcacttaggagtcactcctaagtgattttcaggtcaccctcaacaggcctaaattagtcttagaagaagctctttcatgggctttatactagcttcctgtgttatcactattctggactgttttattctcaaaaacataaaatccccaaattttagatttgagaagagcctgcgatcattccagttcactcctcctatgtgattagtttaactaagaactcattaccaagatagtgcctatcttgcctgcggatctttgcataaagctcaaactaattctcccatgagaaatatagaaaagtgaagaagtgtcctatcacttcagaagaaactggctcagaagaaataatctctgtatgcagtgttaaaactaaagaaaaattgaagccatcaaacaaaatgttcctatcaagtgtaattgaattttagcttttattacctattctctacttttaaaataacttttcactattaaaggaacttattccaaaaatcagacaattttatagaaaaggtatattctaggccaataatattaaatcacatatctagaaaatataccttcttcccttttcaaaaaatagaagcaatttctagcagtgtatgtgaatctaatgttgggcataagcttaagaaggcatcgraggaattttttattagagtttattcacaaattttgcttgtctgtgttgaaaaggggcattggccatttcctctggggacattatttctaggtaggctgtaacagggttttcctgtgaaggcagattcttagggaaaatagtatctgtgtacatgagatggtagagacacatttatctttaaaataatgtgttcctgtttgtggatttctctactgaatttaataaagtaaataatgcccatttccttccaatccagtaactccttgggacacagttttacccaggagctattttaccttcgagtctggatgaaacgtgtaacttaataaatagattccaaaagtcttacactatgaaactctgagggatgataaatgcttcccttcctttgttatggtctgaagcattttcaatttgagttgttttcctcagtcatgtagagggagttttgttttctgggaagtcttggttgctggtaaataatgtgtccaaactgtaggaggcagccacagaatttatcatacaagtatgaaatgttagggttgatcattctcattttacacatgagaggtgatgtaactacacaggagagtgagagctgagaatgaaaagtcaagatttgtctactacattgtggctgcctctggctcaacagaaacactcccatgtgggagtcagatgctgaaagcccaactaagcctagctcctcaactgtctcctcaggcttaacttcaaacataattcatatctattctatttcttaatgtgtctcatcacacagttaaacactagtcatactaactggactctacatatactagaatgtaaaagatacccttccaccccccgccgtctgctccttgaaggccatgtctgcctttcttagtttgtacagagcccaacataaatgggcccttcataagtgctttttgatgagagcaatgattgctttcacatcagtgtggttgggccctcccttatggaggaggaaaaccaacagttgttgctaagcaacatttaaaggactaggttagtttctgacactaagtgacctccatttgcatacttcgccatgttgtgtgttttatggttgccttaagatgactatgttttttggtarcattgctgtgcccttagcaaaaggctcataggagaattagtttaagcctgggaaggaggaaggtgatattcatctgttaatgacttgcatgagtacactgatcccttcagtaaactatgcgggaaaggtgaggagtttggtttattttcagccctgcagctgagagccacctccctgattccatattgaaagtgattgacaatgtatcccaacagggtcctgtggcaatggaagactatagaaagaaaataaacagagaaatctttcctcttatagccttttatgattcagtttctacctgctcctatcttctgagcagagttgccgatatagctagtaaagaactggtcctaccctctctagactgtttgctgttgtggttaaacaacatgccctaatatatctattcctactagaatgaaagctgattaaaagcatgaaaagagtttttgtttgttcctttgtttttttttcactgctatatcatcactcttttccctggtcattttaggtattcaataaatggttggcaaatacgtgaaaaaagggcattattgaactactacaaacctgattgactctaaaacattcctaagtatttcagagagactaaaggagccaaaatgagacaattgtttgaatgttatatttgcctaagtctagtgcagagaaaattatggaagaaatcatctgtctctaagctttttacaacatatttttacaatgatccaattaaagttcacttctttgccaaaattcagcttatcggtcagagcatataaacttgttttcttcagcttctgagtcttcagcctaggtgcctgtcttttgaggatttaaaatgagaggccattgtgactgagcagttgtgtctttaaaacgaaataatttggaattcatgtgattcacctgggattcaaaattgcacagaggttcaataagtaaaatatgctagctgagatgattkattcagagatgcctggttacaaacatattgtatcatgggaaacacacacacatacgcaagcagggttacccagaaggaggatgattggacatctttgagaacaatgcctggtgcagtgagccagcaggcagaaatactggcttgcattggcttcacctccaaaagccaggtctcctaggcacaggcgatggcatgactccgggcttggatgcttgaaataaagctattgttggatgcggatgctcatttgaaaggggaatgcctcacaggaaaaagagccaattgcaagttggggctgttgccatggtgctttgctattccttcaacttgctatagatgaaataaatcctgggagtacaggggtagggtaacagaggggaaagatgaggagggaaatggggtgaacctggggcggggaatcccactgcagtaaagctctagtgtttccccttgcctgtgctttaacgctgacaaggagaagggaggggctgggaagaagggagagagaaacctgcagggaaggaatgactttctcaacatgccctggattgctaaaataaaataaaaattaatttaaatcctcagatttctaatgtgagttagaagatgtaacactaaatctcaaacaattcaccattctttcagtaaatgaatgttcatatttcctaacacactctggatcctagatggaaaggttaaaagagtttaatacatttgtcraatgcaatctaatatgcatattaatgagctgatggagggcagaaacttacatgctgcataggaagtacttttcaaataaaataaattaattccattcccattcattttactatgaaaagaggctaaatgcactggcacacgcttggtgtgtgcgacaaataatcctccaaaaagctagttcacaaaaattcttgtgtactggcagcctagtctaaaaacagccatggtcctaaccttttttaaatgtttgyttaaatgttcagaaaatcgattaatcaaatgcatcatcactttgatcaattagagcggctggatttttgtgcagaggctgcatctgcagaattctggtctgcagtggagagagagggttaaggaacacctagttgaaatgggggagggtactgacttcagatttacttaaatattcatggggcttcctccattttaatcttctcctttttaaaagatggctgtgtttcctagtctggcaactcctcaggaaagaagaatttcttcttccttgcagagttcagctgagtaggactaatgtagaagagtggaaaccccttcggccaccagggctattcataattcataagtgcttcaaaccagccagctgaatacatttggacaggctcttgctcyttcgtgcaattcctgatttcattactctcttctgccaggaaataagcagggagcataggcttcttgcaagaatggagtgcgaagatgggctttgtttggcttaggaaatgccatacattttggaggtttttgtcttttctaagttttgattattttatcactgaatctgcagggctttcctgatcctttcgggattgctctctcagaactgtgaattctttcaaagggatttgtggattgtggcaaggagagcattccaaaatgcctgaggcaaattatttgttatctgtatcttggggttacatcaaggtgggttaatttgattgtgttctgtgtctttgataaaatgtgaaacgtacctctgtgtgtttttttgtgaagtacaggacatctgtaataatttgatttgtgtgttcatttaacccactgggacctcttattttgaaataagagcatgttatattacattttatttaagtgtactatgctgtgttttaatcctgttctttttactgaattctgttttttaaaagatgcttctttttttttctttttcccttgaacttttcacatataatctcctctcaccaaataggttattaaattatattttagaggtaatttcagacaaatgtatttttaaaagtaggtacagtttcaagtggaattatcttgacctctattaaaattccttttcctatgtttgcatcttcaaaagtaatcagatgttaattctaagaaatcttaagaaaacctcttttccaaaagtgacgttggaataatttcaaattgaagagatatattttgtagaaacagtattatttatctaatggtatctgctcatccaacctcttgattcctggacagtaaagttggaaacatttaaaatgaacatttgctctttttaaagtggttaatgcatttttgttctttataaacagttcaaaagaatgctgaaccgggagctgacacacctctcagagatgagccgatcagggaaccaggtgtctgaatacatttcaaatactttcttaggtaagatattaactgggaaaaacctgttttataactggggttttcagaattaatttctacaacctatcaaggacatcctcatgtgaatttgggatggagttgagtcatagaaaaatccatttaaaataataactaaggccagtcttcaaaagaaaaaaaaataagcaggaagatcatgtttttgaaaaaaaagaattaaaatacccatccaagacagagggttattatgggctaattgtatttaaacggccctcagccccaccttgtctgcctgcctacttccatctttgctaagacctctgaagtaatgagggaaatccaatcacccaagccctagaggcagctccattagcttctctgacatggtagcctttcacttcctccaataactgagctttgagcaaaaggtttcctctatgatgttttgtaggggatatggttgaggaataattctatagtgatttggtccttgagaataagctttggaaataatttgactattgctttgctaagttatttattaaagaaaaatggatggtaagggggagaattttaatattatctgaaggatttcatcttctgcaagcagcctcgttctcttcccaatctgatgctttatctattattctctgttgttacattactggtatttaacacatgatttgctgaccaaaaagattgcatgaatggtcctcaactattgtcatgcgtgttatttgattatttgggatttttgaattcagtcttaaaggcacttttgtctaacgaacctatttggactattttgatttaagaagtcctacagaatctgcaaatctgtacatcaaagtaaatggatagcatttagattctgattttgttgactttatattgctactgaattacgcttgcttatgaaacctcactttccagggaagcgacccattctcacagctgaacactgcatcctctcttctttttggaatagccatatggcattaaatcaatgagcattttccttgatgccttactgaaacaaataccttttctggttttatttctaaaatcaatcctatttctctaacaccaaagcagttcttgctatcagcagatcaatcagccctctctttgagcagcctcatacagagcttactgcattactctgcagtggatggtcaccagacgtgattaacaagtgcctttctaacagtttctagtatgtgagtgtctgcagcacttgattttctccagctgcagttgcaacgcctttgtcagagaacaaaggagaagaattttcatccatcctagctcccagaggtgcctggaatctaactttacagaaagcattaaatactgatccttttcttctccttttatccatttgaagacagggatcttctgctgagcatttcagatataccctgctctgtgtaatgcccaacgatttttcattagctgggagctgttttagggacattttacaggttaatgactgtgggagaggagaataaaatcaaaactgcaagaacccatttttgtcttcataagcattgcattttaaaatacgagggcttgaagacttctcagaagagacactcactactggagttaaagttatatgaagtccctgagcccttaatcatccaagactggacctaagcagtcctcttcgtttgtagtctctttcaatatctgcttatcaaggacaacgagaatatcttagtctactaattaatcttttttatcaccatagtctaccaagaaagaaagctgataagataataaagatgattcattcctcagagtaggaaaaaataaaaagaaaaatttaaaaagatgctaaatatgagckctgagtctcaacactgtctcaagatgaggcagatgtcaactttcttgcctattctgcttgctatttaggcatatctcttgagcaaaaccagtcatttgtcttctcattgttccaaaaattaaattcaagaacaaattgttgaggaaggttattagaatctcaatccttatagactcttagcattaagagggtggtgtgtgtcagtgggtgtatgtgtttgagggtggatgtggtaaaccccatcaaacagactagacgggcagattagaattttaaatgttcttgagaaaatataggaagaaaaaaacctgtaatattaacaaaagatgcatcagttgcctcacttgtaaaatgggaacactggtatagatgacatctcaaatcccttccaactctaacttactataactctgatatgaactgagtttatcagttttgctaagacatacctggccatctagattctctgtggtgaaccctaggcttgtaatctgacaatctcaaaaaacaaataaacgaagtttgtttccagactgccagtgaagggcatggaactcttagtcttatcctgtgagcatgatgaatgttcctggaagaccataaagccttcttcataaactttctgatctgcatgggaccataaaaccttgtagtccaattccctcattttataggagagaaaacaggggacccagagggatgaggtaacttgaccaagatcgcttggctaatactttcctcagccagaactaggacttggctttcttggcatctagacctaaataccctgtcaatcctttaacgaggaaagaaggctgttaggaacgcagaacatatagaagaaaatcacataaggactcttaactgatacatatatcattttggaaacaagtctttaggaatcaggattgttggagctaaaaataaaatgtttattaacaggccgggcgtggcagctcatgcctgtaatcccagcacgttcagaggccgagatgggcagatcacctgaggtcaggagttcgagaccagcctggtcaacatggtgaaaccctgtctctactaaaaatacaaaaatagctgggcatggtggtacatgcctgtggtcccagctactggggaggctgaggcaggagaatcacttgaatccaggagatggaggttgcagtgagccaagatcacaccattgcactccagcctgggcgagaagagcaaaactctgtctcaaaaaaaaaaaaaaaaaaagtattaacagtttctaataatataaaaggttcctgtaagaccatggcaaccacctcagtgagcacaaaataagaagatcttagcaatttaccttaaacttgaagagcaatatttcaataaaagccattaaatgttaaaaatgtgtcatccagggaggagggaaatcccttaatccagagataggtgaaacttgtgtcattcctatcttttaaaaaaaagtggtgcaggaggacagggagaaaggcaggcagtagactatatttaccagtccaggcactcattgatgctgtcacataatgggctccaggttgctggtgcaaggggaaataraagtgtctaatttcaagggaaacaaagcaggacctagggagaaggagaataaataatgcaagatttttacatgttatattacaatttagttaatattttcatgaacagagaaaagttatccttttaaatcctctacttaccctctcaaaacctasaacttagaattttcaagatgcaaggaaaagagcttaggaattttgcataattgaaaagtgtgatctagcaagacatgagcctcaaattatgccattaacagaatttggatgagactacttttttatccgctttttgtttgttttatacaggccaactgtttgctcactgtattctgactattccataaatgtaaattcactcagtgtttattgtgatttttttgagtctgagtttctgattatttccacactgtgctggctaagcatttaatagaggaaattcagaatagggaaacctattagttgttccaatgcctgcatagggaaacacccattaatgtcaaattggcactatttgtgaataatggtcttcttcattattgcagtgttccagacacagtagtggttcagctcaattactcactgttgcagggaatctttaattaaacaaagggaaaaggctgctggtcctactagaaatggttatatgtgcagtgacacaggagaatctaagagcctctttaaccggaggtgaagaatggtggtaaaaaggcaggccctatggtagcctttcattttagcaaaaagtagtagttattaggagtaaagtgacagggagaaaagtaatttcaaactaatataatatataggttttatgccagagattgtgtggcaggaaaaagatttttgacaggaacctcaaggcctgggttctatgctactaaatcactgtgtctggagcaaagtaattgcaaaataaatatctgttaaataaattgccctctgagcttgggcaagttgctgacttcatctgaaaaatgagagtgtgggattgttattggttcttaaacctggctctgattatccaagtcacttgggaatcttttaaaaaaaatactgattcagtaggattgggtggggcttattcagaaaaatctgtatttttctgaagtttcctgggtgcttctgatgctggactaggttggaaacccctaaactaattgagatgaccactaaaattccttcctaagcaaaagtcataggcttgtgagtgtaggagcttgtggacacctagagacaatattgatatgttagggatggataattcccttgcttcagtcccacagagagcaggtgaggtataccacgaagccagtactgtctcactgtgcttgctttgctctgatgaagtgtccacaggggcctatgagcagccagaggtctctggggaaaacatgtgactgtgccattatctgcaagagtcaaaacaaatcgtctagatcccagaatgccatctgggagcatgtcattttcaaatggcaaagttgtcttcctactaattttcactgtaaccagcggaggtaaatgtaggtacttttgaaagctgcattaactctttcagccacagggtgtcatttagttcaataaagtagtttttatgcaatttaataattgcctctgtgcacccaccagcatccctgtggcctgaaagagttaatgcatttttttcagaagtactgaagatacatctccctgtgaagtgaaatggaatatttgatggctgatatttttaatagcacaatgtaaaggaaagagcttctataagcaggtaggcactttttttttcactaatcctagctctgctgttaccttgttgtaacataattttaaaaaatattatgaagtatcataaatatttaataaccttaaacatgttaataagtgtaatgcttattacaaacaagaggccttattgttattatttattggtagaattaatagactccaggcatgaaataaaaccaaaattatagtcttcctctaaacctcaaatggtaataaaccaagcccttaaagtaattgtttgaggattatgaaccatttatatttctaacatatatactgcttatttaaactgagcccttgctaaagccatatggatttttaaattttttttaagtaaaaataagatgagcagatcatgaagcctgtttttattaatctgatggacattttattatacaaaaatatgttaatccctttatttaaaaatctacatataagtattagtgccccacattgcaaatgtataagtgtgtactccttatacactccttatatacccctaaattacactgaaaacagaagatttggtcttgggtcctatttttgctgctttctggacaagttacttcgttcctctgggccttaatttgcctagcaataacatggaacaacaaatcttatttttctcaacaaattttatattttccccacttactttatagaactgccctagagatacagtgaaatagtgctacaagattttattttataagattctaaagctgttatagatggttagagttgttttgaatattgcagtggattctcatagacacatgtgctgaaaaacatattcctttgtctgttgcagacaagcagaatgatgtggagatcccatctcctacccagaaagacagggagaaaaagaaaaagcagcagctcatgacccagataagtggagtgaagaaattaatgcatagttcaagcctaaacaatacaagcatctcacgctttggagtcaacactgaaaatgaagatcacctggccaaggtgtgtataagctcaggtttygtgcatgtagctctctgctttacagcagacggatgaccgtataccttttagaaaatagtatggattgcttttgcattattattacattttgtgttagggaagctcatatgaaatgactttactgtgagcagtaaggccttctgaaagctgtcatttgaggaaggttgattgaacatgagaccaagtcttgggggatagcctggatctcttatgctgggtagccattaagaatgccattgttggggcatctgatggaagatcctttttccataccaaagaaccacttttttttgttttgtcctgagttaggtttttatggacagttcattatgaatgaagaatccttctgaagagacatggggaaaatccaaggaaaggtcaataggcaggtctgaattatcccagaggacatttcagggactgtatgccaaggaccaatgggaaaatctgcactaatctgtagtgctggaaaagaaataaagagaaactgacagcactgactctggagcccaaactccagtagtggagggaggcatagaaagaattcatacatcctttaggaggccacacaaagtgactgctgaggtcctctcagccttgtgagaatatgaaatgagcttactgtgagcagtaagaccttctgaaagctgtcattagaggaaggttgattaaacattaggccaagtcgtggtggagagcctggatctcttactctggatagttactaagaatgaaataaattggtccttaaatcagataaccttggaataatctcacaacacaggcctgagtgatgtttcttccaggtccgtctgtggcccaggagccctaggatgtaattcatgactggcattcttcatgaccttttacattcaattgggttgacttatgcacattctgatagctgagtcttcctgatctggccttcagtgatgataaccaaagggcagaggagttttccctgagactgttttccagctgtcactaatgggccagtaagcagcaaggggagagacagggacattgaactagagtgatctctattcacttgtggccacctttgaaagcaacattggttgaagactgatgcatgtccaatataggtcagcaactaaatttataaatagatactttcccttttcagaataaaaaatgttcagaaacttgtagctatcatgaagagkacacccgacctcctaggycatttaactttcagattttcacrcaactaaagcactctaaggagacactctaaagacttaaacagccaatgtccaaaaaataaattaaaaaaatgaggcatgttagcacaactttccttattcctaaattcctttaaatttttaattataggagctggaagacctgaacaaatggggtcttaacatctttaatgtggctggatattctcacaatagacccctaacatgcatcatgtatgctatattccaggtgagtgaacaggagtgaatactggctttccaattggatggctctttatgattttttttttccatcttacttttctgatttaactttcctcgacttttggacatctacttatttatgttctaatccattttacaacayaggaaagagacctcctaaagacattcagaatctcatctgacacatttataacctacatgatgactttagaagaccattaccattctgacgtggcatatcacaacagcctgcacgctgctgatgtagcccagtcgacccatgttctcctttctacaccagcattagacgtgagtarttatgacytgttttgcattcctgcccatcctccttcaaaaatgccatatcagctggatgtagtagcatgtgcctgtagtcctagctactcgggaggctgagttgggaggattgcttgagcccaggggttcaaggttacagtgagctatgattgctcccctggactcycgcttgggcaaccctgtctctaaaaaaataaaaataaaaaaaatttaaaaagtgccttacaatatacaatatacttacaaaattaatgtaattagaccaccctgcatacttgaacaggttctttataaaatgtatcacatccattaactgagctatttataaaaaatgaatgacatttctacttgttttgctttctaatatcagagtaaccttccctttacatctcttactattaaaagtatttaactgtaaagcaattaacagaatttcagggcaggaatcatgtcttattcttcattgtatttctactaagggatgcagtgtatctcaaaatrtcttgttcagtgtccggtaaatagtatattctcaatatgcaattacttatctgaactgcccaatgccaccctaggtatatatagagcactatattccaagggggatatcacagaaatataaaatactctctatatttcttattagtaataagcatccagaggcttagtctcctaaaaaattataaaactgatgcaatgtgttgaagaagtagtaactaaaaatctagaacagaagaattaatgatgctgaaacaaggagaaacaatattcatatttgccataccaactctgagaaggtggccgtggctcccttccttcatagattaatgcatttgtgtatacygatatcatcaacaatgtgtacagcaggtcatactcttacttgacaaatgaaaatgatggtcaagtactcccaaaatgtgctggaccactgcaggaagagactggccatgccctgtccagcctcacctttacagattcagtttggaaggtgaaaaaagattggccacaacttttttgtggcaactctattgcttgtgttgcatattttctaagaaaagaaatccaagaaatcttgagaaagtgagatggagctaagggtgtttgatccctctgaaggagagaaagagtactgtttttataccctgtgtaagtatcatagagtgaggcaacactatctatcaactgctcactgttattaatagtatacctgctgtgtggccagaaattgacaatgatgagtgctgcaaactttttagaaaagggagagctcaatgagtgcttgggtaatgtgattggtctttataggagaggtggaaacccacctcargctggcatttgaaggaccagaagatttaactaatcacagaggatgaggaaagacatttcagctctagaatgagcaccagtatataccttattaatactaggtttgaatcattgtgcatgggtgggggcagagaagcattcatgacatgacatgaaggaattcagcagtggggcctcaggtttcacttcttagaaaggttctcaaatcttcccctagtaagtgattagtgggtacgtactgaatgaatgaataatatctgaaagcttgtgaccacaccataaatttagctttgggaaataatttattgcttatcttatgaatcgggagtttggccatttttctctaagttattcagctaagagtatatgaaggttgttatgtctcagagcagagccagtctgacttgcttctttgacttgtatctgcttgtgttacataagcaccatgctgccacatcactggtccaagaaacaaacattagacgtttacacactccatgagatttrtgctaatatctttccaagcatcagcctttaggcttgatgtgagattgagctctggccatcatccctttcacatcagagactttatgatgatgaacagaatctacatttacttaaattagtatattgagatattacataaatcaacaatccctctccmaacaagaataaagtaggatactttacaaatgaaactgaataagcaggataggcgaattggatgtgkagttaaatgtgtttatttgcccgacaggctgtcttcacagatttggaratcctggctgccatttttgcagctgccatccatgacgttgatcatcctggagtctccaatcagtttctcatcaacacaagtgagttcaccactacagcagtcattccagataattgtatgattcactgcttaatttttttcctcctaatgttttcattatggataatcacaaggataataatgaggcaatccttccatttctctcaaactggtcaggcctttcgtggatactcagtccaatctggcaacacaatgtttgagctgcatggagaacttggagagggtcataggggagccataaaaagtactcaaaatttggcaaatacaatatgtaaggaaagaataatagatatggaattattcataaagaacaataaaaggtttggggatcccatgataatgactttttatattatgcaaaactctcgcacagagcatagtaactcactactgtccctatctgcttgggaagcagccacaaatgttgaatctgcacatgggaacctccaggtaaaaataagatgccataaaaagcactggaatgagtttccacagttcagaaggaaggrtcattaaaagttccatacattttcttccaactgcatagatttgattatggattgggagtagcaatgacctgagtgaccaggggtggtctagccttaggattccaagccatactcaaagcttttgtcatgcttaaaatgtttagttttcatacctttgaaaatccattcattttctcaaataatgtactatctctaagtgctggaaatctaagtactttgagaatattggttattgtagtcatgaataacatcaagtactgacagttttctagaaatgctttttgagctacttgctgtaaaagagtcctgatcatcagtccttgacctttatccaaagaatatctgaatgacctaggtttggagtacactgggtccttttacttcattcttctgttgaacaaacaaaatgttggggcagctacatgtctgcatggattgtatcagttggtagaatgtggtgtcatgaatcatatataggccagttagcctcacacagaaaaatggtctatctaccacagtcacctatagcactgcaacatataaagcctgcttgtagatctgtggccttgatcacaggatgaacaaaacaagagtactcattggaggttgtaactaagagcacactgttaaagcaatgatatatgtgtaacagaacctgtaattaagtaacacattaccaccacttgtctggtattcttgattaagagaaaatgtggtttcataagtctgatgaccatattctcaagcagacttctgtctaacaaaagatgcctgtgattcttctatataaaaggcaggctggaagctgcagcttaggtttccagatattgcaatttctggtggagagagccaaaagacagaaaatttgacatcagaattgttcccaaaaagtagtaatgtttagtatcatattaatagaaagctctaaaaagtgacagtatttgggtaaaatgaagttttacatcaagcattatctttaaccatccaaaattcacaattgccggagattagggagaatgtaaaatgtgaatatagcttgaaagtctcaatacaattcataaagtttagtggtactttcatgttgttcttttccaaagtacaaaatttttgaagatacataaaaataggatttagctgctcaggaatgcccttacctaatattaaattcttcatctgagatatagaaggagtaaaaggattttaaaatacaatgaattttaatcacagggaaagcttatacaccagtagaagcattttttgcttagaaactgatgacttctgtttgtagagggccactgcttctctaagaggaaatgacatgtagctggtggttcttgaaataatttggagagaactaggtctgatttcactttgagataatgccaacattcaaatcatatccctttttaattaagtcatcatttggtctgatttattagattcagaacttgctttgatgtataatgatgaatctgtgttggaaaatcatcaccttgctgtgggtttcaaactgctgcaagaagaacactgtgacatcttcatgaatctcaccaagaagcagcgtcagacactcaggaagatggttattgacatggtaagactttagcctctctacattcctcacttactgccattctctctgatagactgaatttattaagagttttcattttctttttacccaaggtgttagcaactgatatgtctaaacatatgagcctgctggcagacctgaagacaatggtagaaacgaagaaagttacaagttcaggcgttcttctcctagacaactataccgatcgcattcaggtatttgaggaaagtctttgatttaacacaaaaccaaaccaaactaagctgaacaacaattagaaaaagaaaacaaagataaattcagttattggtatatcctargctactcctatagcttagggcttattttaagaacaagctaaggaaaatggacattcaagtttatcttctaatttatgaggaaaaataatytctatttgtggaactgcttattagttatataaataaatcgcaaaatctatttgtaatagggcatacgtgactgttggttccaaaagcttgtgtttggatttaaatcccattgacttgaagtttgttaggtctgttttggatatacaaattgccatcagctgttctcctctttccacaagtggaaaatatgaagttatctactttgagtaattctttgcattctttccaaactgagaaaaggaaatgatagcagcatctgacctctaatgttccttccaatttttaaattcaatgactgtcggtctaagaagacacacgttttcccctttgggactctataaaagtaaataactgacccaggctagcatcattgtaattccattttttttcggtgcatatgtcataattataatgcaactaaaatgttctcgggtttagtacmaagcgtactagtatgagaggcatgagatgttccggcagtatttacacctaattttatgagatttccaaaacttgatgatttcaggtccttcgcaacatggtmcactgtgcagacctgagcaaccccaccaagtccttggaattgtatcggcaatggacagaccgcatcatggaggaatttttccagcagggagacaaagagcgggagaggggaatggaaattagcccaatgtgtgataaacacacagcttctgtggaaaaatcccaggtatctaatatgagattttcaaagtttttgtgagctctgctgattatagagctggagggttctatttaattccgtttttccaatagaatatgtatatatgaaacaataaggagacaactacgcattttgttccattatagtcaggactcatgcgacttctccrttacactcagtttcacagggtggggaaaagtagtcatcagaaacccatcaaaatttggactatgtgtccctaaatcatttagatagttgtctctgatgttagcaaatccagctgaataatatgaacatcagtgtctcctccatcccaaccctctggatttctcctagctctgtcttcattcaagaactctactcctcatccttgcttccagccctctgtttttatcttctgtccttaatcaagcccacggtgaccatcaccagaggcagtctcttttactgcatagtcaaagccctgtcttgtcttccctcccaaggatgcttctatgcttttgagaacatgctgacattttctggttgtgtccaaagcaacacattctgtgtgtgctcaggacaggggacaatagtctggaggggtgaatacagaaatgtccagatgccaatagctgcagaatatgcagcaatggaaagtatcagtatccatacaaagatttttcaagaaaacgaatgggctgagccaagtagctgagattgagaatgagttcatagactgtccaagatctttatcccaaaaacatttggattgtttattttcagtatttatcctctttccctactacctggatactccaaatttgcatatacttgtaatattaatatacagttcctttgcaatatttattttgttgcttcttagagaaacccaactaaatgagtttaaaaaatctgtgaaagggctgggcacagtggctcatgcctgtaatccagcactttgggaggctgaggtggacggatcmcctgaggtcaggagttcaaaaccagcctggccaacatggtgaaaccctgtctctaccaaaaacacacaaaaaattggtcgagcatggtagtgtgtgcctgtagtcccagctactcgggaagctgagacaggaaaattgcttgaacccaggaggcggacgttgcagtgagctgagattgtgccactgcattccagcctgggcaacagagcaagactctatctcaaaaaaaaaaaaaaaaaaaaaaaaaaaagaaagaaatctgtgaaagtgctctgaagtctaatatactgtaaaaatgcaagttaacattgttaatgagggttaattcgaatagcccaaaggcttaagtggaacaagatatgaatcagtaaggaggaataacacccttttattaatagcagtgatgttttatgtttatatgatgttctgtggagcatttcacacattttccatacattatcttacttggatccccaaacagccttgcaagatagataaagtagatatttccccagcatgtcaggtgcaaagctgtcctcttggtccactacagcagctctctcatccaaagctcttcactctccatcttagggacaggtcttcctgttgccatgacatcgttatccactctggtatttcccaccaatgggctctgctgaacactgtctgattggcccagcagtaaagctctttactgggtgctctcaggattcatacagctctctcgtcctgtgatctagggaataaataactagcagctacctttcaaaaacattctcagcatttcttagcagaagcaaaacaagcgaagaaaggaaatgactgcactgtgttcagcttattcaattttctccattaccttgagcttgttattttgggtccctggaaaacaccttgaaaatagtctctaacattcattaagcacacataaagaagtaaaagggagggaaaaggagtgggtggaagtgagagaaatatctgaatcatgtacggttgagtttttgtaaccagtatagatcagagattccctgactttgctgtgaaacttcctttttaaggctaggaaagcaccagaaagaagaagaataagaaaatatatatatatcatacatatatatatacacacatcatacatatatatatatatatayayacacacatcatactatatatatatatatatatatatatatatatatatatatwtaattttatttatgaaagaatcacatatgaccaaagttcttgtgtacagtacaacttggatgtattaaatgactggccaattaccaacatgttaataaaggaaagtttccagtagtgtggaaagagacctatataatgtcccatgggtgggtgccctttgaccatctacccctaaatcccaatgcagcatctctgtagctccccagaccatggcaggggaattcccttccctcattcaactagtgcctgttctttctctctacttgtccccacccccagtgtttcctgtttgtccaacaatgaggaggccagcgtaaggccacactgctagctcatgcaggatgcatagcccctgagtaaaccataacagagccataagcctgrtatttaatcacaggaacatcagcaaaaggaactgcttaattgttttttattttcccttctttcacctgttggaaatgactgcgtgctctgtagatccaaaacaattgcatggatgtccaccgaggggatatgtgtttctttcagggctcaaagtattttcacgtgtttcatcaaactcctctaccagccaaaagcattccacagaacttgagaaattccagagtagtcaggagccagctcctcatcactttggaatagcaacatattttaaagttaacaaggaaaaaatattgagtcaaaacacgttagacctgggcctgccttcttcagaaaatgactcacagaatccaagtagtggcaaagtcattctttgtctttgggtccctggaaatcatgaggattccatccagacttcttatctggcgcacataaaaggaaatgcagtctgttgtagcaagatgaacacgggctttggaatcagatgaagctgggactgagtcccagctccaccagtcactagttatgtgacctctgacaagatatttaatctcaataagtcgtagtttctgcctttgtaaatagtaaacagcaatacttaccttccaggattaagagagaatacatcgattgcattcagtgtaagacccactgtattgtgartgcccaaatcatggaatccattatgattgatctttctgaagttattaatgttctttctttgcatggaaaccaggaaaccttgtttacttttcaagcaccatcacaataacagatgtgtcatcttatttttctccaggttggtttcatcgactacattgtccatccattgtgggagacatgggcagatttggtacagcctgatgctcaggacattctcgataccttagaagataacaggaactggtatcagagcatgatacctcaaagtccctcaccaccactggacgagcagaacagggactgccagggtctgatggagaagtttcagttyraaytgactctcgatgaggaagattctgaaggacctgagaaggagggagagggacacagctatttcwgcagcacaaagacgctttgtgtgattgatccagaaaacagagattccctgggagagactgacatagacattgcaacagaagacaagtcccccgtggatacataatccccctctccctgtggagatgaacattctatccttgatragcatgccagctatgtggtagggccagcccaccatgggggccaagacctgcacaggacaagggccacctggcctttcagttacttgagtttggagtcagaaagcaagaccaggaagcaaatagcagctcaggaaatcccacggttgacttgccttgatggcaagcttggtggagagggctgaagctgttgctgggggccgattctgatcaagacacatggcttgaaaatggaagacacaaaactgagagatcattctgcactaagtttcgggaacttatccccgacagtgactgaactcactgactaataacttcatttatgaatcttctcmcttgtccctttgtctgccaacctgtgtgccttttttgtaaaacattttcatgtctttaaaatgcctgttgaatacctggagtttagtatcaactyctacacagataagctttcaaagttgacaaacttttttgactctttctggaaaagggaaagaaaatagtcttccttctttcttgggcaatatccttcactttactacagttacttttgcaaacagacagaaaggatacacttctaaccacattttacttccttcccctgttgtccagtccaactccacagtcactcttaaaacttctctctgtttgcctgcctccaacagtacttttaactttttgctgtaaacagaataaaattgaacaaattagggggtagaaaggagcagtggtgtcgttcaccgtgagagtctgcatagaactcagcagtgtgccctgctgtgtcttggaccctgccccccacaggagttgtacagtccctggccctgttccctacctcctctcttcaccccgttaggctgttttcaatgtaatgctgccgtccttctcttgcactgccttctgcgctaacacctccattcctgtttataaccgtgtatttattacttartgtatataatgtaatgttttgtaagttattaatttatatatctaacattgcctgccaatggtggtgttaaatttgtgtagaaaactctgcctaagagttacgactttttcttgtaatgttttgtattgtgtattatataacccaaacgtcacttagtagagacatatggcccccttggcagagaggacaggggtgggcttttgttcaaagggtctgccctttccctgcctgagttgctacttctgcacaacccctttatgaaccagttttggaaacaatattctcacattagatactaaatggtttatactgagcttttacttttgtatagcttgataggggcagggggcaatgggatgtagtttttacccaggttctatccaaatctatgtgggcatgagttgggttataactggatcctactatcattgtggctttggttcaaaaggaaacactacatttgctcacagatgattcttctgaatgctcccgaactactgactttgaagaggtagcctcctgcctgccattaagcaggaatgtcatgttccagttcattacaaaagaaaacaataaaacaatgtgaatttttataataaaatgtgaactgatgtagcaaattacgcaaatgtgaagcctcttctgataacacttgttaggcctcttactgatgtcagtttcagtttgtaaaatatgtttcatgctttcagttcagcattgtgactcagtaattacagaaaatggcacaaatgtgcatgaccaatgtatgtctatgaacactgcattgtttcaggtggacattttatcattttcaaatgtttctcacaatgtatgttatagtattattattatatattgtgttcaaatgcattctaaagagacttttatatgaggtgaataaagaaaagcatgattagattagtctgtaggcccacttatttcacaattagttctgacatatgaaaagcagatctttctcttctcttgtgccattccccacaaagaaagccaaccactgtgtccagccaacatcacaactgaagtttcagaatctatgtccaaaaagtcccctagtttggaacatttcgcttttttcttagcaactgttcacccagctcaatgatgcaggaagggggttgaggaaggaaaacaaaacaaaaccactttgctcatctcgaactatttccttctacctctttaagagtctgaagagtttaatctactagataaataagggaatccccaacttggctgagtcctctagaaaagtgaatcatagattatagaacattagtataatgcagtcagagagtcccattgattcatttgacacatgaagaatctgaggtccaaagagtcatcttaaaccacaacccacagagcatgggtggacactcagggttttctcagtgatccatgcagcctcttgttggtcatatggctaggattttctttctggaaagaactttttatatataagaaaaatacttaatgctttgttgaaatcttaaagtcagcattttaaaatattttatcctgagaagagtgtgtgtgtgtgtgtgtgtgtgtgtgtgtttatgtgtgtgtttgttgcagaaggttgcaaacaagaatcggtgttggcccataataatttagccacaagggagtgctctgtgaaccagtaagatggtcttctctaaacacagctgaaattaagatgagccgacatttcagaaccagcttgcctgctagttgcagagctatttccaacattttccatcatctctgatatctgattgtgcctcaccatctctgagagtttgaaaaggagcaaaataaattgcttacaatagccagaggtgtgagttttacaatgcccagagctagaaatatttgcaggtttgttttctactgagaagaggttcttaattaacccttattgcaaataagaatcatgtgggaaatacatatatttaaaaacacttgtttggggcccatcctcctcccagatttctgattgaattgatcttgggcaaagccctgggcatcagattttaaaaatttcccccaggctggagtgcactgacatgatctcggctcactgcaacctctacttcccagattcaagcaattcttgtgcctcagcctcccatatagctgggactacaggtgcatgccaccacacctggctaattttttgtatcttagtagagatggggtttcaccatgttgcccgggctggtctcgaactcctgagctcaggcaatctgcccacttcagcctcccaaagtgctaggattataggcacaaggcactgcacccagtctctccctaggtaatcttaacgtgcaattggagtagagatccaccgctccaaaacagagaatcatgcctgcagctgaggtgttctttcacccccactgtcttcagatattcattgtgaactcatcatggacagcatattatgcccaatatagctattttaaacagtaaattttgttatatcctggttttatcttactggctgacttctaactaacttttaggtaagatgaaactgcacagtttcactagtttcctatacggaaatctcaagaaccaggtcagacctcaggcatccaagctaactagacccttcatgagtgcagaaaccatgcctagtactttctcctcctggcacagcgttcatgctcagacatttgttgcatcaatctggatgttgatgatgtaaaatttcaattaacaggaagatcagaagaatgcacactctaggcaatttaactttcagcttttctcacttaattgcaataatctgttctcagatgtctccccacccagcactgaaccctctccaagacagaacaatgttttttgcctggtctctttttttaacctttgtattcttcaccaacaaacactataccagccctaagcgaaaggagaaccggtgatgtttgttgagctaatgacccaagacacaagtagaaccctttttattgaaattacttgtgaaatatggatctacttgattttcttgccaaaggagtagagtacactggaaaaagcagagtttgacaaacctgtgttccaagtcttttcctgtaccttcctacctgtggggatttgggcaaattgcttaaatttttgagcttaaatgttctcatcattaaatggagctaacaatagacagccaaagatgaaatcaggcatagtgttacatacagtagatgctcaataaatctttgttatctgaatgtatgtactcgtggatgaagggattaattaatatttaaaaacatccaaaaatcacctctaaaagcagaaggcagcaacacattttgattaatttagggttcttgaaatcaagttccagttaatctagatgtttctacataagcttcaagattctgggaggataaatgctctcactttaacccatcatatgggactatgctgacactgataggctcattgagttggaaggaaacatgtaaatcatattattcatcctcttcaatgctatagaatccctccaaaaatatgcctgtttgaaagcatcaggtaatagataactcagcaaggcccttttgaaataatgtaaattattaggtttctgggaatcaaagtgtactcttctagagcaacctttcttgtttgattttttaaaatatttctagctaaataaggtatgtaatttctcctctaatttcctgttccacttgaaaataggaaccagactttttgactatgtgaccttgggaaagtttatatcacctctctgcacttcgatttcctcatctgtaaaatagaagtaataataacagcacctatttaataagattatcttgagaattaaatgaattaaagctgtaaaatagtaaaaatagtgtctggctcataatatgcatgaacaaatgttaactatatacagctaaatgtagcatgttttctacattgtagctccttcaaccattattcatatgacctatcttcatcgttctggtcaaattattctgggcttgctcaaatagacagtgctcttttagggtgagtgcctcagaaccaagcaccatatttcactcatggtagggcacagtgtgattcttgcccttcttttttctgggctgtattctataatccaagattgtattcatttggagggatgtcagtgactcatctggataattcataagatgcttacaggcaaaccaaatgcttcataccttttcacatgaaccactgttaataaatcttctccactttgttcttatacaatgaagtttctgaattttagtgcagaatttatacttctctgatacatttcatctgaaaaacaagtagggtataagaaagagggttttcagtttgagtgtcagattgacctgtttgtaaatcccagctccagcattacctgtacaatgtcatagaaggtatgcaatttatttgaccttcagtttccttttctgtagcagaaatattatatatgtataaaattatttggaggccaggtgcagtggctcacgcctgtaatcccagcacttcgggaggctgaggtgggcagatcacctgaggtcaggagtttgagaccaacctgaccaacatggagaaactccctctctgctaaaaatacaaaattagccaggcatggtggtgcatgcttgtagtcccagctactcaggaggctgaggcaggagaatcacttgaacctgggaggcagaggttgcggtgagccgagatcgcaccattgcactccagcctgggcaacaggagcaaaactctgtctcaaaaaaagatattatttggaaaggcaaaggtaagcatctagcacattcagggcatacaataaatgagggttattagtaatattaataccctactatgatgattaaatgagataatatgtgcatggaaaaaaatcttcatattgctgttttaattcattacttttggcctaaaaattattttgaattctcatcctgatagctcacaaactatgcccttcctaccagaatttattatctaaagataataatgtattttatatttttgtttacagtttagtaaaatgttaactagaacaggactgggatgggtatgtgttaagctgcctaaagtctgcctcatcagcattgatccattagtcaatgttccatgggcaatggcactaagtcaattataaattcacctatacacaccatcacctaggccaatctggacaaaaacatatcaggaaaaatgtgatcaaagacttttctgaaattcagacataccatgtctaaagcatttgccttcttagtataatctattagctctaactaacggaggaaagagactgtgatagcatgtcttgtccttagggaattaatgctagttactgccctctcaaacggcctacaaaccatgagataataatccattccagaatttttcatacaattgatgtcatgcttgacatcgtgtagtgctggactctttctttctaaagagtgggaaaatatttgcctatcacacacccccagatttctggtctgctttgtgttctctctgatttctgatagatcaccaattataagccaaaaacacattgaaaagccctttcagtattgtgggaaatcatgtgcctagaaacatgaaactacttaaagaacagagatgctctcccaactcccctttgctttacgtggcaagtctagcagaagcacatgatatttgtgcacacggatgcaagttaaagacatattcttttaactgaagaacactgtcttcttccatcaaatacagtttcaaaaaggatccccatggagtagtgaaggatgacaggggaatctatctcatttgaatgggttcttcagaacctaccattgattaattcagtaaacatgtactgagtcctgaatactttcaggcactgttctaagacattgtccctatgttttaagtattggagtatataagaaaatggatgtacaaacaaaaaccttcagtccagtataagaaatgctgactaaagaaacacataaagaacacaaaattgggagcatctaactcctttgggagagtaaattagggaacatttctgatagaaggacaaggttgagtctttaagaatgtgtagaaagctgtcaataaacctggatcgagagatgaagagcaggaagaaatttgttacaggggaagggagagcatgtacaaagtagagaatgggaaagagtatttttgaggccattcataaattcatttatttcaaaactatttatagagtacatactgtggaccaagtattctattagaccttaaggatacagggacatacaagcagaggaaaaccctattcattaagtaaagctgcagtcaaagagacagataataacatttttaaaagtggatgtgttgggcgggtgcggtggctcatgcctgtaatctcagcactttgggagrccgagacgggcggatcatgaggtcaggagatcgagaccatcctggctaacacggtgaaaccctatctctactaaaaataaaaaaaattagccggcctggtggtggcacctgtagtcccagctactcaggagggtgaggcaggagaatggcgtgaacccgggaggcagagcttgcagtgagccgagatcgcgccactgcactctagcctgggcaagagagagagactctgtctcaaaaaaaaaaaaaaaaaaaaaaaagtggatgtgttattaggaattggtacaagttatccaaaggatggaaatacactaatgtgagactaatttttaaaaatcaccttggctaatttgtaagaaaaagggaagggagccctttatgactataaaaacaacttgtaataaagccccgtagtgagtgggaggagcagggcatccaggaggaactgaaagctgactggtttcacttggggtagtggaatcgtcagaatcaatgctgg

SEQ ID NO: 94077 - DNA, 35073 bp, Homo sapiens
  misc_feature (1)...(35073): n = A,T,C or G
acggtgctgggattacaggcgtgagccaccatgcccggcctgcattctaatcctataagtatattcgactcatatattttttccagctggaaagaactttctacattatttaatccaagaatctcatttctcagattaggaaactgaggcccagtgaggatacatagctctttcatgtacaaaagattgaaacagtctattgtcctcatgcctttagaagattaaatagtttgctttagttccaattttttttttttttttttcagacagtctcgctctgtcacccaggctggagtgcagtggtgcagtcttagctcactgctgcctccactttccatgttcaagcaatcctccaccttagcctcctgagtagctaggattacaggtgtgtgccaccawgcctggctaatttttgtatttttagtagagatggggtttaaccatgttggctaggctggtttcaaactcctgacctcatgtgattcgcttgtcttggcctcccaaagaactgggattacaggcatgagccactgcaccggtctagttctagcttttgtctagtagttcctctagaccagaagctctcaatctcagcactattgatatttggggtcaaataattatttattgtgaaaagccattgtaggatatttagcagcatccctggcctctacccactagatgccgtgaatacaccctttctccccttagtcataacaataaacaatgcctctagacattgccaaatgtcccacagagaactactggcttagccattactgtaggtaaaatcccttcatatgaaatgctgaggccctcaggttattccatcacaatatgattgctttaatgaatagtttgctagcaaatctcatttgtagccaaccagctctggagataaggcagagctgctctgtattgcgtgccaggtctcagccactactcgagtactctcattatgtatgtgtgttcatttatgtgttatattctgcctacctccaggagcttttaaagtggccccaaagcatttctttctcagaacatctggccctgtctgtgtgttgcctgggtgtctgggctgtgtggaggggtgtccttctctgctagagcacttcccacattgtcttctagttgcctgctcgtctcccagccccctggactttaaggcccgtgacagtaaaaacaatgaacatcttgctcaccattatactcccagcatctagttggcacatgagaggtgcccaataaacatttgttgaatggctatataatagaaattatgtattatatttagctgggggtcaaaagtatagaagttagatacagcttacttagtttacaataatcattacttgtgtttattaagagcctactatgtaccaagaactttacatgtgttatcttgttaattataaaacaaccttatagacagtattagctccatttgaaagatgaggaaactgtggctcagagagagttcatgacttgggtaattatatagtaagcccagatttggaccaaggcccacctaattgcagaatctagccctagtctgctttgatatatgatgggtcttcaaaaagttcatggaaaatgtatattatgaaaaaaactatgcctggacttcaatttttttgcaacaaaatacattcatactaactttttataacatgtctgaacaggatctagtttgaggcactgcaaaggataagacatcagattgaaaagagctctatcggccgggcacggtggctcatgtctgtaatcccagcactttgggaggccgaggtgggcagctcacgaggtcaagagatcgagaccatcctggctaacacggtgaaaccccgtctctactaaatatacaaaaaattagccgggcgtggtggcgggtgcctgtagtcccagctactcaggaggctgaggcaggaggatggcatgaaccttggaggcggagcttgcagtgagccaagattgcaccactgcactccagcctgggtgacagagctagactctgtctcaaaaaaaaaaaaaaaaaaaaaaagagctcctatcaaagcaaaggaattctgctaatattgaagcaagaacaaacattaaatatatgatgaagtttaggtggaagaatgatgaaattcctgatgctttatacacagtttatggggacaatgctccagcgaaatcagcagtttacaaatggataacttgttttaagaagggttaagatgttgaagatgaaacccaaagcagcagaccatctacatcaacttgcaatgaaaaaattaatcttgtttgtgccacaactgaagaggctgatgattaatagcaaaaacaatagccaacatcatagacatctcaattgattcagtttacacaattctgactgaaaaaaattaaaattgggcaaactttccactcaatgggtgccaaaactcttcctcaatggcaggtaagggatgtggaaaatctatttttctcccatctaagttgaagtctgttgagtaggcaaaggcagatggatagtatcttccacctatctggccctagcttgggaggtctgtgcccaaagcagccacagataagagcagagctttcaatggaaattttaaaaacatgcgatcaagatgctgaagcatttctttgaagacttgtaataagagatgaaacatagctttcccattacaatcctgaagacaaagcacaatcaaagcaatggctactaagaggtgtaagtgggtccagttggactggtcaagagcaaaggttgtggcaacagttaattgagatgcacaaggcatttttcttgctgactttctgaagggccaaagaatgataacatctgcttattttgagagtgttttgagaaagttaggcaaacctttagcagaaaaatgccccggggaaagcttcaacagagagggctcttctccatcacagtgctcttgctcactcctctcatcaaacaagggcaatttttcaagagtgttaatgggaaatcattaggcatccaccttacagtcctaatttggytccttctgacttggttttgtttcctaatctcaacaaaaatcgtggctgggtgcagtggctcacgcctttaatcctagcactttgggaggctgaggcgggtggattgcctgaggtcaggagttctcgactagcctggccaacatggcaaaaccctgtctctactgaaagtacaaaactagctgggcatggtggctcacacctgtaatcccagctactcagaaggctgaggcacgaaaatctcttgaacccgggaggcaggggttgcagtgagccaaaatcgcaccattgcactccagcctgggtgacagagtgagactctgtctcaaaaaaaaaaaaaaaaaaaaaaaaagactgcattgacatgcttaaattccaaagactttaagttctttagagatggactaaatggctggtatcatggcttacaaatgtgtcttgaatttgatggaacttatgttgaaaaatacaggccaggcgcagtggctcacacctgtaatcctagcactttgggaggccaaggcgggcggatcccgaggtcagaagatccagaccgtcctggctaacgcggtgaaaccccgtctctactaaaaatacaaaaaaaaattagccgggcgtggtggcgggtgcctgtagtcccagctacttgggaagttgaggtaggagaatggcgtgaacctgggaggtggagcttgcagtgagcagagatcgcgccactgcactccagcctgggtgacagagcaagactccatctcaaaaaaaaaaaaaagaaaaatacagtttattttttcttcttatcttttaattccatttttccatgaattttgtttatttgtttgagacagtcttgctctgtggccctttttttttcagtacattgccttcatgtgacaacattgttcactgtgttataatgcatttaattatgttacagttatctttcatgtcattcttactgtcctggtaactttatttggatttgggttttctccgcagtttaacatgtttacagacagtcctttaaattttaggctatagctagttctaagtttcatctgttgagtaattgattggttttgactagtttctccttcagagtctttataaacacatatgggtaccttatctgcttatttccaaacagaaacctttggctttagggtagtattttttaaatggtgagtccacaatctattgggcccctcaccaaaaaagggacagaatacaaagtaccagaggacactgaatataatcaatgaattaattttagcttttttgttgttgttgagacagtctcactctgtcatccaggctagagtgcagtggcccgatctcgcttcagtgcaaacctcggcctcccgggttcaagctattctcatgcctcagcctcctgagtagctgggactacaggcgtgcaccaacatagctggcaatttttttttttttttggagacagagtctcactctgtcaccaggctggagtgcagtgtgcgatctcggctcactgcaatctccgccccccgggttcaagcgattctcctgcctcagcctcccaagtcgctgggactacaggcgcacaccaccatgcccagctaatttttgtgtttttagtagagacaaggtttcaccatgttggccaggatggtctcagtctcttgacctcgtgatccgtcagcctcagcctcccaaagtgctgggattacaggtgtgagccaccgtgcccagcctaattttgtattttttagtagacatggagtttcgccatgttggccaggctggtctggaactcctgacctcaggtgatctgaccgcctcagcctcccgaagtgttgagattacaggcataagccactgcgcccaacctaaattttaaaaaacttaaataaaaaaagaatcctgattctggggagtgggtgtgtatgtgcataggaagaggcacgatgaaggataaagtccaagatcttactgttgcataaattcagcttcctttgtgaaatcgttgctgaaagtctgacccctaatacatcttagcactcctcaatcacgcagtgtttaccatttgttccctcagacttgtcagacaaaagtccagatgcgccgggcgcggtggctcacgcctgtaatcccagcattttgggaggccgaggcgggcggatcacaaggtcagaagatcgagaccatcctggctaacacggtgaaaccccgtctgtactaaaaatacaaaaaattagctgggcgtggtggcgggcgcctgtagtcccagctactctggaggctgcgccaggagaatggcgtgaacccgggaggcggagcttgcagtgagccgagatcgcgccactgcactccagcctgggcgacagagcgagactccgtctcaaataaaataaaaaataaataacataacataaaataaaataaaataaaatttccagattcttctcgacttaaagatggggctacctcagggtaaatccatctgtaaggttgaaaaatcttaagtcaaccattgtaagtcgaggaccatctgtatatggcatgagaattatcagctgtttattttcatctactttgtctcctgaaataaattgcctgagggcaaggactcttacatttctttgccatttttgctaggtgttcaatcaccgttcacaatgataacagtaggaaaaagtgcgccttctagtaagtggacaaacaagtttgagtacactgctctgccccactcccttgttacggggtaacataacaaggtaaagtacctccacaacgaggcaagactaggtcctgttccttaaggagcccgcagccttgtctgttctgttcgttccctggcagattacaggctgtggagatccctctccccgctctctaacgtggagtcggctgagcacgactctctcgccccagcgcgggaggtctgcggtctgcgggtaygaggcgctccaggggacctggcatcgtcggcgtgcaagagaggagcggacctgagacgcaaggagaagccctgcctctggagtccagctcctttcctcttctggttttcctcggaaggggccaggagacactggaaggtccggacggcagggaaggggacggggttctttccagtcccacccgtgtagggacacctctccccctcatcccccgatgtaccctcgctgaatctgggatgggagagacgaaccgagtctaggcatctgcgtagcagcgccggggagagcggggagcccagggcggagcccagtcgactcccggattcccctgccccgcccccggcacgaggccccgccccggcggccccgcccctcctcgggactcgaccgggctgcgctcactgcccagccggggccccgggagcctccaggctcccgcccgccctgagctgcggcctccgcatggaggggccactcactccaccaccgctgcagggaggcggagccgccgctgttccggagcccggagcccggcaacacccgggacacgagacggcggcgcagcggtacagcgcccgactgctgcaggccggctacgagcccgagaggtgacgcccagggcagagcgcgcggggcgcatccggggcgggcggccgaggagggcgcggcggctccgggaacccggcgacgctgcgggggaggggcaggccccacaawcccttcccctattaccgcctcagcctctaacttcccgaaacgccacgctcccggctttggttgggggatgcagacgggcactgtgcgaagggttaggtgcttcgttgcackggggagcggaggagagrgaacaggtcgtaaaaaccttccctaaaatcttagccctagattggacctcgctacacacccgacgacaccccgttcaggtggctccaactcctggggttcaaacagtgcttgctggagtcctgtccgactgacttggcttacccctccttagctgtttcctcctagaactatcttcagtggtcttactggcaggtgttggtgtccagatggatcgccttcgcagggctaggtgaggacactctcccctcctcaccatgcactgagatctgagaggctgccagtgcagctcacctcaaggtctctccgaagacgcaggcccccatgctggggtctgtaggggaatgagggacactggaggaagagtagggtagtgagctgggccccagggggactggctgaaaaggagacagcagctaatctctggattgtatcgcagcttgaaatgcaatcccactgtccttccggtccagaggatttggacttctttctctgcccatctgctggtgttcagcagcttggggaggtgacctggcagctgggttagatgggggtggtctgggggaattagcccggcagctctgcccaggggttggcygcttatgtaagaacttttaacggcttaaggggctcctcggcagtggggctgctgagttaggcccccctgtcctggcaggctgcctctctagaattgactcaggcttaggcaactcccagcctttctcctgtcctagaaatccagctcctggggttcaggccgcagggcgatagggaggggccacaggggctgaatgagccggttggggcttgacagaggcagtgcttggttagagtaggggttgcaaacataatgtttcagagctcaggccggagccatgtgagtgcatcctttctccagattgcacttctgcatcaaggggccatccctacccccacccccaacccgacccgcaccccccacttgggctcagggagcctgtgtaaacctgagccccagccaggtggtgtagtgagattcaaaacctgctggccagacctccacctgccttcgccaacctggagctgtgggaagaggacaggattctgtgagcagtcctgggtttgaatccagtgttattgctctctggcttgaacttggacaggctatgcccccgacccagctcaacagtgctaatgttactaccttttctgcccttcccccatcttcccctcaagagtgttttgaaatcttgttccttcaaatagccccaggcctgatagagccctcggggttccctgcctggacctcagtacccagctgggcactgttgccctgctaccctgaggaaggggcttggacctgccttcctatccccacagctgctaggtgggggtctcaggggacaacagcccttcctcggcttcggaggccgactggttgcctcggtgtctcctccccatggaggaagcagctggggaagatcaggaagagggtgtatgagagtgggggttgagggtggattagcggagtctctggaaaagcacagcctaacccagggctgagcccagcagcttagagtgatgaggagcccaacacaggttaaagtgggaggtgtgtaggggagcaggagaggggagtggggccatgaagtctgtaatcactgggaaggtgaccctccccatgcctcagccaggcagcctaagaaggctggggcagatgtcacagtcaggtcacctgagatggtaaaatccagctgctctcctgggccctggctctggttgaatcctgaatagtactctagccattcctaactcatactgtaggggacagtgacccagmgcaggtcctttagtgacccagtaacccagagagaccactgggctggtctctgctgtgtgccaatctctgctctgtgcctgcagttggcatgatagctctgttcttctgtggccagaaaggtaccccagagcagctctgaatggtcaggcactttctgtggctggtctcactgctctgctccacgtggccagtgaaaggtcctagtgctggtgctcctcaggacgctcccctggtcccccatgtggcccgggctccctgcatgagcccaagaatgctgaaggttcagaggtgcttcccacacatcgctggcaatccggccccagcctcccctctgcacacagatgkaacagtctgtgttttcctggcagggtcccgggggcatcaatgggggaggctgggcatcccagggaacctcgtggcttggaggccaagcctcccctgggcctagctgccatcacactgctgagaagtaaataaacccagcctcccagggccacagccagccaccaagccagggaggggactgtgtcccacaccaccttattctcttctccccaagtgagctgtgggagccacaggaggacacagggaggaggctgtggagtctggktggggggacccactcttggtctgggaagagcactggcagttctggtcccataagagggaaggggatctacttcctaccaccccacctttccccatgtgaacctatctgtacccagtcactgcccccatgtagaaatctggatcttgctgggcacccagggccaccaacttctgctttggggatttttcagaagttccctagcccctgttcttatttgtatgcacacttgtctaagccaggcttatgatcctcccccatcttcccaccgcaggaccctcccaaataacaaaccgctctctgagattaaaagccctggtaccaacaccattttctcagccggagatagggcggtgagccgaagcactgggccatgaatcagaagcagtacccctcccttcctttccgaactatagattttgcctctgtcaagggaatgggtacccaatacttgtcaattaatagattgtggagttaatgtgctcatttatgaaaaatgctttgtaaactgcagagggccccaaggccacccaaaggtcaaggagtgtcattatgaagaatgccggctccctaggatgtcgggatggggcatagcgatccaacctcaaagtccttagtgctgggtagctgagagcccagaccggtttctcagggctccgggccttgatcagggtccgcggaagagtattggggattggggaacggcagaaccgtgttagaggtgccctggggagaagggcaaggtgggtggccccggctgggggagaactcgggggtggggggggtggggggtgtgggggtgtgggggggtggggcctctgctggggggtcctgggtggctggatgtagagcggcggagggggcgtgtcccggcctgacccggtactctcccccgcagccccacacctcctacccggtccgggcttgcggggtcgcagcgccgctgcaggcagctgggggcgtgcgcgcggcgcggctgagccctttgtgcggcgcgggcggaggcggcggtttccgcgggaggggcgagaagggcgggaggggcgggaggacagggcggcgccctggcccgccctgccgctgccgcagcccccgcccccgcccccggcccgcccggcccgcggcagcagcgtggccgcggcgcggcgtcagcagtagcagcagcagcagcggcggcagcggcgggcggccgcgcgggtgtttatgtcgggtcgcggggtctcgcggcagcatggcggactacctgatcagcggcggcaccggctacgtgcccgaggatgggctcaccgcgcagcagctcttcgccagcgccgacggcctcacctacaagtaagcgccgggtctcgtacccctaggtgcgcgcatccacgcgccgcgacccccgggccggccctgcacgtgcgcggctcccccggcgttccctgcccggtgcgagtgcctgctgtgggcgctgggggctgggcacgggaaggaaggaggcccgcgccggagcagacggacgtggcacggcgacaccgcggccctcagagccctgacccgtttctggccagatccgggttcggcctgtccccttcctcctctcagcggcatggaggggccctcgggcgtgtgggaactggagatgtgggcattatggggagacttttcccagccgctggtccaggacgccccctcccagcctcaccacgagggcagagggtccccggagccaagcttaagcagccgcttccgcatggccccaggagaggcccagccaggtggttggggtggcttcttttccaactgtctagtccagcgctttttccagttgtgtccctccctgcccacaggttggtattggtgcccctcccaaggcgcgaattattctgtgactgctacccctaagcccaccctacatggggttttggaggaggacacagacccacccgtctgcctctggcttcatttgccttttccgtggtccctaggccagttgccctgcgtgctgcaggcctggcactagctctgcctcctggctgcaggactgtgcccctgccaggaaggagcatcagaaggggcagagtggggatgctggccagtcaaaagcatccctgccttgtctcctgccagccctgccctggcttgtaagcactcctgcttggccagcagtttccctaaacaccaggatacccagtcactcctgaggagtgtctcctcctgcctgcccgtaggcgacgggtgtatagaacacctagaaaatgctatgaggcccagactccagcatttcttctgtggcctctttgctatacagaagaagggctgccaaaggctgggagcagccgaaattctttgtttttttggtggtctttggtgatgagattgaaagcccacctttgatacagttgtcattgaagtcttctaggagaacaccctaggggaacgcctaggagtttctctaggccttagggcagattaatgacccacccccctccaccctgtggcttttccttcctgcgctagggatgcctgctgctttgcttagctcagttcatagtgttcctgaagtgtgggatatttgcttttgggtgtgtctctcaaggcctgctgtgattttagcaggttggggcccctgagctgtgaccctgcacctagatgtacccatgcaggcctgcacttcccttgcggagtttgctgtgaccgtggcccaccctagtgttggtagctgccatgctttggctggggacccagtgtcctggtcccacctctaaggcctctttcctcccctttcccgtcctggccatttctgttctgctctgtcagaacatgccctgcactcagccccctggggtccctccatgctgttccgagccctgtgtgactcagcagcccaggcaccggggcatgcggactgtcctgtgctgggtcatgttcatactgtgttgagcgccacaaaattgttctcaggtttgttcccaatgtttacttattttctctccccatcaagattgrgaagttttcaaaggcaggcactgtgtctgctgtgtgtggcgatatgggaacttctgtgtcgcttgacaaactctgagacttaaaggcaatggatattttgggcctattaccttgatggtaccccagyagacctttcgctgtctttggctctagctctgggggctggagtttgccagactctagtgaggtgcacgaggtgggaactgccctgatggggcagtagggatggggggctgtagcctctgctcctctaggcttttctgtacccccctgctgcctcctctggcatggcaggctctgcccctttggggcacccctccccactaataacactcacttctctgtcttcacagcgacttcctgattctcccaggattcatagacttcatagctgatgaggtggtgagtacctcttcctttgacaaggggagggggctgtgtatgtggtggaagaggctgacttcttgctcaggggcagggcatggagagatggagagacttttcttgggaatgggtggataggatatagtcctttttttttttttttttggagacagagtcttgctctgtcacacaggctggagtgcagtggtgtgatctcagctcactgcagcctccacctcccagattcaagtgattctcctgcctcagcctcctgagtaactgggattacaggcacatgccaaaaccccccgataatttttgtgtttttagtggagacggggtttcaccatgttggccaggctggtctcaaactcctgagctcaagtgatccgtccgcctcagcctccgaagacgctgtgattacaggggtgattccacccagctggtatgggtggatatagcctttattgttgccagagaaacaggcagagatcaaagggttatacctgatggggcagaggcagctatgggaacacaggagtgtcctgagtgaggcctggcccagggctgggtggctctctgtcagtgacagagcctgtgggcaggttcagaagaggcctgggaaggggtgggcttgggagtgggaacggtgggcttgggagtgsctgccttattgtagagaccataaggattggattttgtctggaatgctgaacaaggacatgatagaagccagtraaattatggagatttgaaaccggtagacagacttgttcactgatccacaatgtacaagaactggcaagagggtttaaaagagttacattttggataaatacaaggaaacgcagtgccttgctttcccagaggggctcatcagtgagccgaatcaatgaacaattaacatatgataaactcagagaagccaagatgggtagtgatgatggtgtaagtcatttcaagaaaaagtgccatgattcaatgatgaattcatatacattaaaaaaaaaacatttcttttctgttgctattattattgctatttattctggtctgattctcatgaaaggccagagggcctgagtgtgcctggatcacttacatgtgagggaagttcacatccagctggtgtttagccagagctgacccagacagattttcagggggaaattcgaatgattctggttgtttcccttatgacaacaaccaggaagcctgcttggtgcagctgttcagtttaacaaagtttactggccagtgtggctttgtgtcagaccctgggctggctgctaggaagggagggattgraaagacycctaccagctgggcgtggtggctcatgcctgtaatcccagcattttgggaggctgaggcaggaggatcacctgaggtcaggagtttgagaccagcctggccaacatggtgaaaccccatctctactaaaaatrcaaaaattagctgggcattgtggcgggcatctgtaatcccagctactcgggaggctgaggcaggagaatcacttgaatctgggaggcggaggttgcagtgagtcgggattgcactactgtactctagcctgggtgacagaatgaggctccatcagagagagaaaaaaaaaaaaaccctgcctggccggcaaggatctccttgtcctgtggcttctgtcaggaaggctgtggcccttctgtggcatgacaaaagagaagatggtgttttctagatcatggggccagaggtctgaactagggttagtgatgggtttcagggactttgaatctaaaaaaattacatagcaaagtctgcacaaatgtcttggggactgggatccactactgttggcctgaccctcagaggggtatgtgctctggcctttcctccatgggcaggtggcttttaaatggatacttgcaatcctgaccactctcctgagctcyagaccattcgttgcttgctttcctggatgcctaaaagactcttttccatgcctaccyccacctcagcccttgtcacccagaatccattctccaccttggagcctgagtgacctttttgaaacataaatcagatcatttctctgtcaagaccctccagtggcttctctccgaatcaaatctgagcttctgtccgtggtcttcacggccatrcatgctgcccctgccttcctcctgcctctcccttccctccactcccctggccttctttttctttcttaagtgtgcctccgaaagaactggaccctgaggcgggtttgcactcagtccctcagccgagagkgacagcccctctgacttctacttaatcggctmccactggtcacctcccaggaaagaggctttccccagtcaccttgttgccagtggtcgcttggcctttttgtttttctctgcagccttcatcctgactgaagtcatcttgagcatatgtcctgtgtctgtcatntttctttccaagtagaacataagctccattagatgagctgggaactcatccaccttgttcactgccatgtccccagggcctgtcctggtgccggtgcatgtaggagctcagtgagtgagtgtccagtgggtgataaactctttacgtgggctgtgcctccatcctcaggacctgacctcagccctgacccggaagatcacgctgaagacgccactsatctcctcccccatggacactgtgacagaggctgacatggccattgccatggctgtgagttacacacctgcatggggactccagggcacacaggaactgaccatggtgggctgtgctgaggggcagggctgaggaggaatgggccccggctctgaccacacttcccttctacatcagctgatgggaggtattggtttcattcaccacaactgcaccccagagttccaggccaaygaggtgcggaaggtcaaggcaagtaccaggcctgtccccagcaagatgccacctggcagtccccacctcagaggccctcccagcctcccctgccagccctgcactgctacactccctgcgtgtccttcctctcagtngagccttggggccgagccctcattttcccactggctcctcatcccactgaggntcctggcttctctgcagcacagctgcatcctctgttycctgtggccagcctggacatcatccctggctttcttccagccttttcctcccccatctctgcccgcagaagtttgaacagggcttcatcacggaccctgtggtgctgagcccctcgcacactgtgggcgatgtgctggaggccaagatgcggcatggcttctctggcatccccatcactgagacgggcaccatgggcagcaagctggtgggcatcgtcacctcccgagacatcgactttcttgctgagaaggaccacaccaccctcctcagtgaggtacctgcagggcaggggaagcagggctgggtgtagagaggaccctcacgctggggcctcagactggtgcctgtgaccagggaccagagggaggcctggctccttctctctcacctgccaacctgcaggcaaatgttcctggccccacaggtgatgacgccaaggattgaactggtggtggctccagcaggtgtgacgttgaaagaggcaaatgagatcctgcagcgtagcaagaaaggtaccagggagctagttgaaaactcaacccccagcctgactccctgtccacagtcccgttgttccttcacagccttacaggttatcccagcaaccagactgagccctggggaaggttcgaataacctcaggcaggccagagcacaactcctgccatccttctcttagcttagggaagcttgcccctagtgcagcatcttcatagtatgtttcccaaaactagtcctatgcgatgctcatcagaaaaaaatcctgagcaataactcctttctctatcccctatcttgcataaagaattgcacattcacttattaaaggctctcagaagtcckrcagttaaatttatttgacactagagctgtttttataatattttccagctagaaacaactttagcttttttttttttgagacagagtctcactttctcacccaggctggagtacagtggcgcaatgtcagctcactgcaaccctcgcctcctgggttcaagcaattctcatgcctcagccttctgagtagccaggattacaggcatgtgctactataccagctaattttttttttttttttgtatttttagtagagatggggtttcaccatgttggccaggctggtcttgaactcctggcctcaagtgatctgccctcctgggcctcccaaagtgctggaattacaggcgtgaaccaccatgccctgccacaactttggcttctatttatttatttttgagacagagtcttgctctctcatccaggctggagtgcagtggtgtgatcttggctcactgcaatctctgcctcctgggttcaagcaagtctcctacctcagcctcccgagtagttgggacaacaggcacacaccaacacacccaggtaatttttttgtatttttagtagagatggggtttcaccatattggccgggctgttcttgaactcctggcctcaagtgatccacctgcctcggcctcccaaagtgaggaagctgtgagccaccacacccggccaactttcgcttgttagaaaaaaaaaggaaaaattaaatattcaccaggtccctgttggctatactgggaaatgcttccctggtccatactggagggttctttggtgtctgtattggacagggcacatgcttctccctgcaggacagcatcactcctggctaggagatttcggccactgtggcccagcaggtgaaaggctgccagtgctcgggctgcccatcccaggccacggggatgcccatccacagacccccaggaacctgctgggctgaaagatttctttgctccctgttccttgggaagagggctaggtccctaggaacacttcctgggggcggtgctgtcacctagtggctgactggggtacttcagtggaatctctggagtggtccactttcatcttcaccctcctaaacatctcccaaacttctccccaccaagcctgcttcatttcacccctgcattccttgtcagggaagctgcctatcgtcaatgattgcgatgagctggtggccatcatcgcccgcaccgacctgaagaagaaycgagactaccctctggcctccaaggattcccagaagcagctsctctgtggggcagctgtgggcacccgtgaggatgacaaataccgtctggacctgctcacccaggcgggcgtcgacgtcatagtcttggtaaggcccccgcctgagtggtgggggagatggatgagtggttcagcagagtggaggtttatgaggacccaggttcacctctgattaagcctgtgcccctcccttgctactcttcctctctctttctgagtgctccctggtgtcagaattaggagggtggcagcaggattgcctgagctcagaggttcaaggtcacagtgagctaggatcgtgccactgcactccagccctggggacagaacgagaccctttctcaaaaaacaaacaatggtttgtgtcatctgagatacaaagaaagaaaacaaacaagttaaaattctccagtggcacagccataagaaagaatgaaatcctgtcctttgcagcaacatggacagagctagaagccattatccttagtgaactaactccaaagcagaaaaccaaatactgcatgccctcacttataagtaggagctaaacagagagtacacatgttcataaagatggaaataatagacgctggggactccaaaatgggagagggtgggaggggaacgaaggatgaaaaattggctatcagacacagttttcgatatgtgggtattaggtacacttgaagcccaattctcaccagtatgcagtattccatttaagcaacaagcacatgtacccactgaatccttaaaaaaaaaattgacaaattgttgcaagcaacaattgcaaatcaagactctcccccaccccccgataaagggaggtagaataaagataaaggcttattgatcccttgtgagtgatctggaccatacatctagattcatctgtattctataactaggaggaagagaaattaggaagrtcactggcaccctctcaacagctcacaacagactgcaaacaaaggcctctgagggccttcttggctcataagttgaccctgataatttagctcacgtttactgagaaccgcctgtttgccaggcactgcgtcaagaccttaatgtatatcagtccattgaggaacagtcgccattccattttcagatgaagaaacaggcttaaagaagttaagtcatttcatttggttagtgagttggtgggaacaggatatggctccaggcagtgtctccttgctttaaggatcagtctgtacaatggataggaaaggccttatgtactctaagactgcattagttgtggttaacctttcagggaagcagtcccctttgagaattgactgaaagttgtcaagtgaatttccagraaaaaaaaaaaaaaaacaaccagaaggaaagagcattctcataacagttttcataggatttgaggggttcatccactcaggctctccctcctgccttgagaatcctcagctgtctaagcccaagctcttccgtcctttctcacaggactcgtcccaagggaattcggtgtatcagatcgccatggtgcattacatcaaacagaagtacccccacctccaggtgattggggggaacggtgagtgcggggtcgcctcccacccgcctgctcctgcccctccaatgagtaacccttttctgtccttcagcatccctaggtgatggtatggctcctggcatgggtggcagggagcatgatgggctttggtcactgtaggggggttggggggtgctagactggggtcccaagaggctgttgggcaggcaggggcatcccatcctcacattgttcctctgccccatccccacccccagtggtgacagcagcccaggccaagaacctgattgatgctggtgtggacgggctgcgcgtgggcatgggctgcggctccatctgcatcacccaggaaggtgggtgtcaggaggtgagcgagtgcccgctggccccggggcctcgcctttgttccccagatgtatatcaagtactctctctgccaggccctgttctgccatggtaggctccggggtgacccaggcatgggccccaccccatcgggcccactgacttaggggaaggcaggtgtaagcagggtgcaagagctgcagcctgcttctcagagtgcggtcaagggggctctgcctggggcttggggcctggggctggtgtgactgtccatggggcttgttggaacctcagggtttggatttgatttgtgacaaggcagatatttaagacacagagacgacatgtccctgaatatataaagatatgttatacacctgcttcaccatgtggttgggcgtggggagttccacccaattacaaagcccttttgcagggtgggttcctgaacatgaagtgggaaggggggagcctggcatgtgtcccccatgtggttattgaggaggtgctccctggaggctggtatctgacttgtggggtggctgcctggaagacttgggtcctcacttggcctgaggagatgtacccggcccctcctgtgagggcaatttctccaaaacactgagtgatgcatttggcctttcctaccccaaacagctcccccttttggtcctcagagcctctgctatttaggtttgtgcccttcgccttaggtggccaccatggtgaaatgagggccctctctcacccacttaacaaatattcaytaggcacctacttgtctcaggcactgttcaaagctttgaggtagagtagggacaaaacaaatgagaggcgccatctctggtttatccagctttgcatccgtccctagacaggtgtggttccttgtagtccccacctaaaacctaacactgaaggaccttggacacttagacttgaagaaatgcaaaccagtatcccaaaggggaccatagtacctaaccctggtaacggtttttgcaaacaaaagccttgaaggggaacttgtgccttgagagcaggtgaggctggggccacctgtctgggggcattgggctctgaaggccgcttctggttcccccgtcagaatcccctgtcatgctcttaggggtggggtggcccagatccctagagtgacactcatcctggtggtatttgccagcacctatgttatgcctcagacacaccatccagccctgtcccttttcctgagtagaggtagtgcacaggaggaagagctgggctggccccgctccaggccccggagttgctgttgactcttctctgccttgtgcaccccaccctcccccagtgatggcctgtggtcggccccagggcactgctgtgtacaaggtggctgagtatgcccggcgctttggtgtgcccatcatagccgatggcggcatccagaccgtgggacacgtggtcaaggccctggcccttggagcctccacaggtgaggggagaatgtgctggggattgggcaggygagggctggaagctgggggggtggcactagtgggctggaggcactaatcccttgcccactgtagtgatgatgggctccctgctggccgccactacggaggcccctggcgagtacttcttctcagacggggtgcggctcaagaagtaccggggcatgggctcactggatgccatggagaagagcagcagcagccagaaacgatacttcaggttccctgaccctgggccccacctgggcagatcagcccacaacccttcagggcccgctcatgccaccgacttccccagatggcagccagtccccatatggtggttctggaaactgaggcacagggcttaagtagcagacccaggatctgtccctgggccatctgactcagcccagkgaggggtggcctgggggaccttcctgggcggtatcccgtttttgcccttaagaggtggggtggggtcctctgagcttcaagctgctgggctcagtcttccaccctccacgcagcgagggggataaagtgaagatcgcrcagggtgtctcgggctccatccaggacaaaggatccattcagaagttcgtgccctacctcatagcaggcatccaacacggctgccaggatatcggggcccgcagcctgtctgtccttcggtgagtgctgagactgggggtggctcctgcttyctttctctcrctcttctccacccttggtggccctgatctgctccacctaccttcctcctaggtccatgatgtactcaggagagctcaagtttgagaagcggaccatgtcggcccagattgagggtggtgtccatggcctgcactcgtaagtgtggtggcctccttgctgtcacttggaggcagtgggttgggcaggtggggccagggttctgaggtcaagctgaggttccagggaccccatggaccacctgcagcagggacagatgctgctgcaggatggcccctcaccctctcttcgggggcccagccccctgttccttgtcctttagtccccatgcaagcaggccctcccctcccctcgggcctctcccgagcagggcacaggaggtgtggccagtcactgcacctggactcccagcccttgcttgctcaggaagcttggtggctggtggcaggggctgtggtggcaccaggcagccaggcagaagatgcgggtgtgacccctctggcgggtacaagggcagagagatggacgccagggccagcgctggggcaaccgtgggcgggggcagtgctcgttggcagcagtagttgcaggcatgtgccccaccctggtcaggagccctgtccccaggtatcagcgggcgtctaacctgtgtctctttccgccccacccttccgtagctatacctttctgccgtgtaagtaaccgcgctgcccgggccaagcgtagagtagagcaggggcagtctgggtgggacctgggctggaggtgggggtgggtattgggtgggggtaggagggtgctggggtgtaaccatgagatgtggaccctgggtttgggcccccccggccccctaactccaacaccatgatggaggaaaccagcagtgtcccctcatccagctgaaacacatatccctttctggctgcagagagatgcccgtgacctcaggcctaaggctgccccattttagactggacccagtgaccacaagcagcctaggccactgtgcctgcagggctggggctgggtgcggacatgggcagcagaggttcggctccaggttggagtttgctccatgaggatgggccatgcctgcctgagctgtccctccaccctgggcactgaggacatccactcagatgtggcgatggcccaaaggagcatggccatctctgcacccagcatggttcttcagggaatgctggcctgggggaggacagaggcctagggcctgctccaggccctcctcctgcgccgtacggctgagatctcagggcttctcagctctctgttctctcctacatctgggggccctggggaaagggttttgggaaggagcagggtccacacacccactcttgttccccctcttgccttgtccccacagttacgaaaagcggctgtactgaggacagcggtggaggccgaggtggtggaggggatgcaccccagtgtccacttttgggcacagcctccctccataactgagtggtccacagatttgcactacgggttctccagctcctttccaggcagagaggaggggaggtcctgaggggactgctgcccctcactcggcatcccctgcagagtcaggactgctcycggggccaggctgccctgggagcccccctccragmccagccagccaggctctcaggmcctgcgcctgcctcaggtctttcttgctgcagcctgctccagcctggcccccaccccaggggcaggcggcccctcctggcttctcctgtagggcacctccctgcccctagcctcccaggaaatggtgctctcctggccctgcctctggcccttcccgggccgctgcccctcagccatgtggcacttctgagctcctgacctaggccaaggggaggtctctgcccccttccccggccctgggctacccttgggtcctgctcctcaggccgctcccctgtccctggccatgggtaggagactgccctggtcatggccgcctgcctgtcattcctgactcaccaccrtccccaggtgaaccattcctcccttctcctcagctgyagtcgaaggctttaactttgcacacttgggatcacagttgcgtcattgtgtattaaatacttggaataaatcaagcaggtctcaacgcctccactatcctgtctgtatgccctgtccattgggtggctggagccccatcagagttgggctggggggtatggcaccaggccctgcctccccaggaaggtttgagggtgttgaggtactgggggtggggtgggggtgtgctggtgcaggtgggccccatgtcaggaggtctcccaggcttcacctactgcaagccactcagcaactcctgcagccaggcagcattgttgaggggtcatcatggctgtagaattccagcatcggggcctcacacccagctgccggaaaacgccctccgcagcctcatcatgccacatggtgcagccagggcacaggtggaagtacagcatggccagcgcctgtggtctcatctgccgaaacacacctgtaggtacaaagcagagtgggtcagctcccactgtttgtatgtggctcaggacctgcctcccagcctcaaccccggctggtggagacagtactgtcacgtgggctgctgaatacccctagagttgaggggttttggaacattcacattgccttcctgtgcctctgttgttgggcagtgggcacaaagctgtccatcgaaggtacagataccactcaagtgggcagaggcacggaagatggccaggggatgctcaggtggcgggaatgagcagaccaaggagaagatctggatacactcctatggctaagggaggggcccctcagctccctgctgccatsccatgctaatacctgccttctcccaggccccttctgccaaagagctacttgctcaggggccagcctttcactgcatcattttttagctttgtgcttctagggacaaaaaggaaagagctggacagcaggactatcaggtgggctcagagctggttcaacatctgctccaggagttcttgcaaagtgaatgggtcattgacagtcctgggaggccttgtgccctggaatctggccttgatgagcacctgagtcagaggtgacccagcggggagggaggacaatgcccaggtcccaggggatggttgaagatgagagrggatggatcaaaacatggtttcatggtttgtcttgtttcatggtttgtcttgtgcattggtttacaaaagtcatgcaggaagcaccttgaccagctgttgagatgggaaagatctaagggttttcagataaatgccaagtcactctgaatcaagagcgtgagtggttcaaagggagaagttccgttttgaactaaacctagttggttaatagagctgaccaatggatgaattaccttgtaagtcagtgatctccaccttaaggtatggtagcattagtatggcccttctagaggaggttttagcacagtggctctgcaagtttggtgcatgtcagaatcacctggagagctaataacaagtcctaggcttgccatagtaggatggggtctgagcctctgggttgctactcagccgctcaattctgatacgttctaaagttagagaattactgttttagaggaattccatgcatctagttatatggtctgagacttgccacagtacgcgtcctaagaaaagcagatgacatagcacccacctccaggcttcattgcaaggattatgtgagaacgaacgaggaaggttacaggtgctcagtaaatgagtctttttttttttttttttgagatagaatctccctctgtcacccaggctggagggcagtggcacaatctaggttcattgcaaccttcacctcccgggttcaagcgattctcctgcctcagcctccggagtagctgagactacaggtgcccacgaccacgcccagctaatttttgtatttttagtggagatagggtttcaccatgttggctaggctggtcttgaactccggacctcaggtgatccgcccgcctcggcctcccaaagtgctgggattacaggcatgagtaaatgagtcttactgtgtcctatgggccctccccttgcctgggtaataaacgcatgtaagtctggactcaggaaacacacttactgtgagatgcaaattcagccacagtgcaggaggcttaagtgggacaaagggagagacactctgggtaggaaggccacagcaggtggatattcagaggcagcccagagccacatttgggagaaatgcagatcagagatgccttggtcagcagtactacctgcccccctgaggtccagccaggtctgtgcagcacaggtaccccctcacccctccctggcacacacccagcaccatgtgatccaggctgctcaccaccagattgtggaagatgtggccccacaggcgctgaaccacgctgctgtggtgacccaggttccagctcatgggcagcggcatctgcgcaaaggtgtagccacccagggagagggtgcactgccagcgtgcaaccagccagtgccccagggtccttgcagcaacattagcattcaggcagcctgcaccaggccactgcaaaagaaatggctcagtgcactctcccagccagcgcgtcaaagctgcaggccaggtggagctgcagggacttagcctaggcagctggcttcgcccccagccagggcaggaacaggagcagcaggtagagccaggggactgggaggcctgggcttcagtgcaggcatgtggagcaggagagtcaagttactctcacagggggtagcagtggggccatctctggtgccccctgggggaccaagaggaggaggagtgggtggccctcacctctggcctcactgtctcccaggctccaaggactgcgaacagggccctcagatggcatgacccaatcattcagggggactggactagccctctgaggctcctttcagcttctgtggctccagtgccagtcaggaagtggcagtcagtgtggaggggaggcaggggcagtgccccagctgtgaggcactcagctcccctcagtctctccttccacctctctcctcacatctggagtcagggctggagaggaaggacccagccattgggacgtggtgggttgggggaggtagctcctccctctccccttccttggagctttttattctttcaggatcccttctggcttgtaagggtcacattccaacctcagcctctttgaccccactatagcctgacactcagactcagctaatcaggaggttggggggccaaccctgcccacctcaccttacccctgaagccctcctgcttcctgctgaggagagtttggaggcagggaacctggacagagggcagcggccaggttggagcctccagccacatgcagcctcttctaggccagagcacccagccccacctctcacatctattgtcctcagggcatggcttctcacttgcagggtgcaggcatcatcatcaccagcctcctccttgcttacccttctggctcagctcaggagggaaaacaggtgggtttagggacccaggagacctggtccccagcctcctgctccacctgctcttaagcccattgacaacatcagcttctgggctgagggccagggtgtcagcttccaagtcaactttgccccccatccccaccccagcccagctagaattggagaggggacatctggatagcaagatgtggtattagcctggaacaggtaaagagcagccttttgctcactctgtgcctcagtttctctacttgtgatcctaaaagggaaagaggcacacccccacccccaggcatcccaacctcagatatttcacttcccccttcacctttcagggcaggctgatctcagggtggccaagcccagggtctgccttgggtgggtattgaactcaggaatcctagtctcatagtaggcacctttctgcttctccctcttctgccagtgggcaggacgatctgaggctccaaggggttcacctggcaactgtcaggtgggtaggaaggttctcccagagaagaaaaggggactccggtctaggagcagtgggagttgagtggttccccaggaggggatgttgcaccaggaccttgsggtgaccgacatgtcactctcctacctcaactttaacctcttcatttccatgcctccctccctgtggaaaggcagatagtgggaaacaaagtttccaagtggatggcaagcctcaggaaagcaattaagggagagactttcttggacctcaggctaccaggagtcctgcttccctgtcctctttctttctgtgtagagaaagacatcgctcccaccctccacagtacttcaactccttcccatgcctctaatctctgggaaagcctggcggcaaaaggagcaaagagcttttatgtggagatgtcgtgggggagaatgggcaggggaagaggagtgttccctgctacaggctgtgggactccgggtctaggagcttcagaagcagtgtggtactgtgtccggcagatggcgccaagacccatcgaccgttgggaccccagggaacccggagtggggcagtttcctaggcaacaagcagcccttcctttcaaagtccggcccttggcaaccattccctggttgcctgcatccgtagtaaaatttggcttccaaaggacaggcggggcttgcgggtaaactaatctcatctccgagaaaggaaagaggctggctaggtggggagaggagcctaaaagacctgttttctgccgccgttcattactatgctgtacaaggtgcatcttatcctcagcaaccctatagcagtaatgcctgttcctttatgatgaatgggacaacgagactcggagagagaaagtgacttgcccgagtcgccagcaggtagggcctgggcctgcctggatgtccttgggtccattccattctttctcccagcagctgtgaagtgtccaagccctgtgagggcgctgatggagaggcttgcgaggaagccaggagctgcaggagtggctggagagaggcgagaatgaatccagccccttccagctgagctctttccttgcttggcctggtggggggagactcctctgctcagggtctcccctgacctcgtggtgggggcttctcctggcaaaggaccacagagggacagggaatagcagttcagactgtggaggtcatgtggcccctctgcagtttcaggacaggggagcttgccaaggaggacacaaagctggaatccaggactacctggggagaggagatgcaggaaaggattccattccagggactgtgcagaggagaaaaccgacttcaagtaggtcaagggacagatttggaggattcaaatccagttcaattacctactctctactcccttgagctctcctctccctgcctactccacatctcacactgaccataaccaatgctgaatttcggactccctgtagtagtctgggttctccagagaaacagaacaaatcatacaatatttttctaaaaaaaaaatgcatgtgtttgtggagagacagagagagagacagactgttataaagaattggctcacatcattgtggaggctgacaagtcccaagacctgcagttgccaagctggagacccaggagagccaatggtgtagttccagttcgagtccaaaggcctgagaaccagtagagctgatggtgtaagtccagagtccaaaggcaggagaagactgatgtcccggcttgaagacaggcagaaagagcagattttctcttactcagccttttttgttctattcaagccttcaatggattggatgagggccacccacattggggaggggtgtctgctttattcaatcagctgattcaaatgtaaatctcatccagaaacaccctcccagacacactcagaaatatatttaaacaaatacctgggcactctgtggcccagtcaagttgacacatataattaacatcacactccctgccaccctcccagacctggtcctccttaaatttaccctatcttaaaaactagcaaattcattcctctggttgctcagataaacaaaacaaaacaaaaacccttggagtcattcttgactccactttctctcactatttatttatttacttatttaagagacagggtcttgctctgtctcccaggctggagggtagtggcgcaatcatagctcactgcagccttgacctcacaggcttaagcaatcctcctacctcagcctccagagtagctgggactacagacatgcgctgccacttctagctaattttttatttttgtagagacagagtctcactttgttgcccaggctagtcttgaactcctgacctcaagtgatcctcccaccttggcctcccaaagtgctgggattacaggcatgagccatcatgcttggcacacacttcatatttaatccatcagcaaatcccgttagcactgccttcagtctgaccacttcctccagtctcttctgcaacaatgctgctccaaccatcaccatcttccacctgggttactgcaaagggctccaattttcctagcccccactgttgcctccttccagaattttctcaatacacagcagccaaggtgattcttctaaaatgtgagtgagagcaggttgttcctctgcttaaaacactccactggtttccctggggtcaaagtagaagtcagtctttgctggggcctacaggtccttcatgatcaggcctccactgtctcaggctttctcttgcttgtcccctacccatactgtcctggtcatgctggcctccttgctgtcctccaatgccagtgccctcctcttcaccccaggccctgtggctcactccctcactttctttgggtctctgctcaagggcatcgtgttagaccttccctgaacccccttgccaccccgacacaccctcactctctgaccccatccctgcccctcctgcttcatttttttccataacacaacacaaacataccctctctttgtatgcatagagcctggcctgtgcggcgtgtggctcctgcctataatcccagcactttaagaagccaaagcaggaggatggcttgagcccaggagttcgagaccagcctgggcaacacagtgagactctgtctctacaaaaaaaaaataggcaggtgtggtgatgccagccactcagcaggctgaggcaggagaatcccttgagctcaggaattcaagactgcagtgagctctgattgtgcctctgcagcctgggcaatagagccggaccctgactctaaaacataaataaatatgtgcggagtgtttgttttcccttatatgtttttatcccctaaaacactgtcacccataaatacctgttaaatgctgaatgaatacataaaacatattcatcacccggtccacaacaggaagtatatagcaaggctgaggatataaagatatcaagaggacacgtgctcccttgaggaaccagccagctggcaggggagaccaaccttcttttgtatttgtgggtaatgcagcgtatacaggatcataacacaaagatggcacttggagggttgactctacgctggacactgtgttaacatgcgtggtgccatttaatacagccctgggaagtggggactaaaatcatcctcatttccaggggagaaaacaggctcagagggccatagtaatttgcctaaggtcacccagcttctcagccactgagctgaggttgtgacccagcctcattctttctatttttatttttatttttttgagagagggtctcactctgtcacccaggctggaatgtggtagcatgattatggctcactgcagctttgacctcccaggctcaaatgatcctgtcacctcagcctcttgattaactgggactacaggtgcatgctactacatctactaattttttctttgtattttgtgtagagatggggtttcaccatgttgcccaggctggtctcgaactcctggcctcaagtgatcctcctgcctcagccttccaaaatgctgagactacaggcatgagccaccgcccagcccacagcctcaatctctagccccaaagtccctgcccctcccactctcccggggtagggcagaatagcctggggatggagaaaggaaagagaagagtggggtggaggttcttcctgtcagtaggagagaggtagagaaggactgagctggcagggggccctgggcgacagggccccgtgccagccccaccaacctcctccctccccttgtgtgctctgcagccctggggctgattggactccctctctggcatcaaacttctttgtcacacccccacccttgcctcaggactggctacacagggatctctttctggtccagtcaggcatataagcccaggctgacaggcatccgggtgccagggcagcttcagctggccaaggctgaggtcataggctgagcactcagggcctggcccctcctccctctcattgcaggctcagcccttgccctgcccttctgcaaaattcccctctgacctccctcctgccccacagctgccccacagcaggctctggcttctacctgacaaggcccagtgtattagtttcctttggctgctgtaacaaatcactatacatttagcagctgaaagcaacagaaatgtacaatcttactgttctggaggccagaagtctacagtgggtcctccgggctgcattcctcctggaggctctaggggagaacccatttccttgcctttgctgacttctagcggctgtcccttcctccatcttcagaaccagctacataacatctttaaatttccctgtctttctaccctgcttccattttcacacctgcactgactctgacactcttgtctcccttataaagacccttgtggttatattgggaccacctgataaactctgataatctcctcatctcaaaaccttcaacttaatcacacctgcagagttccttttggcatgtaaggtaacacattcacaggtcctgcattatggacatctttgtgggggtcacacctagctaggatggcgacctcttccctaactagaggaagtagttctgaacacgttaccatgatctcatgctatccttgtgggcagcatggatccccacagtacagatgacaagcctaggtgactccaaagcctgtggccttgttgcaatctctaggttgcctcccagattggaaataaacccctccctcctggagctcccccatggaccctctgctttggcttgcttcccttgggtttgcatcttggtctggcctacaagctccctgaggcagaggagccctggcatggggagtggaggaggaggcactcaggcaccatcagagtagaaggaaacagaggattttgtgggctgtgggacaagtgggctctggaggatctatgattcccctgccatatttgcaacattgtgtgtctgtccatttttctggcagagggagcagaacttccaccagattttcagcggaagctccacctccaaggatcaagataaccccgttctgggctgcccctgatcctccctttcctgggctcccttctctgagcctgcctgtcaccagggctcactcagcaccaggggatgaggcgggggacggtggagagggagtgagatgagaggctgctccatgctgcccccactccgcacctgttgtgcattccagaaggacccactcagatctgtctggccagaaggcaggggaactttctgggccaccttaagccaaggcaggtcaccaaggcagctgaatatgtgcagggacatgggtggggatggcagtgcaaccctgctgtctcctctagattgctcacatctgtctgtgaggcaggcggccccttgctgaaatgcagattgcaggggtagggggcaagagtctgcttttctttttttctttctttctttctttctttctttctttctttctttctttctttctttctttctttctctttctttctttcttttttctttcttttctctttctttctttctttttctctctctttctttctttctttttcttttttttttttgagttggagtcttgctctgtcacccaggctggagtgcagtggcgcgatctcagctcactaacttcacctcccaggtgcaagtgattctcctgcctcagcctcccaagtagctggaattataggcacttgccaccacgcctgactaatttgtatttttggtagagacgggggtttcaccatgttggccaggctagtcttgaactcttgacctcaagtgatccacccaccatggcctcccatagtgctgggattacaggcatgagccaccgcacccagccaagagtctgcttttctaacaagcatccggtgctgctggtccatggccacactttgaatacgaggacctagaggacctgggcctacttctgtccctttctcctctgcattcgttcaatgatttgtgtctttggagctcccacaatatgtcattctccactttccccccaccagcttcaccccctggcactggctgtgagggcctggcggggggtggggggagttgctgcccactctcctttccctggcagggtctggtccctcgggggccgggaatggccttgctcagggcgccgggatgaagtgagcactcctccgctgggcttcctcgtcaccttccatgcttctgccagccctgcgtctctgtggtctccgccctcccagcttttcctgcccttggccctcaaagacatgacttcactcgcctatcaaccagcagtgaccccgcctggaagaaggagggtagagcggccttcgcagctgtgccaatgcagaactggaacacagctctctccattgccagggaaggctgatccagacactttattaggatttcagaatttggggtggagttcgatgaatgacttattacaccttgtaaaacaggaagtgtgttttgagcaatctgccccaatagctggaggcactagtatttcgggtgtgtccccttcacccaagccctcattcctaggcaggtctcagaaagggttccactagcgccccctacaggccacatgatcagggctcggcttgtggtggggtggggagcgcagaaacatgcag

SEQ ID NO: 94078 - DNA, 103928 bp, Homo sapiens
  misc_feature (1)...(103928): n = A,T,C or G
cacagtatttcatacagtatctacagaatatacattcttttcctcagccaatggaccattctcaaagacagaccatttgttaggttacaaaacaagtcttaaaacattctgaaaaaaactgaaataacatcaagcattttctctgaccacaatgccatataactagaaatcartaatgaggaattttggaaacacatggaaataaaacagtatgctcctgaatgaccagtgggtcagtgaggaagttaagaaatagaaaattttcttgaaacaaatgatagtagacatgcaacatatcgaaacctatgggatacagcaaacccagtactaacagggaaatttatagctataagtgcctacatcaaaaaaagaaaaaatatttcaaagaaacaacctaatgatgcatattaaagaactagaaaagaaagagcaaaccaaacccaaaattagtagaaaaaagaaataataaagatcagagcagaaataaatgaatttgaaatgaagaaaacaaacaaaagatcaagaaaacaaaaagttggtgttttgaaaacataaacaaaattgacaaacctttatctagactaactaaaaaagagagagaagacacaaataaataaaattagagatgaaaaaagagacattaccactgacactgcagaaattcaaagcatcattagtggctatgatgagtgactatataccaacaaattgaaaaatctaaaagaaagggataaattcttggacacatacaccctaccaaaactgaactatgaagaaatgcaaaacctgaacaaatcaataagaagtagtgatatagaactaataaaaagtctcccagcaaagtaaagcccaggacctgatggtttcactgctgaacaaatcaataacaagtaatgatatagaattaataaacactctcccagcaaagtaaagcccaggacctgatggttttgctgctgaattctaccaaacatttaaagaagaactaataccaattctacttacactattccaaaaaatagagaagaagggaatacttccaaactcattctatgagatcagtactaccctgataccaaaaacagacaaagacacatcaaataaagcaaacttcaagccaatgtttctgatgaatactgatccaaaaattctcaatgaaactgaattcaacaacacattaaaaagatcattcatcatgaccaagtgtgattcatcccagggatgcaagggtggttcaacatatgcaaattaagtaatgtaatacatcatagcaagagaatgaaggacaaaaatgatcaaatgatcatttcaattgatgctgaaaaagcacttgataaaatccagtatcgcttcctcataaaagccctaacaatactgagtatagaaagacatccctcaatataataaaagccacatatgatatacccacagctaatatcatactgaatggggaaaaactgaaagcctttcatctttttttttttttttgagacacagtcttgctctgtyacctagcctggagtacagtggtgcgatctcagctcgctgcaacctctgcctcccagatgcaaacaattctcatgtctcagcctcaccagtagctgggattacaggtgcatgctaccacacccaaatggagtttcaccgtgttggccaagctggtctcaaactcctagccttaggtgatctgcccgccttagcctcccaaagtgctaggattacaagtgtgagccaccacactggccacctttcttctttgatcagaacatgacaaggattcccactttcaccactcttattcaacatagtactggaagtttgcagctacagcaattggacaagcgaaagaaataaaggggattcaaataggaaatgaagaaatttaattacccttgggtgtgggtggctcatgcctgtaatctcggaactttgggaggccgaggcaggcagattgctttgagacaagcatgggcaacacagtgaaatatcatctctacaaaaaattaaaaaattagctgagtgtgatggagcatgcctgtacatgcctgtagtcccagctaccagggaggctgaagtgggaggatcacttgggcctggggcgttgaggcttcagtgagccatgatcatgccactgcactccagcctgggtgaccgagtgagatcctgtctcaaaaaaaaaaaaaaaaaaaaaaggcggggggaaagaaaaaagaaagaaagaaaagaaagaaaaggaaggaaggaaggaaggacgggagggagggaggggaaagaaagaagaaaaaattttccttgtttttagatgatataattttatatttagaaaaacccaaagtccaccaaataaatattagaactaataaacaaattcagtaaatttgcaggatacaaaattaacacacaaaaatcagtagtatttctctacgccaacaatgaacaatccaaaaaagaaatcaagaaagtgatcccatttacaatagctaaaaagaaaataaaatacctagaaatgaacttaagaagtgaaagatctctacaatgataactataaaatattgatgtaagattttgaagaggccacaaaaaatagtaaggtattttatgttcacgggttggaagaatcaacattggtaaaatatccatactacccaaagcagtctctattaaaataccaataatattcttcacagatatagaaaaaaaatcctaaaatttatataaaaccacaaaagacccagaatagccaaagctatcctaagaaaaagaacaaaactggaggaatcacattacctgatttcaaattatactacaattagctggatgtgttggtgcatgcctgtaatctcagctactcagaaggctgaaacatgagaatcgcttgaacgtgggaggtggaggttgcagtgagctgagatcatgccactgcactccagcctgggtgacagagtgagactctgtctcaaaaaaaaaaaaaaaaaaaaaagaaaaattaaaaaaaaatactatagtaaccaaaatggcatggtactcgcataaaaacagacaaatggaccagtggaacagaatagagaacccaaaaacaaatctataaccctacagtgaactcattttcaataaaggtgccaataacatacactggggaaaaaacaatctcttcaataaatggtgctgggagacctggatatccatatgcagaagagtaaaactagactgctttctcttgccgtgtacaaaaaccaaatcaaaatggattaaagacttatatctaagacctcaaactatgaaatggctacagaaaatattggggaaaatctctaggacattggttaggcaaaaatttcttgattaataacccacaagcatacgcaaccaaagcaaaaatgggatcatatcaagttaaaaagcttctgcacagcaaaggaaacaatcaacaaactgaagagacaacccaaagagtgagaaaacatatctgcaaactactcattttgagatatcatctcatcccagttaagatggcttatattcaaaagacaggcgataacaaatactggtgaggatgtggagaaaatggaacccttgtacactgttggtgggaatgtaaattcgtgcaaccactatggagaacagtttggaggtgcctcaaaaaactaaaaatagagctaccatatgattcagcaatcccactgctgcgtgtatacccaaaagaaaggaaatcagcatatcaaagaaatatctgcactcccatgtttgttgcagcactcttcacaatagctaaaatttgaaaacagtcaaagtgtccatcaacagatgaatggataaagaaaatgtgatacatatacacaatatagtattattcagccataaaaaagaatgaaatcctgtcatttgcaacaacatggatgaaactggagatcattatgttaagtgaaataagccaggcacagaaagaaaaacatcacatgttctcacctatttgtgggatcaaacaatcaaaacaatttaactcatggaaatagagagtagaaggatggttactagagactggaaaacatagagggggtggggatgttggggggcaggtggggataataaatgtgtacaaaaattagaaagaataagatctactatttgatagcacaacaaggtgtctgtagtcaacaataatttaattttcatttaaaaataactaaaacagtataattgttttgtttgtataataacacaaagaataaaatgcatgaggggatgagtaccctatccttcaggatgtgattatcacacattgcatgcctgtatcaaaacttctcccgtacctcatatatacatgtaccatctacctacaaaaattaaaaattaaaaaaattatatggaaccacaaaagacccagaatagccaaacctgtcctaagcaaaaagaacaaaactggaggaatcacattacctgacttcaaattatactacagagctagagtaaacaaaatggcatggtactggcataaaaacagacacatagatcagtagaacagagcggagaacgcagagataaatccacacagctacggtaaactcattttcgacaaagttgccaagaacatactctggggaaaggacagtctcttcaataaatgatgctgagaaaattggatatccatatgcaaaagagtgaaactagatctctatctcttgccatttacaaaaatcaaagaaaaatggattaaaggctgggagtggtggctcacacttgtgaggccaaggtgggccaatcgcttgaggttagaagtttgagaccagcctgggtaacatggcaaaaacccatctctatacaaaatacaaaaattagctgagcatggtggtgcacacctgtagttccagctaatggggaggctgaggttggaggattactagaactcgggaagttgaggctgcagtgagtcatgagcatgccactccactccactttataacacactgttgtctacataaggctagctacatcccttaatcttaaactcccaccgctttcagacactatcataccccgccccccttccccccgcgaacccccgtgcattctgggactcatggtttggtgagtgttgtccaggaatggctacaaacccacattactatgatatcggacttctacttgtgtagtcatttgttagttaactgtacattttggaaggtttttgagtagagaagtgaaataatccaacgtttgggaagattttcttgtgcaggattggaggaggacgggaaagagggaaaaagcattgcgcgcgtgtgtgtgtgtgaagttattacaactatctatcttgaagcatgcgaggtaggagggcctgaattgccatgaaacgcaatgacgataaacgaagggacccgtgagaaaggggcaaagaggtgtctcaataaaataagcaacggcctgctgtgggaggattcgggtctcagtataggctgccactgtcagctttgtaatattcctcgagcctttatccatgagtaggacaggatggctctaccttgcagggttacagcatggagctgcgggactgcgccggcagtgcgctgagtagcatccctgcgatagggtgagtgcaccaacccttgttgtctctcttagtaagaaagaggaggggtagataatagcatcttcaccccagtagttgccgtaagtagtaatgctaagaatccggcacgtcgtaggcatcaatctcagtccgccatctccccttgctaccacgccaggaggtacacagaggagactgccccgactggcaactcccgcgccggggttccctggccatcctcccgcgttccctccagccgcgcgctgttgccagggcccgggcaccgcccagctccactacggaccaatggcagcgcggcttgggcaccgcccagcttcagcggaagccaatggaggcgcggcgcgggcaccgccctgatccggcgcgggccaatagcggcgtggcccgaagcgggggccgccccggtcgggcggggaggcggggaggtggccactggctccgccccgctcccctctgacccggtgtctagtctctccgtcttcctgttccaaaccacgtggacgcgtctgggctgctggaggcagcccgagccgccgccgtcggtgtcgccgccaccaccaccatcggagtcacgagtcccgcgtctgtccgaagtcgccgctctcgggctgctcacgtctcttcggagagcgcgcacatggcgactcaggcgcactccctcagctacgcagggtgcaacttcttgcgccaacgtctggtcctgtctaccctgagcgggcgccccgtcaaaatccgaaagattcgggccagagacgacaacccgggcctccgaggtaacttggtgtgggcggcgcgcggcrtgggcgcgggggctgaggggagaccgagctgatgccgtgggggcccgcgcggtgttggttgggcggctcggcgtccggcgagcgcgtcggggagggcaggtggcgcgtcgcctccaaagccggaggggcaggcacagtgggggaggcggggtcggggcccgaggggagcgctcagctgcaagctgcgctcggcgtctccggggcgctggtagtaaacagctgcacgttttccagctttacgtgtagcaacaaatccctggcgtcgccccttcgcgtcccttcggcccctcttgccctcgccataaacctctcaaaggagaaaaacagtttgttggaccgaaatatggtgaatgagccgggggagagacattgggagagaaaagtaccttgggttggttctctgccctgtctcaaagcagttctcagaagcagctgcccccttggacaccggctgttcctgtcgccatgatttctcggctgccctcacacttgtccttgggtgtggataaagaaatttttaaaattctgtgtttgttttcagccktgactgtgattgatgtgcgcaggacaggagctttgagatagacttttaacagtcatgggcctaattgccttgactttagaaaaggggtcggtgacaatcgctaaactgcaggcttccaagctcacttcttgctctgcaatggtaggttaaaaagaaataggcccatttaaacccacatctcattaaatggcgccggttttcaactggccttggtttacacctggccccctggcatgagatacatgcatttaaaagcttctgactggtggttatcccaagttgggcgagtcagtagtcaggtgaaaaaggaaaaaacctgtctgtaaattgaaaaagagtgtttgtggttggtcctggaagcttcctgagcggcgctgatgtgtttcattttgcactggctcttgttttatctgtctgaatgcattttttggatagttagatctctgcctctcttgggtggtgattggctgcacataaagggcagaagatgccatgctattgacggagataggttaggaaggaaagaagcagaatatcccaggtacagtggtgagaaacctagtgatggtaggaaaaacttgtgttggtggttcctgtcctctctctactgctcaaaaacactgagaaagttagggagagaccacaaatggtttatgccacgacttttccgtcaacaagtgttccacttagtttgacccttgggcaaagtgtttgcttgattgctgtgtggcattctcagccagctctccatccactttaccctcaggttagctcagagaacttgccactagctggatatggtaagaagatggacttctactttgtataaaagtaggcataacttttttttttttttccagagaaatggaagtatagcctggaaacctgggttctctaaaatgaatctagttctatttagagtttttctattgacaggtggcctccaatttaatatttaatgttccaaagtatgcttctccttctccccctccactgtatgtgagcrtctcttcaaagcatctcacacatatgagctcccgtttcttccaagaacagggcttggccacttggcactttcttgaaagggtgtcagacgctgatacctgagggaggtagaactgcttggcaggtgtgctggtattttatggggaacattactgtagagcattatttgccttaccccgttcatataccaggggaagaaagagactcctagttatttgtacatccttgcgctggcttcagggcctcagaaaccttgtagatgtttgtctgcttaatttctttctttttttttgagacagagtcttactctgtctcccaggctggagtgccgtggtgcgatctcggctcactgcaacctccgcctcctgggttcctgcaattctcctgcctcagcctccctcgtagctgggattacaggtgcctgccaccatgcccagctaatttttagtagagtatttttagtagagatggggtttcaccatgttggccaggctgtatgaaactgctgacctcaggtgatccgcctgccttggcctcccagagtgctgggattacaggtgtgagccgctgcgcccagcctgtctgcttaatttcttacagagggaacagagagatagatatgcatttgcagatatacatgtatatgtgtatatgtatacacatacatgtaagtgtatatacatatacgtgcacgcataaatagatgtagtccctgacacatgatttctggtcataatcaagggagtccttggtagcttgattgaagatgtagccggaagcctatgttgcccgtcatctgtccctttctgacttttcctaactcagattctcagagttggaaaaaactcagagcatatccaataaaatcttcagttctaatgcaagaatcacatctcttcaaggtgcttgcttaaaacatccctcatggtgtgggctttggagggtagggatagtatgggaggctttcggcctcaggaacatttatttagaaagtgtttattgagccacagtatgtgcaaggctttgtatgggggtgagtgtaatatatgtgagaagctggttgcccctgttctcatggagcttgtcatgtaagtaggatgttactaagtttgagtaacttgaagtaggaaggattgagtattgtacaggggctcagtggagttcagagcagacacttccctgaaagttacgaaggaaggcaggttttctggacctgatctggacagataggattgagatggtggctgcggaaatcattgtttgcaaaataaacagttctttttttaaagaaattttattttagagtcgggggtacatgtgcatgtttgttacatggatatattgcctactggtggggaytgggcttctggtgtacccattatccaaatagtgaacatcgtacccaataggtaatttttcaayctccctcaatcttcctccttttccagtccccaatgtttgttatttccatgtttaagtccatgtgtatccattgttcagctcccacttataagtaagaacatggagtatttgattttctgtttctgaattagttctcttaggataatggcctctagctccatgttgttgcaaaggacattatttcattcttttttttgagacagagtctcactctgtcatgagtgcagtggtgtgatcatggctcactgtagcctcaacctcttgggctcaggtgatcctctcacgttagcttcctgagtagctggaactacagatgtgtaccacagcatctagttgatttttaaaattttttttgtagagatggggtgttgtctatgttgccgaggctggtcttgaackcctggactcaagcagtcgtcctgcctcagccttccaaattgctgggattacaggcatgaataaccatgcccagcctgatttcattcttttttatggctgtgtagtattccatagtgtatatataccacattttctttatctagtcaaccattggtggacacttaggttagttccatcactttggtattgtgaatagtgctgcaataaacatacaagtacaggtgccttttttgtataatgatgtcttttcctctgggtagatacccagtagtggaattgctgggccatatggtagttctatttttagttctttgagaaatctccatatgaaagaaacagtttttaagtcaaaaagttctttattttctttattttactgaggtaaaatccttaatttgtcatggtcataatacttggcaattaagagcttggggtcagtattggaccttggtttgagtacgagttctgcctttcgctattagctcttggtccttgggcaaattattttaactattctcttctgagcctcaactttttcacctgtaaagtggggccagtactactgacttcacagggttattgtgaggactaaatgaaataatacttcaaagtgtactgaacagtgcctggcacataggaagaataaatgttagctgattttattattatgtagcttgaacccactgggtataggtctgctccctggcatgccaaatccgttcctgcttctatatggaaatttttcagatatttgaagagaattatgccttctgtaaagttcttctcctaggtggttgtttccacgtatttctatgttatatgtaaagcacagtagttttcaaccaggggcacttttgttcagtgggggacatttgggagcatttggagacatttttggttgtcacagcttggcagaggggaatgctactggcctctagtggttagaatccaagggtgctgctaaatatcctacaggacagcctcccacaacaaagaattatccattcaaaatgtcagtagtgctgatgtagaaaaaccctggcctacttgacagtagtaattaaaccttttcttttccctgtatccctaatgattaggaatagcagcatgtgacaccaagaagactacacaaggatttagaaacaaatgagacacagatcaaactctgtgacttcaggcaaatcattgaatctcttaaaactgtccccttccattgcaaaggggttgtaaatactgaaaggaatctgaaccccaaagaaggatggtcccgggctggtgattataattgtccagccacatgtataatttatgcttccgttttgaggaacatgaacaattaagtttatctcattgtactcttcctttcattgaagaggaagtaaatattttttcttgttgctgctgttttactcaaggtaaaaaagccaacccgtagttaggtaagatagttggtgaagacaaacgtgtagtgagggacagagctggaaagagaatgtggccagctcctgcctgaaggacctgttctctctcatttcacagcgtgatggacctgggtgttcctcatcagtattataaagcagctgtccaaagtgcctctatctctggatttcatgaggactgtgtcctgcagggttcagtttaacagtctctgtataatgtgaggtctaaatggaagagaatcccaccagaataattgtttaaagttggaatagcagaaataatggacttgaacaagagcagtgacataggagtcagaagacaggactgctactacccaggatcctgagcaggtcatgtaactaagccttagtgtcttcccctgtgaaattgagaggagttacttggtcccatgggggagtgctccatatggcttaagcagataagattctgaaaaagaagagctaagtggagttttaatcaaaagggtcctttaaaatgtgctgaggaagcatgccacaaagaggtcctttgaaaggtaaaacatgttttggtaaaccagtgcattgttttgggaataaatctggctgttcctaacttggatcctttaaaaggaggatgtgcctatattttatttcggcctggtttgggacccagaattcttgatggacaactggttttggggcgtaacagataactttactactaactgtagattgaatatgtcctgttaatcaggaacatacccttttgtgcctctgatgacaaagtatgcttccaagtgatgatttttggctgcccaaaataagacttcttcttttttttttttttttttaaaggcaaatgccaagaatcctaatgaccagttttcagatacagtgttgtttggaagctgttgtataaatgccttgccttttcttttcttttcttttcctctctccctccccttccctccctccctgtcttctttcccccttcccccctctctccctcccccatccctctccccctccttctctccttccctccccttcctctccttcctctttttctccctcccttccttcctctctttctcttttcttctttttcttagagatgggatctcactatgttgatcagagtgatctcaaactactggcgtccagtgagccttctgcctaactgtcccaaagtgctgagattacaggcaagagccacagtgcctggccgtaagtgctacttcagatggaactatctaccatcttttttaagaaaacaaactttttattttgagataatcgtagattcacatgcagttgtaataaataatgcagaaagatcctgtctgtactttatccagtttcccccaatggtgatatatggaaaaactatggtacaatgttagaactaggatattgacattgatacagtgagatacagaacatttctgtcactccaaggattcttcatgtctgttgctcttttgtagccacactcagtttcctccttcccccacttcttccttaacccttstcagtctctaatctgttctttaatttctgtaattttgtcatttgaagactgctccataaatggaatcatatagtatgtaacctttggattggcttttttctgttttcttaaattttatattataaattaaaaaaatttttaaaaagaaaaaacttgaagggccttgaatgagtcctgtatttttattttttgtcactacctccctgggttgggagtgggtaatttgcatgcttgctaccttccttggatgtggtagccatttctcagactctgactctggaatcaaaccctgattccctgtcacccatggtcaccgtggtaggcatggtgactatcatcaaaagttgatatggcagacgttcatatgggttgttgctgccacatgggagtgtgtgattagcctgaggttatctagagtcactataaggactggctttttttcagtcagcatgattctctggagatttatctaagatgtttttatcaagtttgttcccttttgttgctgagtagtatttcatggtatgaaaagatcacaagtctttttatttacctgttgaaaaacatgtaggttgtttccagtttttggctatctcgaataaggctgctataaaaatttgtggacaggtttttctttttttttttatttttattttttatggtgtctagctctgttgcccaggctggagtgcagtggcacgatcttggctcactgcaccctcccactcccgggttcaggcgattctcccacctcagcytcccgagtagctgggattacaggcacccaccaccatgcccagataatttttgyatttttagtagagacggggtttcggcacgttggccaggctggtctcgaactcctgatcttaggtgatccacccacctcagcctcccaaagtgctgggattacaggtgtgcaccaccatgcccagccaggtttttttatttttttatgtgaacatagtcttcctttctctggaataaatgcccaggagtgctcttgcagggttgtatggtagttgcatgtttagttttttaagatattgctgccctgttttccagtgtggatgtattttttttttttttttttgagatggaatctcgctctgacttccaggctggaatgcagtgatgtgatcttggctcactgcaacctccgcctcccaggttcaagtgattctcctgcctcagcctccagagcagctgggattacaggtgtgcaccaccacacctggctaattttttatatttttggtagagacggggtttcactgtgttggccaggctggtctccaactcctgacctcaagtaatcctcctggctcggcctcccagagtgctgggattacaggcgtgagccaccacactggcctggatgtaccattttatattcctatctgtagtgtatgagggattcagtttctctgcatcctttctagcatttggtgttgtcactacttttattctgataggtatgtagtgatgccccagggtggtcttaatttgcgtattacaaatgactaatgatgtcttaagtgaaacatctttccaagtcttttgtccatttctaataggattgtttgtattaactgttttgttttgtttttttgagatagggtcttgctttttcatccaggcttgagtacagtgacacgatcatggctcactactgcctcagcttcctgggcgtaagcaaatctttcatctcagcctcccgagtagctgggactacaggcacataccatcatgcccggctaatattttaactttttgtagagatggagtctcgctatgttgtccaggctggtcttgaatttgtggcctcaagccatctttctgcctcacctttccaaggtgtaattcctaaggtattacaggtgtgaaccacggtgcctggcctctactgttgcttttgagactactttatatatgctagtcttttggcagatttgtagtttgttaatattttctcccactgtgcaccttgtcttcttattatcttaatatggtttccagaggaaaatattttaattttaatgatgtagaatttatgatttttttcttttgtggcagtgcttttagtgttaagtctaagaactctttgcctagctttaggtgcgagacttgggttgcgattcttttttttttttttttttgcctatggaaagccaattgcccaagcatcatttgttgaaacggcatcttttttccatttaattgcttttgtgcctttgtacaaaatcagttcagcatttttgtgtggatctctttctgggttctccattctgttccattgatttatatgtctgtctcttgccaacacgacacagtctttttttctttttttttgagacggaatctcgctctgttgccgctggagtgcggtggtgcaatcttggctcactgcagcctccgcctgccaggttccagcgattctcctgtctcagtctcccgagcatctgggattataggtgtgtgccaccacgcctggctattttttttttttttttttttttgtatttttgtagaggcggggtttcaccatgttggccaggctggtctcgaacttctgagcccaagtaatccacccgccttgggctctcaaagtgctgggattataggtgtgagccacagctcctggccagtatatcacacagtcttgattacttactgtagctgtctaatgagtcttgaagttggttagactgattcctcccagtttgtttttcaaaatcattttagttattctagttcctttgcctttcaatataaattttagaataatcttgtctaatatacaaaaaagctttccaatattttgacaagaattatattacacccatatgtccatttggggataattgtcgtctttattatgttgaggttttaatccatgaacatgatctgtctctctacttacttaaatctgtttcttttccccagatgaaatattataggtttatttaaaacataattctcatcctgagatgagaaatgttcatttgttcacaaaatgttcatttttcaatgtttacaaaatgttcatttttttttactttgttatttacaaatatacggaagtagtttacttaaatttttattacatatttattaaggcaggtaactacatagaaaaaaattttattctgtcttaagcatacttgggaataaaccatttgacaaattattgcacatctgaaaccacagtgcataacaaactacaaaaaatggtaagttttgttttgttttgtttttttaagacagggtcttgctctgtcgcacaggctggggtgcagaggtgcgaccttagcctactgcaaccttgaattcctgggctcaagcaatcctcttgcctcagcctcctgagtagttaggactacaggtgtgtaccaccacacttgggtaatttttttctttttctttttcctttttcctttttttttttttaagagttagggttcactgttttgtccaggctggtctmggaactcctgggctcaagcagtcctcctgtcttggcctcccaaagcgtcagaattacaggtgttgagccactgcatctgaccaaaatgttaaagacataaacaaggcttatttatcttacttaggtcataaatgtagatcagaagacaaaagtagattttccttgtcaaagtatgcagcagtttcagaactttggcttccttgtttagtgcttttagaaccaagactaaccaagcaccattatttaggatattaacacacattttctgtatctgaatttcttcttctaacatcataataatgatttttagaaggcaaagagaatacaaggtgatcttcatgcttatatcgtattaaaacacaattcaagggaattctagttttccctcccctcaacttagggatttcatgtatacccttatatccacaacttccagtcacctgcttggtgttttctaagtccaggaatattcaagttggatttagaattggagtgatagtagatccaatcacagatcccaactgttctttgatttttatcttttggattcctaatttttcttgattattcactcacaagttgactsagttcagcacttgaycatgattgtagtgcttcccaggtggcctcctcttctcactggggaggcagtgtgaaaggtaaaaaaaaaaaagctactgaattctcttctggcggcgtgggtcatatccactgtttgtgatttaaaagtgcttcatgtggaaggcaaggcagtctgacctggaaaatgcagggttgtacttctggcattggaacgggctgttccctgtgtgttggcaatagtgcctggtcagttcatctgagaggacagatttccactcacggccatctcaggcccagtggtaaggtttctcatctgtgtaggtttgcggtgtttcttgaggcgagagctgtctgtgtaggttttgccgctgcctatgtaatcccaagtgtgggtagtgatcttttttggcttgtgctcctccaagatgcaggaacagggtgccacgagctcttggtaacggagcagcgagacctgcagctacatctggtcgggcaggaagagtgggaagttgggctgggtggcacagaagcccaggggagcagcagcacagggtgacagtccctgctgctcagcagttccttgggacccagggtcggaatagtcttggtaaaggagctgctatccggggggaagtcgcctttgggcattgctgaaagcggggcctgtgcccaggtgggcctctatgggccagacgttggaggcctgcggctgtagggtgcccccactgctgagtgggtgccrgcacggctgcctttgctcacactgaagaccaaagagctgccgaactcgttcccaggggcrctccttgacgctgtccacatggaacttgcctgccagcctgccggctgcggtggaacttacacgggttaagttctgggcgcgggagccctgccgtccagtcgcccaggggtctcacgctgttgaagtcctccaggttgaagggagctgtgggcggggcccacactcccggctgtagaggaggcctccgccggtgttgcccggtccaacgccccgatgcccctggcctgcatggctagtcaaagcggccggtggccggtgcgctggtggggaggacgatcggctgacgccagcgaggacacggtggcggccactgactcctgccggagcagcgaattggaagggatgaagtcctggtccatgaggtcatgggactcctcccatggaatgtggcattgctaccactgaaagctacgccaactcagccgctctcccaagtctgtcaccaggtcatrgggtggctgggaagcaccaggggaagtcgctttatgtggagagcacctycaactgccggacggtgtcttctgcttcccgttgggtggaatgcaacatggagagagactggaacagtgggtcactgacagccatgtcagacttgctaggtggctgcctcattaatgtggggccctgaaggccctcaggagcccgaagcagcaggggtatctcaaagccaatgaagaggggatagaaagattagaaatgaagcctccagcctgggcaatgtggtgagaccccatctctacagaaaacaaacaaaacaataagcaaaacaaaamaaacaaacaaaaccaaaaactttggttggtgaggtgggacctgtagtcccagctacttgaggaggctgaggcaggaggatcacttgagcctaggagttccaggttacagtgagccgtgatcatgcttctgcattctagcctgggtcttccagcctgtctctaaaaagaagaagaaggagaaggggaaggggaaggggaaggccaaaaccaaaaaaccccaaatttccagagatccttctttggatccttctttggatcaaatattagttggagacagctttaaaaaaaagttttatatacaaaagtttttagaaaactaaactcttatagaaatagacaatcagcagggtaagtaggtcaagtggccagsctgtactctctttgactcatcagttccctcatgctatgggcacagggacagtgggcaggtagctggtcaggtgactggcagtggtgggtgtagctgagggcttgcgggtggtgcagtgcatgctggtggatggaggaggggtgagaagagcatttgaccattcttggtgctgcgactgcctgccactacctatcactgcctttgttccccagaggccagcagctgtgcttgccttgtcagtctggggaactcagagtctttatttcttttgttgctgttatatagttttcagcatacaagtacagtacatgttttgttagaattgtttgtaaatatgttgtttttttggagcaattgtaaatggtgtatcatattttaaattttagtttctgtgttgattattagtatatagaaataccattggggtgtgtgtgtgtgtgtgtgtgtgtgtgtttgtgtgtgtgtgtgtgtttgtgtgtgtatgtttatctggtatcttccagcattgctgaatttatttaggaggtttttttttcccttgtcatttccttggaatttattttctgtgtagctggtcatgttgtctacaaatagtaacagtttgatttcttcatttttgatatgtacgccttttatttccytctgccttattgcactggctagaatttctagcaccatgttaagtaaaatgggtgggagggaacatccttgccttgttccctatcttagggggaaagcatccccctaagtatgttagctatatgttttatgtagattttaaaaagtcaagttgagaaagtaatcttttataacagtttttctaagtgtctttttaaacaatgaatgagtgttgtattttgtccaatgctttttctgcaccagttgatgtgaccatgtgatttttcttcttcagcctataaatatggtrtattgccttgattgatatttaaatattgaaccagccttgcattcctggaatagattctacttgatctacacacacacacacacacacacacacacacacacacacacacacacatatacttacatatatattgctgaattttatttgctaatgttttgttaaggacttttgtttgtatgttcgtgagcaatattgctctgtagttttttttttgtgctgctttggtctggttttggtatcagggtagcgctagtttaaattaaatcaattggaaagtttcctgttttctgaaagagattgtgtagaattgtttttaattctttaaatgtttggcagaatttcatatgggccaagagatttcttttttgggagtttttagattatgcatttcatttcctgaatgtttatagggctattcaagtgatgtattttgtatgtgtaagttgtggtagtttgtgttttttgaagaagtggtccgtttcatctaacttgttgaattaatatgtgtagagtttacagtgtttccttattatccttttgatgtctgcaggatctgtagtgatatctcctgttttattcccgatgttgctaattgtgtttgtctgtgggggcgtgggggtgtcttgtctgtgtcctcaccttttagttcagtcttgctggacgttgtcaattttattgatctctttaaagacccggttctgtgtttctctgatttttctatcttgcttttcagttttcaatttatttctgttctttattatttccttccttcacttgctttgagtttattttgctctttttctaagtgtttgaggtggagcatagattattgggaactttttctgtttcctagtgtatgtatttaaagcaattacatttttgtctcaacattgccttagttgtatcccataaattttggtatatttcattttagttttcatttaggtcaacgtaatttttattttctttgaaactcctatcctttgacctatggttatttttatttttatttttttgagacagagtttcactcttgttgtccaggctggagtgcaatggcatgatctcagctcaccacaaccttcgcctcccgggttcaagtgattctcctgcctcagcctcctgagtagctgggattacaggcatgcacaamcacacctggctaattttgtatttttcgtagagacagggtttctccgtgttggtcaggttggcctcaaactcctgacctcaggtgatccgcctgcctgagcctcccaaaatgctgggattacaggcgtgagccmccgcgcctggcagctatgggtcatttataagtctgttgtttagtttccatgtgtttggatattttctgctattgattttaatttcattccattacggtcagaaaacattctctgtatgatttcagttctgttaaatttattgagttttttttaatggtccaagatatagtctatcttggtgtatattctgtggacacttagaacaaatatatgttcttctcttgttgggtggagtgctctataaatgttgattagatcctatcggttcatggtggtgctgagttcttctttgtccttgctgatttttctgtctagttctattgattattgagagaggggtcgctgacaataattgtggatttgtttcttgttcatttctatcaatttttctttgcatattttacagcttagtttgatacatttaggattgctaacatcctcttagtgctacattgactcttttattatataatgtatcactctgtctctagtattttttaattttttattattttttttaagacagggtctccttctttcatccaagctggagtgcagtggtgtgatctcgcctcattgccacctccacctcctgggctcaagtgatcctcctatttcagcctcccaagtagctgggactataggtgtgygccattatgcctggctaatttttgtattttttgtagagacagggtttcgccatgttgcccaggctggtctcggatctcctgagctcaagtgatccacctgcctcggcctcccagtgtgctgggattataggcgtgaaccactgtctagtagttttttagggtgaaagaaatgctctagtaaaatagggatagagagggattactttcttccattgtgttcatgaggactagtattgaagagttcaggtataaaaaacttgaaaggcagtaaaagcagcataaatcagaggattaggttgcccttgattgtgaaaattatcacaatcaagggtaatgtrgattytcatataagcaaagcatgatatctagaaaartttgaagatagagggcaaagaagtttttgatttcatttttatattataaaagtaatacatgtttgtttgggggaacaactcttaatgatttaaaactgaaagtaatctgtgcaggttacatcctttattgcctctggctacttaactcttgctgtgttgctcaccaatcatattcccaagaagcagtcttccagacctttttctatatgtgcactttttttttaaagcacaagaatattatcattattccattgcagtatatgagcttcttaaggttttttttttaatggctacagactgttccataatacagacataccaatttatktaaccattcccttagctatagatactcagtaatcttcagtgtttgtcattaaataaagcagcagtaaagttttcttacatatatcctaacattcttctgtttccataggtagagtcatagatgtgaaattgcttggctagagactccttttttttttcttgctttttttttaaatggagtcttgctctgtcgccaggctggagtgcagtggcaagatcttggctcactgcaacctccgcctcctggattcaagcgattcccctgcctcagcctcccaagtagctggggctacaggcatgtgccaccacacccggctaattttttgtgttttagtagagacgggatttcaccaagttggccaggccggtctcgatctcctgaccttgtgattcgcccgcctcggcctcccagagtgctgggattacaggcgtgagccactgcacccggccaagactatgctttttaaaaaagaaatagaaaaaatggaatgcgagatcgaatcaaaatatatgaaattctcttcattaactggcaacatagcctttcccttaattgatatttcttccctgtattgatatcttcttttactttttttcttgagatacctttaatggcttttctgtgtcatgaagttagagacatgattgggttttttctttgctttttgtttgttttcaagatggagtctcactctgtcacccaggctggaatgcagtggcgtgatcttggctcactgcaacttccacctcctgggttcaagcgattcttgtgcctcagcctcccaagtagctgggattacagatgtgcaccactatgcccagctaatttttgtatttttggtagagatggggtttcaccatgttggccaggctggtctcgaactcctggcctcaagtgatcctcaagtgatctgcctgctttggcctcccaaagtgctaagattacaggcctgagccaccgcatcctgccagttttcgtatttttaaaggtattttttctttcaactttgtttttcatttttttaagtaaatttttaccgaagcgtaccatatattaagaaaagtgcgtaaccaataaatgtacagtttgatgagttattactgtggacataccgatgtagctattacccatgaaaagaaacagtatgccagcatcctcccatgcttgtgcccagccacaccattccctcccactgccaaggtaagcattaaatttttaacaccatggattaggtttctaaaatattaactataatttttgtaaatggaatcatatagtacgtaattgtttgtgtgcctggcctctttagctctgttgtatttgtgacatatctccgtgttgtagcagcagtttgttgactttctttactacgtcatgttattctgtttttttaatgtgccacaatttagttttgatgaaaatttggcttgtttccacttttaactattaaaaacagtgataccaagaatattcttgtacagtcttttgtgcacatatatgtgtatgtctcttgcctgaatgctggatcgtagggtgtgcctatgtttagttttcccaagtggttgtacaaagtgactgtaaatatatctgaggtctagttactccacatcctattcagcacttggtattgccagtctgtttaattttaaccagttttgtaggtgtattgtagtcattcattgtggytttaatttatattaccctgtgactaatgagactgagcaccctttcttttgctttcattgtttttaatgatcacaaataattgtaggtatttagtatttattgggcacagtgtgatattttgatacatgtatacagtatataatgataaaatcagggtagttagcatatccatcacctcaaacatttctttgtgctgaaaacattcaaaatctgttctagctatttgaaaatatacaccagcctgggcaacatagcagaccccatctccacaaaaataaaaataaaaaattagccaggtgtggtggtgcacacctattgtcccagctactcaggaggctgaggtgggaggatcacttgagcccaggagttggaggttgcagtgagtcatgatcacaccactgcactgggcaatagagcaaaaccctgtatctttgcaaaaaaaaaaaaaaggaaaaaagaaaatatacagtaaattattgttaattatggtcactctatagtgctatagaacattagaacttatttctcttatctacctgtacttttatatttgttaaccagcctttggctatccttccttctcccctccctttccccgcctctagtaaccactattctatcctctacttgctatgggatcaacttttttagcttccacaagatatgtggtatttatctttctgtgtctggcttatcttacttaacatartgttctacaaaagcctcttcatgttgctgccagtgacagaatttcgttcttttttatagctaaacagtattccgttatgtatgtgtttgtgaatagtggtttaataaacctgagagtgcagatatctcattgacattgatttctttccttttggtatatacctagtaatgggattgctggatcatatggtagttcaattttagtttttgaggaatatctgtactgtttcccataatggctatactaatttacatttccaccaacagtgtatttaagttccttctttttgtatccttgccatcatttgttattttttgtctttttaataattgccattctaactggggtgagatgatatctcattggggttttgatttgcatttccctgataattagtgatgctgagcactttttcatatacctgttggccatttgtatgtcttttgagggatgtctattcagcttttttgctgacttttaaaattggattatttgtatttttgtgtgtgtactggtgagttccttgtatattctggttattaatcccttgttggatggatagtttgtatttttctttcatagcttcactccaatggtttcctttgctgtgcagaagctttttagtttgttgtaatcccttttgcttttgcctagtttttcttttgttgcctatgcttttgaggtcttctccagaaaatgtttgcccagagtaaacrtcctgtaatgcttccctaatgttttcttctagtagtttcatagtattggatcttacatttaagtctttaagttcattttttttttaatatgatgagagtaggcatctagttcctttcttctgcatatggctatagttttcccaggaccattatgtatatttttaaattttagaaatagagacgaggtttcactatattgtgcaggttggtcttaatctcctgggctcaaacgatcctcctgccttggcctcctgaaaggctgggattacaaagtttgtagtatatttcaaagtcacgtagtgtaatgcctcttgctttgttcttttttctcagaattgctttggctgttaaaggtcttttgcgggtccatatgaatattaggtttttttttctgtttctgtaaataatstcattggtattttgatagggattgcattgaatctgtagataaagatggaatgtgtttccattttttttgtgtgtgtcctaaagttttccttttagagagctttcacttccttggttaaatttatttctaggtattttatggttttttttagttcttgtaaatgcgattgcttattgatttctttttctgctaattcattgttagtatgtaaaaatgttactgatttttgtgtattgattttatatcttagaactactgaatttgtttatcagttctaggagttcatggcagtactttaagagttttctatatataagatcatgttgtctgcaaacgggaacagcttaacttcctccttcccgatttggatgccctttatttctgtgtcttgcctaattgctttggctaggmtaggacttccagtactatgttcagtaggagtggtgatagtaggcatccttgagttgttccagatcttagaggaaaagctttaaaatttcccccatttgatctaattaaactaaagagcttctgcacagcaaaagaaactaccatcagagtgaacaggcaacctacagaatgggagaaaatttttgcaatctacccatctgacaaagggctaatatccagaatctacaaagaacttaaacaaatttacaagaaaaaaatcaaacaaccccatcaaaaagtgggcaaaggatatgaacagacacttctcaaaagaagatatttatgcagccaacagacacatgaaaaaatgttcatcatcactggccatcagagaaatgcaaatcaaaaccacagtgagataccatctcacaccagttagaatggcgatccttaaaaagtcaggaaacaacaggtgctgaagaggatgtgaagaaataggaacacttttacactgttggtgggagtgtaaactagttcagccattgtggaagacagtgtggcgattcctcaaggatctagaactagaaataccatttgacccagccatcccattactgggtatatacccaaaggattataaatcatgctgctacaaagacacacgcacacgtatgtttattgcggcactattcacaataggaaagacttggaaccaacccaaatgtccatcagtgatagaccggattaagaaaatgtggcacatatacaccatggaatactgtgcagccataaaaaatgatgagttcaggtcctttgtagggacatggataaaactggaaaccatcattctgagcaaactgtcgcaaggacagaaaaccaaacactgcatgttctcactcataggtgggaattgaacaatgagaacacttggacacagagtggggaacttcacacaccggggcctgtcatggggtgggggraatgacgagttaatgggtgcagcacaccagcatggcacacttatacatatataaccagcacgttgtgcacatgtaccctagaacttaaagtataatttaaaaaaatacaataaaataaaatttcccccattcagtatgttagctgtgagtttgtcatatacagcctttattgtgttgaggtgtgttctttctatacctaacgtaagagtttttatcatgagggggttttgaaatttaaaaaaattttttttagagatagggtctgacttygttgcccacgctgaagtgcagtgatacaagcatagtttactgcaaccttgaactcctgggctcaagcaatctttccggcctggtctccctacaggtgtttgccaccatgcccggcttttgtattttttgtagagatggcggtctcgctttgttgcccaggctggtcgccaactcctgggcatgatcatcctcctgccttggcttcccaaagtkttgggattctaggcatgagccacagtacttagcctcctgtccttataaaaattgttttctggttgattcgtgtctcctttttttcttcccgtcttattgtttrtcattgcagtttgatggttttctatagtgataaggtttgatttttttctctttgtcctttgtgtatttgttctaccagtgagttttatactttcatgttttttcatggtagtgattatcattttttcatttctagatgtaggaccttcttgagcatttcttgtaaggcctggctaatagtaatgaatttcctcagtttttgcttgtctgggaaagacttcatttctgaaggatagcttttttgggtatagtgtttttggttgacgttttttttttctttcagcaktttgaatatatcatcttattctctcatsgtctataaggtttctctggagaaatctgtttttagtgtaatggggatttccttgtattaacttgatgcctttttctcttgctgtttttagaattctctttttatctttcacttttgacagtttaactattaatatgccttgggaagacccttttgggttgaatctattttggaacctttgagcttcctagatctgtatgttcatacctcttatcagccttgggagcttttcacctatttcatttggcaggctttctgtgcttccttttttctcctcctggaactttcataacatgaacatttgtttgcttaatgatttcctgtaagwcttgtaggtgttctcatttcattttcattctcatttcttatttctttgagtaggtaattttgaaagacttatcttcaagttcagagatttgtgtcttatgcttgatcatgtctgctattttagttctattatatttatttcattcattgaagtcttaagctgcagtatttttcttttctttttttttttgcaactgcaaattttaaaatttatccaggaagcatcagatctggcccagtggggtggggtaggggtaggtggagtggctccatcttcatttggcaccatgctgaaaggtacagtagccgcttaaagctcggcttgaggatgttgggccactggtctagggtgtatcctcasgggaaaaggggrgtttttgctgcttgctcctggagcaagacacactccagccatagttctaattccaggatagtgtagcgcaggccacagggagctgggcacggtgttgactccttctctgtggggagcacagctacgtatgtatactccaggcagcttaggcctatgaggactgcagggttcctcagtggtgaggtctgtaagtgtctaaggtattgatagggatcgctaggatcctcttccttacctccttgcagcagggagaagtccttttggttcccagctgatcctgattggggattggggtgatagaagcttggcatttccttctgctctctctgtggtcatctcgagtttcttttataaactcttctgatgcactctggcacccttcctcagttatttgtgttaaagtctagttgtttaattgttgttttggccgtctttgtgaaggatttctagctggccatcttgatctgagcaccttttctttgatgtattggtcagttggatatcctcttttatgaagtctccattcagatattttgctcatttttctgtctttttcttatttaattgttgattcattggtatattctggatatgttaaaggattgcacatatgttattccactctgacttgtcttttgacactttcagtgtagtcttttgataaacaatacttcatagttttaatatccaatttataaatcttgcctatccttttaccatgaagatacattctctgtgaactttaaagtcttctgttttaaaatataaactctgtgttacatttagcaaactcatttgccattctttttaaaatagaatttgactgagaaatagataccaaattttatcaggtggtttttctggaataattaagccagttagttgaatttttccccctgcttatataatattatatttaattaatgttgttgttttccttgtgctttatccgcagccctttttgggatgcatctttcttaatcacagtagtaattttaaaaatgtgtaatttaagaataacatactttctgagatgttatttaagatttttcatctgttctcattaaatgagattagtttgtaattctgatgttttttagtgatgttcttaactatactacaatagccatctttacacattcttttttgtgctttgggtaataataataataattgttatttttttgagatggagtctcgctctgtcgtccaggccggagtgcagtggcgcgatctcggctcactgcaagctctgcctcccaggttcacgccattctcctgcctcagcctcccaggtagctgggactacaggcacttgccaccatgcccagctaatttttttgtatttttggtagagacggggtttcaccgtgttagccaggatggtctcaatctcctgaccttgtaatccgcctgccttggcctcccaaaatgctgggattacaggcgtgagccactgttcccggccaataattatttttttctttgaatgttggggaaaaaaacttacagtgacttcatcagcgaccttttctgtttattatttgaaaaaaattcttcttgtcttctttttaggtccttttgtgtccttttcatttatttgttttggtttgtcattttttacatagctttctatcttaattccaaatatattggtaactaatggagaatcgtttaccataaagctcttaatctttttaattaattatatgttttttatttttdattttattgagtcctatcttatttccttttacaaataagtaaagtggtcgatttatgttgtatgttctcagttaattagcttgatttttttttaaycttttttttttttcttttttgagacagggtctggctctgtcatccaggccacagtgcagtggctccatcatggctcacttcagcctcaacctcttgggctcaagggatcctcctgcctcagctctacctcaaccctgcccccctgagtagctgggactggggctactggtgtgcgccaccatgcctggctaatttttgtattttttgtagggtcagggtttggtcatgttgcccatgctggtcttgaacacctgggctcaagtaatttgcctgcctcagcctcccaaagtgctgggattacaggcgtgagccaccacacccagctttattttttattttctttttctcttcttttgagattatcatttttctttactgtttggcttgtaattttgtttcatttctaaactctcagttcattttgctcttacttttctaagatttttttttttttttttttgagacagaatttggcttttgttgcctgggctggagtgtagtggtgcaatctcgtctcactgcaacttctgcctcctaggttcaagctattctcctgactcagcctcccaagtagctgagattacagttgcctaccaccttgcccagctcatttttgtatttttagtagagacagggtgtcaccatgttggccaggctggtcttgaactcctgacctcaggtgatccacccgcctcggcctcccatagtgctgggattacaggcataagccaccgcgcccggcccagttgctaagatttttaaagtgataaatttttctttggtagaatctcatctgttttgatgaaatttttctttctatacaatacattttattatggtctgcatttttttttcttgacctcagtataatttaggaaagatatttggttctttacattaaaatattttttatttatcacattgtrtataataatgcacatatagaaataaataaacatacatatttgcaagtgagtggatgtcttaatttattccaagaattgagtatgtgtttgcaatgtctacctctttggatttaatgaggaaaggaatgactcctaattttgcatgttaacagctcactgtcttgtcttctggttattcgctaaagaaattgaaatccggccgggctaggtggctcacgcctgtaatcccagcactttgggaggctgaggcaggcggatcacgaggtcaggagatcaagaccatcctgtccrgcatggtgaaascctgtctctactaaaaatagctggacatggtggcacgtgcctgtagtcctagctactcgggagggtgaggcaggagaattggttgaaccctggaggcggaggttgyagtgagctgaggtcttgccagtgcactccagcctgggcaacgcagcaagactctgtctcaaaaaaaaaaaaaaaaagaaaaagaaattgaaatcacattatatatataacttttaaacttttcctcacataattaaataattattttaaaagcatttcttaggggcacatggtattataaagatctgtcataggccatttaatgaaaacagttttgttggctatttaaatcatgttggaatatctttgttttgtttataatttaaattttgtgtattttaagaaatatgcacatgacacaaaattcaaagggaataaaagggtttatagagcaggggtcctcaaccccagacagggcagggttggcagaatggttgaaggatgaaactgttccacctcagatcgtcaggcattagagtctcacacggagccagcagcctcgatcccttgcatgtgcagttcacaatagggttcatggtcctatgagaatccaatgccatcactgatctgatctatgaaactggaccctggtgccaaaaggttggagagtgctggtttagagaatctttgaattaaacagtgttactagtttgttgtttttttccccagrctttttctttttcataaataagcaaatatatgtacatatatgtacacttgttctttatccgcagaaatggtcactatcaatgtacactatctggtgatggtacattaaaaacagaatttgctcacgcctgtaatcccagcactttgggaggtcgaggcggggggatcatgaggtcaggagattgagaccatcccggccaacatggtgaaaccccatctctactgaaaatacaaaaattagctgggcgtggtggcacgcgcctgtagtcccagctactcgggaggctgaggcaagagaatcgcttgaacccgggaggcggaggttgcagtgagccaagatcgcgccactgcactccagcctggtgacagagcgagactccgtctcaaaaacaaaacaaaacaaaacacagactttatcaactttaccactactcaatatatccatgtaatacaactacacttgtgcccaccaaatttgtacaaataaaaaaatgcataagatataaaagtagtgcataagagatcgtaaaatgaacacctttgtgacccccccatccacaaaaagaaatataactttgctaacatctgtacatcttttagctatttacagctccttgccatgcctctactggtagccactatcctcaccattatagcattgactttgattctctttatagttttataacctaattatgtattcataaacagtgtagtaaaattgtgcttgtttttggagcttttccctgaacgttttgagatacctgaaatcttgtagccccaggagcagtcttgaagaagaggagtcagcagggtgtgtgggaggtgaatgggcaaggaattctacacaggttggcctagtaaagtttggggactttgatcttaccattattaggtggacttgagatcttttcttgtaccaggtgatggagtcatatcttcactgttgccagggctccggaactagctctgagtctgcttctttgaagtgctgcttctgaagcaccggtttgccgtratcagggatggtcctgcctggagttctctttatgcccattctctttctacttttgttctgctgggcgtttctggttttgtttgtgtgtaagagtccgtgtggattgcaaaaaacaaaatctagaaagtaaagtcatggtttcttccttttttcttttctaatttgtaaaaatctgtggggtttaatcttaggctttatttgtaggtgcttgttcctctatcccatttagacacttagaaagtttgaacaaatcaagggctttccttttttctgcagagcacgttagattttctataaacctaagtagaaagtggcattgtggtagagattgtgcctgatttgtaaagaatgttaaaaagatcgtagaaataatttctaattcaattccgtcgttcagatactttcaaactcctgtgatgctacttacatcacaacctattacacatacacatatgtgtaaaacagactgaagtttcacgaacagcatccttagtatatacagttattccaacgtagtttattctgttctaattttttttaatgttgattagagatccattaaattaactataagatccttcaagagatcagtgcctatagttgaaggtaccatgattttctagaggaagaggttagctccaaggaattaaactgaacagaggcaaactagtgtcgtggtgtggctaagagtgtggaacctttaggttgtgtgtagtagcttatgcctgtaatcccagcgtttgtgagcctgaagcaggaggatcacttgaggccaggagtttgaaactaacctgggcaacatagtgagatcctatttcttaaaagagagagagagagcatggactttggagaaggacagacttgggctcagatcctggttttgccactttctggtcatatgatcagggcagtctgtttggcattcttgggtctcagtgtcatttgactasggcaatctagttggcattcttggatcctagccttttgtaaaatggcatcttaatccatttcgtkttgctataacaatgtcacaggcacagactgggtaatttataaaagaaaagaaatttatcacagttctggaagccaagaaatccaatatcaaggtgctagtatctggcaagggccttcttgccacagcttcccatagcagaaagtggaagagcaagagagggagagcgagagtgactgagagagctggactcattttttttttyccccccagagatgggcatcttgctgtgttgtccagtctggccttcaactcgtggtcacaggtgatcctcccacctcagcctcctgagtggctgggactacagatacacaccatggcacccctggctggactcatttttatagcagcccactcttgtgatataataataaatccactcctgtgataatggcattcatctattcataaggccagagcccttgtggcttaatcaccttttagtggtcccatctcttaatatagtcacaatgacaactcagtttcaacatgaattttagagagaacattcaaaccatagcaaatgggaatgacactctgtgcctcagggatatgagtattaaatgaaagaatagctagtggaaagtaagcatgcaacacacagcagctttattaaccattgttatttgtttcaggatttaatggtgtttctctgatttctagcccagtgccctttgtacaaattgcagaatccattatgacaagagttatgggacagtgttatgtaacagactaggtagatgggaattgcttagtkgatccactcaccctttgggatcagtttaggtgactactggactgtgtccataaactctgctggtttattacaggagtgggaattgtctaaaagtgtcaggcagtcacagtgccttcagtggcagaagagttagtctttctgtccttgttcatgggcaggaagttaaaactaaggggtgtgtttgtgtgtaagattagctcaggggaaggaagactggaggagtcttcacttctcctcccataatcttacatttaaaatctattctcttcctttccccttcttttttcctctccccctctctttctcttttaaasaatgaccagcttttgcccaggcttggtggctcacgactgtaatcccagcactttgggaggctgaggtgggaggattgtttgaggtcaggagttcaagaccagcctggtgaatataacgagaccctatctctacaaaaataaaataagaaattagctgggtgtagtggtgcacgtctgtggtcccagctacttgggaggctgaggcaggaggatcctttgaggccaggagttccaggttacagtgagacgtgatcacgccactatactccagtttgggcaacaaaccctgtctcttaaaaataaataaataaacttttaatataaaattaaatttatataaaatccaatcattaagataaaaacatttattaacatttcgccttttttcttccagtattttctcatgcattaaaaaaagaaggcagtaatactgtacattcaaacacccttttagtaaaataaaaaactgaactggttagatagttkaaatcagtaggatggtagaggatgggaaaagggagggatactttgctgaaaggcagagatagtgatctcttactgtctctgagactgaagggtggtcctcaatttaatctttccttccaggcattctggagcagggaagaatctgactttaaaattgttccctactttctactgtttctccgttatttggcatgtcctcctgagttcagaagaataggtcttaagggttttatgctgctgaaagtaatatcccattagattgctggtggagctattttttttttttttttttttacaatgtgaaagctgaattgtttctaagttctactaaacatatatgtaccagtcagtgcttttcaactgcgtcaggttcctcaacctgtgaacctacccagtcctttaggaaagcccaggtgtgatgcaggaagtaacctgccctctaccacagtacctgaatcaggcatgtgctctggaaatgttgacctgacatgaggacagtctgtcttctcttttcttcacagattttttttcttcacagattttgaagccagcttcataaggctattggacaaaataacgaatggttctcgaattgaaataaaccaaacaggtaagctcctyttagattcctaaaagcacctccatgcactaaagcattcctgtttctcactcttttttttctttcctttttttttctagtcagtctctgcttatccaaatcactctttttaatggtataaatattatgtttaaagctttactaatcactttgtattatataaatcaccattaaattagaattttggggggacttatatgaggamctcaccatataactttggagttatatgaggaagctgtgagtgtagatcataataaaagcatatcattctagatcattttaaaaaataccgtgttccgatggaaagacccagttacctctctgtgatatgattttccagagacatacatgaagtctcccaatttgaagggygtacatttgatttaaggaagttagaagactgaaaatttcagcaaagtctctcctctttttttaacaataaatattttatacataatgtttacatgaaactttccaaagtccatttacttatattatcacattaaattatttcagccaactctgtgaggtagtttatgggctgaattctatttattttaaattttgtttgttaaaataagtttacacaagtatatgcaaaagatgtgaacatcccttcacctctttcctcttccattcccctctccaggggtagccactgtcacagcatttgcttacatggacatttgcataattcagaccatcagcaacatcatgctcttcatattgttcttcagccagcattttttttttttttttttttttgctagtacaaatgtctcagagaactttcccttccagcacatgcaggtcttccttaatatttctgtgggttgtagtatagtattccagtgtattgatgcatgataatttatttaactgctccccattgataaacatttaggttgtttctagcttttattttttctattagaaacttgtgtctacattgtatggaaaactgtggcaaacatcckttggctgactccattaactctctacctttccgcacacattccacaaataaatctctgaccttttccctatcttggctctcttaaggcaagcttgggttcatatgtggtcctataccacatgagatattctgatctatagctgcattcagccatatcttatggagaacaggtttcgggaatgagatactcacatgtcttttgccagctatgagtcccttaatttcctttagcttgtttgctttgaaattgctggaggttttttcagtaactttcattggtgatccagaagacggataattctattctttttttgtgtctgtgtgagacggagtcttgttccgtcaactaggctggagtgcagtggtgcgatcttggcacatggcgacttctgcctcccgggttcaaacgattctcctgccttagcctccccagtagctgggattacagttgcctgctgccatacctggctcattttttttttttttttagtagagacagggtgatctgtcrggtgatccatccacctcagccttccaaagtgttgggattacaggcatgagccacagtgcgtggcccaagtctattcttttctagtcatactggcaatgtagattgaggagtaagacatttacatgattctgctcccactacatgtccttttaattttccscatcagagtagtaaaagccttcattctgatgatctggccagtttctcatttggctaatttgtataaataaacatacggatttgaagcatttagtgaatatatagtctttttatggttttttgatctaaaggatggttttgtggcccttacaactatttcagataactgacccagagtccatttgagaagtgttcattactttgatcagaatatggtcctgattgtgattgtttggattctagtgtttaatgtagtaaaacctacatttattttatgaaagtcccaagaactttttcccatttgagtgactgaacatgcctccttcctctaatgttaaatatatttttggtaaattgtgccagagggcattgcaaaagattttgtgcagcagaaataccttgttcaaccatttatgtccccctatgtcatttacagttttttacattgatatgtaaatctagtaagaagctttttggagagccaggcatggtggttcatgcctgtaatcccagcactttgggaagatgagatgggagtaagaagctttttggatagccaggcacaaggtggttcatgtctgtaatcccagcactttgggaagctgagcctaggagtttcagactagcctgggcaatatagtgagaccctttctcaaaaaaaaaaaatgattagctgagtgtggtagcatgtgcctagggtctcagcactttgggaggctgaggtgggaggatcacttgagcccaagagttcaagactatcctggacaacatagtgagaccctttctctaaaataaagaaaaaaaagaaagaaagaaagaaagaaaaagaaaaaaaaaattagctggtcgtggtcccagctattctggaggctgagatgggaggattgcttggctctggaggttgagctgcagcaagctgtgatcatgccgctgtactccagcttgggggacagagcaagaccctgtctcaaaacaaaacaaagctttttgaatgatacgattatgtgagaagtgaataaagatagtagtttccactaaagccgtaaaataatattaggcatgtccctgtatcaatattaaattaaaagacctactattaatggcactgaatgccataaagtacttgccttttcttggcatcatgtttggtgaatgaggtatatgagaaatatcatttcaggggccctagaggatgctggttgctggtgtgatgatttaagcacatcatttgtaattcccctctgtggtcagcctagtctgagaatgtgctgttgggagactagggtgcttattaggatctcttttctgtgccctgccatgactctggcaactcagatggctcagagaggggtttactttattactgattattaaattacattcacagtttattattgttacaggggcttgacagtagtgagtcagcttttggagcgaagtgtgggctcttagcaagatggcatttcgagcactcttggatgcccttgtcaggctttccccttggaactcactgmcttcattacctttgtgacattttagtttttttcctgctgaatgtggctctttttcttctggtttaaggaacaaccttatattatcagcctggcctcctgtatggtggatctgtggaacatgactgtagcgtccttcgtggcattgggtattacctggagagtcttctttgsttggctccatttatgaagcacccgttaaaaatagttctacgaggagtgaccaatgatcaggttgacccttcagtgagtattgagaacaaaccgtggtgtggtttttgttttgtctcttgtcacaacccaacttgtgagaaaaaagttccttataaggcacagttttattacaaatgtatattgcttttgttatttactttgagatttagaggttaatcactccaggaggcagatgaaccaaaacttaggatcatcraattsaggactattgttaacagttaccaaggtgccttttgttgttacctaagaaccttcaaaacagatgctctccgtctcatcatagttgacatgaactatagttctgctggctgtatatgtgagagtggagtttttgtaagatcctgtggtagctgaggctggagggcagctgaccaaaattttgggcaggagatcatagctccttggcattgttacagcgtaatcttgacttacccaggcttcaatcataaactcaagggctttcttcttctgagaagagtttgcagattaggaaaagggcataaagtcaggaaaggaatgtgtgagctttggtagtttgtgggtgtcagcaagcttttgatttttattttattttttttcaccaagggtcatgccagagcaagctttttattaaacwtgctaatttttctgcagatatggggagaatggtttaatatcaagcaaaactttttattgtgatcacaactgtcttaatgccattctaggatgaagtgtgtgtgtgtgtgtgtgtgtgcacgcgtgtgtgtgtgtgtgtgtgtgtgtgagagagagagagattagagaagtctagagaagtcctgtccaggcctccctcccttgtaggaaggggtggattccctgcttttggatgctctgctgtcagagaagatatcttaaagctgatggccggccgggcgcagtggcttacgcctgtaatcccagcactttgggaggccgaggcgggcagatcatgaggtcaggagatcgagaccagcctggctaacacagtgaaaccccgtctctactaaaaatacaaaaaattagccrggcatggtggcgggcgcctgtagtgccagctactcgggagactgaggcaggagaatggcgtgaacctgggaggcagagcttgcagtgagccgagatcgggcaacagagcgagactccgtctcaaaaaaaaaaaaaaaaaaaaaaaagttgatggccatgatgcaaagtactgaggtggtatgcttgtctttaccattacaggccaagaccaatgaatggatagcttctgaggcagaatgtgaattatgtagcttttctactcagggaggaccaatgaggtgatgctgtgagccccaaagtagagattgctggtattcatcaagatacctactagggtataaacattgttaatatgttcttaggcaataaaaacttattcttcatttcttggaaattcagctgcataaactcttttccctgggatactgagtatagtacaagatctgaaattcttaagctgtaaaggaatgttgcgtaaactgttgagaatatttaattaagtgttttttttttttttgcattttctagaagactataggaaatgagttctttggataaaagaatgagaagaggtataaatatatttagattggaagagagaaaggtgcctcaaacagtgggaaaaggccctgaagtgtacagcagtgtgtgtatctgttttgtgctttttttttctatacttgctaattatcttaaaagcttttctcactggcaatattttaaaaattttatatgctaacagtgacaaaagatcagttgatgaatttctcagaaatgggacccaaaaagtctgttttcatatgctgtaggagtatctgcttttgccagctgcatgactaaaatgaccttggttggtatctggctccaggccagggtaaaataaatatacttaatcctgaataaagagtgacttcttcagctcattccatggctccttcatttctagcttcttcttttctttgtggtttcctcattagttcatgtctgcatctactctctgtgtacaaggatgaaatgagtgattctgtccttaacaaactcctagtctcgtggggtggacagctgggaactcatttagagagattacaaggatgaatacccttgggctcgatagaggtagaagcaaagtgcttagtgttagagagcgtttcttgaggagggaaaatcagaatcagtctgggttttaggaagataattctggaggttgagtgaaagatgaatggagaggtgatagactagcttgggcattatggagatggaaggagaacggaaggggcagataggacaactaattggaggcggagtgagaggaaggggccatagatgacttcatgatttctgtcctggttgcaataaaggatcatgatcgtaaagatcattcccatttgacaaagggaagaggaaaattgcagtaggataatgagtgatgctttttattttgrtcytgttccctgggatgttggcagcctaaccatataaggatttccagttggcagttagaaattattgtctggagcctcagagacaggtyatcacgatcttacctgctgatacttaagcctctaggagtatgagattgattaggctgaggttgaacactggtgggtttggctgaattcatctttcacgtgtttttcctttgacatgtacagtgtggcagtggtggcggtggtggtggttgttggtagtggtgtgtgtatgcatctgaattggttgttcatgtttgaaactccagattttacattatgatagggcagtgtgacaatactgaatggtggttcctccatgacagccatcagttggaggtgagtagcagctgccttttttggataaggtgtgagctttcagctggacacaggtcacagctgacctcatcattcatttaagcttcctctctgccctctgtgggcattagggtttctgccccatggtccaagggactgagaatggaagaaggagaaatgagtgtttaaggtgtgagtgggagaagaggagctagagacagagtgactgtggagatagaagtatttggagaagccaagcaggaatcaagttctaagaagtcagggataatccacagaatcactctttgccagagttgagtcagactgagcagtgagacatttttattgacctttgagagaacagtgttattggagtataaggacaggaacagactgaggaacgagtaggaactagagctattggaaagttaggagattcttccagaaggttttaagagctgaggttgggattttttttagactaggggaaacttgagcttgcttgtaggctgaggagaagctgtaatggaaaagaaaataattaaaagagctgagggtccttgccgaagtccagaggggataaggattgaaaacagaggtgatggaatgagccttatgaagaggaagaagacattttttccttagaggcaagagaatagaaagtggggagaaattttaaagagaagttttagaaggtctcctgactcttggtagtgtggcaccagagctcccagtaattatttgttggtgccaacaagctgctccaatggtggatgaagattccattcttttccagttccctcttagagaaggaaaagaagtacaataatgtctcccatgtactgggcattattctaggtgtacatatgtatgtatgtgtatatccatatctgtttaattcttctaccaacccagtgaggtgggtgtttcagacaaggtaactggagagcaggtttcttcctstcttttttctttttttagcatagattgattacatttttaccttttgattgattgactgcrctgtaatggtaatacctttgccctgagctgccacttagggtttgatctttgccttttctctctgaccgcagagtggaccgatcactttcccttaagcagaacttacaggccaccatcactctgctaaaactagaatgtgcaaagctgcaggagactggagagtgttcggcccagcctctcattttacgaaggaggaaactgaggcccaggagacagggaattgtctmgggtctaacagccagtgagaggcagagtaggtcccaagccctcatctgcttttcctgcccttgtcccaccgcaccaagttgcctgtcttccatgtcatatggagagtgataaagggacaggactacacctggaattacccttgggcttcttgctgaactaagtaaatttggcttcactctttgtgactcaaggtataggaaggatgagccagaaggaatgctgtgttttttcacctttttttccctcgagagagccggtggctgcccagagtaactgcagcattgcatcccctactttttcagaatctgacttggccttctccccagctgctcttaagcctcgactgtattcttctttatctggcaacgccaaatgcatatattaagtttttgagtgtgctttatttttttatttttagagagagggtctcactctgtctcccaggctggagtgcagtggcatgatcgtggctcaccaaagccttgaagtcctgggctcaagtgatcctcccacctcagcctctcaagtagctaggaccacaggcgtgcagcatgcccagcttatttttttttagtagagatgaggtctcactatgttgctcgggctgtagctttaatatttaaaattagctaatcttcagtggttttcctagtttcccctgccccacctgatccattctaagcatgttcttaggcctcacaggtcattcctaagtctggtatttttctgatatcacaatatttagttggggcttcttagcctgttagagttagttgtaacttggagatggctgggcttgagccccttgccttagagataaggaaattcagatagttgtgattttcttgtctgaggcaacatagctaattagaagcrgagctgggaccaggactagggcttttcctatgccttctgtgtggtgcctgccctccctgccagctgacagatccaagaagggaacaagtaatggagtaattttctttcccatgtagcagttgaggcaacatttgccaactcgttagataacagtacctgatttgaatgccatctttmtactcttatcaggaatccacaaatggatcagaaagaccccagacttcctgggagctctgaatgcaggaggagataacagttacacgtggcaaagtcttgccattaactatggatgttgtaactaattgtagttttgagtttgtgctgcttcctgtagtttgaggctgtcatcaccccgactccccaactcccatgtaaaatcatcaccttccctttagctgcctgtgtggtgctcatcattggcattcttaggtgagctgttgaatagttaatttggtttgctttgactcggaatgctaccggctctaaacattaaataaccctactggacaaatgttaatgaaaaagatgattttcttctgtacgtttatacctataagaatgagtagggttctccaggctgggtgtggtggctcacacctgttatcccagcactttgggaggctgaggtggcagattacaagttcaagagattgagaccatcctggccaacrtggtgaaaccccgtctctactaaaaatacaaaaattagctgggcgtggtggcacatgcctgtagtcccagctactcaggaggctgaggcaggagaatcgcttgaacctgggaggcagaggttgcagtgagcctagatcgcgccactgcactccagcctggtgacagagcgagattccactcaaaaaaaaaaaaaaaaaaaaaaaaaagtagggttctccatttgttttctacaacagtccagtctctccatgctttttgcatgaygcctctgatgcacacgatgactktaaggtaggtgttggtctccatgtcatgartgaggaaagtgcggctcagagaagcccagtggcctgtgaaatcacagtgttcctcaggcagagccagcccactcgctcagttatatgccagcatcctttctgtttaccacactgcatcatctacctggttgctaagccttacttgttttttttgactcttgtattctgctgaaggcttaattaaacttttcttttctgaaataatttcatagrttgatgttcttaaggcaacagcactccctttgttgaaacaatttgggattgatggtgaatcatttgaactgaaggtaagaatgtttgaactgttgaccatatgttcctgtggaaaacattttcccactgactcattggaagagctgtgtgrctcagtgtatgtgtgtcacatttgaagtcaccagttatcagaagactcacagggctcatgaaataaacactacagactttgaactgaaagggaccctttagtaataacaatagtagctgacagtgatgttnnacttcttttgcggtgggggccgttctaagcagtttacaaatactaactccttttctcctcacaacagctccgcccatgtgcctcagctagcaagcagtggagaatagatttgggccatattggctctctgatctaaatgatctggatataatttatgttcaggggctcccaacctggatgtccctgagaattttcagtatttccaaaatctagtagaagtagtttaagcatctgtattttgwtgaattatatcaatccaatgtggtaaaccgtttagcatctctgccttttacattcatgttttaaacaggggaaatgacttcatttttatttaataatgttttggtagatccgttatttgcatgggaggagaaaaaggggtttctgattattaagaaatgggctcagatgatggactaggtcagctcyatattttaaggataaagaagtgacctgttcagggttaaagagatgagtggcagagccacttgggtaatcgacttggactttgacacatgctgcrcaggtactctctaggagccaacataaggtgctgttggtcttgaagggaatgacagattgaatatggaagagctrtgccttgtaaggaagcatctgctggtgtaaaccttcctgggcagggtgtcagggtaatccattgctttgctgcatcctcgcctcatctttctcactctctgtgtagattgtgcgacggggaatgcctcccggaggaggaggcgaagtggttttctcatgtcctgtgaggaaggtcttgaagcccattcaactcacagatccaggaaaaatcaaacgtattagaggaatggcgtatcctttccatttatttggatttctttttttkttgttgttgttgcctcactaagataagaatgactaacagctttacttcttcccgaggttatttacattttagactacaactttgaaaagtcttarcagtgaaattgtaattgctggctgagttaggatgttctgttatctgcctcaccatgactagattgattgagtcattcttttttttttttttttttaattttccggttaacatttaggcaaatggctctgatgtatgtgatcctctctcaagggctttggtttgggggccatgaatatactgcagttcctccctcagaagacrtcatcattcggtgaaggaaccaaatatgaaaacacacagttctgatataacatgcaaaatgatatgtgcagtggggtgggggcctggagtagacagtggtcaattttgtctggaggacctagggaggctggagtaatcataatgaatgatatctactattaagtatttactctgcatctacttcagtagtcactttacatgcttttaagcctcacattgacccttgagttcacttacatccttttttgcagatggggaaactgaagcttcaaaagcttaaggaatttcttaataatgtcacactgctaataatgacagagctaggatttgaacctggtctgtgtgactctaaagtacaggcatttaatttttacttttgcctatagaaaggagccttgaagaacagaggattgcaaagtagagcaagaaaggaggagggcttcaggcagaaaagtgggcctgagcagaggtggcagtgcacagtggttctagggagtggcaagtaatgaagtgtggccagatttcaggttggtctatggcatttgatggtagaatggggcatgaagacaggcaggrgccagtgaagagctgaaggtggctggaatcagatactatgcagaacgcaaagaaaggagggtggaaccctgtgaggccaccaaaacttgaaagcaagagttaagtaaggagggaagtaagagtggggaagagaataaacaaaacatagcttcctggaagctcaggtcagcactttaaaaggccctgaggagttagcattggggtgggggaaaagctgagggactcagcagcaggctgtcactgatgccctggggaagagtgctggatcccgatcccaagggactaattctgggttgtggagtgaaggggagggaaacagcggcttgtggggaccactctttacagaaccttgacaggaaagagaaggagaaggaaggatgagggagtaacttgatgaagcragagtcagggagactccctcccttttacaaaaagattggtaaggatttgagtgtttttgtaggttgttaatgtagatgaagcaaagtaatgagctgattaaaagcccaggtgctggagtcagaaagacgtgggtgccgacgcyggctgcgccacttaccaatggaagcatttggccgtaagccttggttgcccgtatatctttagtcctgttataactgctgtgcgagactgtcatgaaggtaaaatgagatsgtagttgcacagtaggaggcactggtgtgtaagtagcattgggtaaatggttactactattctttttattcttacttgagaggggatggattcaaggccacaggcatacggtaagggtggctccaggtagagctgtgtggaggtgagtggaagggggttgggatgagttttcagttgttaccgagttaggatgggattgagggtaaggggatgggcggggtaggataagagagtgtgacaaggatggtaaagatgtgccttcacaggggagcatcataactgaagataagaaaaaggctgtgttccagcagtaaggtccttgctgaaggtgtaatgttaacacagtgccagctgcatggccatgtggctatatccagtggcagttggcagcctagagggaggagtagagaacgtgggaggaccaatttcatccaaggttggatgcaggttggcaaggtgggtgggtcctacaggaggacagttggagggtgggtgctggagcattgggaagtacattcctcactgaggattgtcacaggggctcaccagcctggacaaagcaggtcaagggatgagaaactttaacaggcttaaagatcagatctagtggaaatagatacatgtactgtgtaggacaagagattgtgtttagggagttttgttttgggatttcagatattaaaagtggtaaaattctaggtgctgacaggatctgggtgggagcaggtgttggaggccgtagagcaagacaggctgtgggatgactttcctggcgggagtgtgacaaggagggcagaccagaaagcctgcttstcagggckggggtggrtgcttaaggtcgggttttgtgttctcaggaggtttggcaatggtattacttggaggaagaaaggtgtagcgtggactgtcttttcagaggcctcgaatagcttgaacagtaagtggtgaagggcagggagtagggtgggctgcagagccatgtgyagagagagtgctggttaagatagaagctcaaacttgggttgctgcctgaagttctttttaaggatcatcaaaaccacaggaatacataataacaaagccttcctggrttatggtctgttctctgcatggctgtcccccagcccatgtaagcgcccagccttgtgtgtaccaggagagaacaggcaaaaggagaaatggttcctttcctaggagcccccaggttgatgcatagttacattgcccaggtgactttctaaggtgatattcaactctagtatccaaatccgaggagctggaataaggttaattaggttacaaagaaatggaaatgcaatgtaactaggtgtgtgtttttgaaaccaaatgtgccttttctacttgaattcattcttattaacagatgcattgtattccaccatatatagaacccaaaatcaaatcctgttgayggccattgagttgttttttgcttttcactgttgccaaatacactgcggttaatggctttaaccacaacatttttggcaatggtgaaaaaaagtgtaataagtgtataggaatacactttccaatacattccaataagtgtacaggaatacactttcagtactattttgggtttgtctggggggtagttgttttttttcctccttatttgagatgtgtttccttaatgctgtattggcggccgtgaactttgtttggaatccagtctctgtagtctggaaatgtgatttctggcagtgtgctctgttttgacacaatcttgtcataacaacatgggtttcatcacagtggggtcccccttgttctctctgggtgtgcagatggtcgtgtcctttgatgatgatgctgggaaatggggaagggctttccaggggagaacataaaagttaaaagagctgtagtgccgggcaccttgggtgtaactatgttcctccctggcttctccctctaatgttcttggaaccttccctgtgtagaatctgagccaggaagagacttgtgaggtcccaagttcctccctccctggaggcaggggataggacatggaaatcatccccaatatatctctgactggttgaggcttcctcctggctccccaggagagttgacacagtgccctttctcagatccctgtctgttaaccaaacatttcagccactgctctgcagagctgcccatttcacaaacacctcaaaggaatgttggtttgaatggagatcgccctcttctccagttttggagcctgggaaaaaagagctgcctttggaaaaagcttgagttggttttgtggtttttttccttgcaaggctggttgactactggactaagcttggaggttgtatttcccatgggagggctcagactgggagaaagaggcccactctcttgtgtgcatttgtggttttaactgaattacttccaaagtgcatcttttccctcttgcrttctacaagatgacctaccagccagggcccagagggagctggtgttggttcctgccagcagctgtgactacacagtagttaccttttacttaatgccacccactctttctcacccctgccttatgtggggcgtaagagaaaggaacattctgttttagttttgcagtgctgtcctaggagctcatgatttggtacatgagaattaagtgaaaaagctggcagtaaagggggataagttggaattcgtgggataatctagtttcttttccttgactgtaggaaaggtactttgagaatcaagctctctctccacctactgtaacatacacacacacccctcttagctttctctgacatggaacattggggaaggggaagagtgggagtcccatatggactgtagctatggacttgtacattggtattggttcttaatatggttttcataaatgggctttaggaggttcataaacctgaaaaattttctgcaagattgtgagtatatatgtttctcaggagagggtccatagctttcatcagattctcagagagttctctgattcttgaaagaataagaacctctgcttgggatttgaatcttggataagtaataaagaaaagcaatagctgacatttgttgggctcctactacacactaggcattaagagctttacatgcattttatttcatttgtgcctccaaactctgtgaggaaagtgttatgattatccttcttttactgattaggaaatgacagcacagagaagttaccacaattaacctggagtgatgcagcttgctggagcttggacttgaacggagataatctgattctagaacttgggggctgttagccattccttagtaggacatccatgccaagccagatggttctaagcaactggctttaaagttcctttgccttcttcatttcattgcctgagttctagtataggattctgtaggccctgaattcgtactgtttgttaaccttcgtgtttttgtattgggatgggtgagaggaggaagatgctttttgggagtcagatctgtttaattttgagcaagtgtcttagtttttttgtcttagttgtctttaatgtaagtcctagaactcggagccatggccctcaacacagggttactgtgagcataaagtaaggtgataatagatgtgaaagaactttgggagccgtgagctctgtgggattatgtgctaggatggtgacatctcttgtgctttccyggggacagtgggcagcctcagacctcagaaggacagcacctrcttggtccaaagggtatgagattcaggactgtttgtctaagctgtctgtggtcaaaagtacattctggactgaagagatggtgatgtaactgggctgtgtgtgtattgaaaaatccctctttgctctttcctcatttcaggtttgtcctttgagtcaagttaaatatttattgagcatttctgagtacaaaagtggtgtattggagagttgggagggattacagaggtaaagcccttgcccttatagagtgtgtggtctcattgaagagcaagaacaaaatgtgcatatgtgaagagagatgtatggtaagttcaagtggagctaacacttgggtgccggctggagggtttcaggagagagattgggacctcgggctgggagaatggggcaaagcagctcaggttgaggaatttggtcagtttggatgggtggaaggagttgatggtgcagagctgaagatggacacaactgagcaggctgggggctctaacaacaagatatgggaggaycaggagccaccgagagactgtcaccagcatgaggaagattggtcttttagtatgaagttcaggatgggtcaaaaaagggagctagataccagatcaggtcatgtatcgtctctgagcactttgtttctgcagttcagatgaaaattaaatatgttattgtcagcagttcttgaacattgggctggattgggcagattatatacctcgttctacctgttggacttgtcacgtggggtttgtatcagggtagtgggaaggtcacatgttatttctccatttttttagttccaaatatatagccatctcttgaccatacattgcacattgaagtgctcaatacatacttactttttctttgacatgtgtggttggggaatgccagcttctgttataaagtctagttttaggcaataatttccatttcctcaagcaccaatcttttcacttgagttactaatatcttcctcctttcttttctggggtgccctattgtaggagtgctaattatcaatattttaaccataaggtagcaggtgtgaggaggctgtgttatccacaagtggagtaattaattcttaaatagtagaaaataggccctgtaaatgagaaaaacctttttatatatttataaatagcagcaaccatgttctttcactgaactttttctgcttctcccatcagcataccaggagtcagattgggatcgcccaggtcctgtgtggtgtctgttctgggcttaggttcttaagagagagactcattggctacagcagtgggaatggacagagaatagaaagtgttcttaggtgttgtrcttcagagggagcctggatcatgacccgcagagaggcaggtgtctttacaccttccaaaattgacttgaaccatttctaggggaagcgtgtgggtaggaagtcagggggtggggttgaggacctccagctttatactttccactgtctctattgtttgggtgtttttgccatgaccttttataataatgaaaaaaatttaattatggtactaattcagtaaattcagttggaaaacaatagatttggaagtcccagtttgttactacagttccacaaatacttgccagctttataactgatttttctctgtcctggaattcaagcagaatgacatccttaactccaggctgcaggtactctgtacgtgtgtcacctcagatggcgaaccggattgtggattctgcaaggagcatcctcaacaagttcatacctgatatctatatttacacagatcacatgaaaggagtcaactctgggaagtaagtatctgtgtttttgaagtctgtttctgcagctttttcacatgcctgttctagttgaagttaaaactgccagctctgaggttgcgcagccagaggaagaacaatttcagaattaatttctttctgccttattgccgttgtcaccaacaggcatttcttgagtgcctgtcacatggaaagcatcccagtggctagagctggaagctaagggtctggttcctagccttggggaattaaaacctttatctattaatacacaatgctttaggctttaaattccatctgcactctgttccaacaaaaaaawtaaagtggacaggttcttccaccctgagtaaataacagtatagggttaaaatcttttgttatctaagtgtaagtcagcatctctcttcatcagtggaaacaacatatttacatccagagaaagttgttattgcagacgtgaatttggtttagtgaaagcctttgctttgctaaaaaataaaaattttaaaaattagaaaaaaattctaartaaggaaaataagttcttaaaaaatgatgctctatgtaatgaagatacctgttttaggctttgcttgtgtatttagcaactaggaagttagagaagcaattaaagccactttcttaaaataggaaagtgttaaacatacagaaaagatcaaagaatagtacagtgaacacggagatatactcctgctgcctatagttaacgataaatattttgccaaatttgcttcacttgtttgtgggttttgtttgtttttgttttttactgaatcatttcagtgtgaatgggcatcatttcacttcamatctgaggctttgcaggttgtgtctcctaaaaataagaatattagagtctggggttaactgttgtaggttaagaagtcaacttcttcttaagtgatgccacagctgatcctttttcacagctgtttcacctgtggtttcttttaatttcagcaaaaagaggaaaagagagtaaaggaggggggtgagtgttttatacaacctttgacctttataaggcccaatggaaagatgaaggtagttttagaaatacagtggaggctcatagtccaaagcaacaaagctggtggcgtcataacgctggggttgggaaaggatttgtgggcaaagctggactttctggcttggaaaagtcaatgatgttcctaaacctttggtttatattctagtaacaacagtattttcctcatttatgcattgagggtgatgatgcctatgttttggggttattgtaaagatcacacatataagccattaataccttgcttgtcacrtggtaagtcctacagaaatggtagctcctgatgctgttctttcctttactctcccttgttggccacaggtctggaattatgtgtcagctattttctggagaarggggatttccgagggatgggggaggacagatagcagcagaagctgtctaaatggcttcatctcgatagtcccttctctgctttgcctctcgctttatcagaaagtgtcctggcatgaagcagagcaggcctgacagccatcctgccaccagcttatagtgtggctttttgttataccactgactcagctgaccstagagtgtggtcaagtccatacttactaatggtgagtagaagccttacacgtagataaagacatggacatgatgtagactgtgggccatcaactccaagccccattttaaaaattacatgtaaaaccaatgtgggatttaaatttgtgtttggtttttttaaatctccagttacagatgactaatagtgctcttccttctctgttattaaaattataaagtcatggatgggtatttctctcttctgattcagtgaagtatccagtaagtcaggcttgttcagatgtaagagtttatgttgtggccatggcctagaaccttaggggacagcacttcttggtggcctatgtcagcgctttggccagaatgcacatcagtccagtgtggtcccattttaactctcacagtaatttttttttttcttaattgggtcctttaccaaggaaagctgtggaggctggcctttgcaaactataccagtgcatatctctaatgaggtcacctgatgaccagcagcttggtcagcctaacttgaaataggcctgataacacatatttcccacaagttgggaagaaaaattagagtaatttacatagaacctaatatatattctttgtcttttctaaagttacttaaattgtgttaaatggaataattctgattaaatataaagtttatcgtaatgacaaatacaccttagaaaactcacacagatggaaattcttgggaaatgcaggtaaatgggtaaagcagcagtggcaccttgtcttgctttctctccccttcatcttctaatcttcacttttgtatgccactgcctgcagccactgctggacaccctctcacttctgctggtcaggtgactcaaaggcaatttgggattatgctaaaattctctaggtgtcccatgatgataggtggatagcacagtgttagattgttaagcataactcagagtgcctcccagaacctttgatgaaatgggtaactcactgcaccccctttccttggcaggtgttgttaaccttcgactgcatagacaagcaaattttttttttccttaagaatctaaggactgactaacatagttcttctatatagtgagctcatatagtgcattcgaaacattaattttatacatagttttagtgaaacaagtattttggctagtctcctgccagacacatagaaagtattgtgtgagcgtgtgttgagttgtgttaaagggggcaggtctgtgttgtggytgcatacggattgtactgctgggaaggccgccacacctttcctgttgatgygtctacttaacagtcattgggaaagtagaattgagctgtcaaatcttaaaattttgtggagagatgcttgtttttggactgattttcttttctggtcagctagtaaactagtagcaactctatgaggttaatgcagccagaaagaagcctttgaacacagtgccgtcaaaaaaaatgtttgtcttctctttccrtttgctggtgagtggaaacctcacttggttaaacctactcagtgtttktgcctttgtatctccaggtctccgggctttgggttgtcactggttgctgagaccaccagtggcaccttcctcagtgctgaactggcctccaacccccagggccagggagcagcagtacttccagaggaccttggcaggaactgtgcccggctgctgctggaggaaatctacagggtatgtccacagcttcctctgayagaggagtgaccaggaagcagtttgttttctcattctcatctcttggcagctttcgtcctcttccaagggctcmagccaaggagataatctgttcctgtgcattaagcagttcagccttaactagtttaattgattagctcaaccagtcagtgagtagagatctagccccactgggttgagacacagggcaggtaagttttaacagtgagccaaggaaagaactggaacagtcataaaggaaagggaaggttaaaaaaaggaagcaggtaaggtaaggtggtggctgacacactgccctagccaaagagagtaccatcccggcaccccccgattgctgccatgtgggaagatggactcattctttttagatcttttaagagaagctagaaatctggatttgtatgtgacagttgattcatatataaamcaatagcaacaggctagattttgcaatgcattctagagcacagaatctcagttaacagataagtattagaaaagaagaaaaaaatttaaaaaagcacagaataactaggraaggcaggcctgtggcacagcatagcagaagctttggaaaacctaagaacatggaacagagaaggggtaaactgatgttgaagacagactcaaccagttgtcattttgcttctgcaggtctgctggtgggacacagctgagaccaatttgccctctcagttgccacagtctttctctgttgatcctttcattgcaacgggcacatatgcatgcacacacttttactgtttcctcaaaataggtgaggtgacctaaagtaagggagaaatttggaaagatgatggcagaaagaataagwtacagtttcctaaaagatatattccctgagatcccctatacttggttagaagagggtcacaaatctgggtccaagatttctgttagtctgcaccgtcttttgccttggtcccacatcaagaaggtgaaaccttttctctgacatgcagagtccaggaaaggctctgaaggatggtcgtttctctgctctgtgtgttaggtcccagattcttgaactgagcatcagcaagaactatactctagttgatttgctgttgtatggtgtataatgtttgtaaatcatctctcttcttcccctaaggagctgaagagacttctttctttgtattgttctgtgtatttcttctcagttgtcaggcatctttctggtctccaagtaagttttctcgtttatggtagcaaaaatcacatctgagccaagttaaataaaatcagtaaaacaggtaaagtggcaatttagtttttcttttaattcttccttttgccactggttcagtttattaatcagggtggtagggtaaagcctgactagccataggtattgatcctcagaccagcctcacagtggaaaacagcttatatttatagtctactcccttgatccaagtcagtgttcttgaaaatgtctcattggtccaagatggaacacatgagaatgagctgtttcagaattaattaaatttccaggtcctaaatggctctatttaatgaccatctaattaaaaatggaagacagtggacctatagttttattttcaggagagtagctccagcccctctactcggcrttcacctgggaaatagtagaagaaggagatgaaatcttcctgaaggaggaggtattctttgacaagtcttgtgcagtcacgatctggcctcagatgttttggtgctaaatcagtttayttttttatgctaaatttaataattttgtgaaaaatgggtagtaactaaaagtttggggkagatgatcaagaggttgccctgccagttacttaattcacgaagtttgtggtctacttatttgtaggggggcgggaaacagtgcatgcaatgtgtttccctgggtcycttgttgkgcaggatttcttttcctggtcctrtagtgtctggccgtggctggtcctgtagtggccttctctctaactatggggacacttccatgtctttctaatagaccttgggagaattagaagcatcacattatacagtagtccagtaggagcctatgggcacagctagagtgtggggtttatatccctataaatagcaggctataagcctcagggtaaaagcacctaccactccacaagaggaaaaacatgcagtttaaattaggttctttaatatttttcttttttttttttgaggaagagtctcactctttcccaggctggagtgcagtgacgtgatcttggctcactgcaacctctgccttctgggttcaagtgatcttcctgccttagcctcccatgtagctggaggcatgtgccaccacgcctggctaattttgtatttttagtagagatagggtttctccatgttggtcaggctggtctcgaactcctgacctcaggtgttccacccgcctcggcctcccaaagtgctgggattacagacgtgagccactgtgsctggcaattttttttctttagttgagatctactttcagtcttccattgtgcctggaccaaatttctttcgttttcttttagttattcagaaaacttcctttttatgtctatgatctttaattattaaaaggatggaaatacttcatgtttttctgaataattttctgtagagttgtgatgtgacatggattgaatgagtggtaaaaaatccatcccttttgaaggtgctatttatcaagttttaagcctctgatctaatcccccctgttccatttatgcctcatcggttaccaagccttcttgattctgtcccaggctttctggaactgccttttctttccatccttttcactgctctaatcactgcctgcctccctgctccactccacaactggattatggccactggctctctgcatttctagcagagaagttctttccaaatcctaacatccttttcaggctaaaatactgatctgatctcttcactcatgtgcacagagaccttcactggcttctcactttcctgggacaaagtcagaattctcgacccatttcggaaaggcttgccttaattgggctacccaccttctctgtgctgtatgtgcttctccacaggcagcagtggtgccttccaggctggtcacctggccattccttgctggccctggcattttatttttccccatcattctgttcttccttcctccccaaaccctgctcatctctcaagggctggctcaagtagtcctgagtcctaaagccctcctcaggtatctggcaggtgacacctccccccagcataggtagggtgatagcccctaccacttcctccatgatgtcctgtacagggaccttagctatctattacattaaaatactggtccagtgaatggtgaaataacaacagtgataggaagcagagactgaagagaacactttaattttaggctgtcttatgaaagggagcaagatctataaaacagttttgttggtcgtcatattttccatgggtcaggtttttctttttgggtagaaaaggaaaaggaactctccttgtcctagaatttgctatgtgatctaaatgttgttttctgtcctttattaactaaggtagtttagggacgtgcaatagattttcataaaggctagcagtaagatcaatccttatttccttcaccattattagggctactaaatgatatctgacagccagagaatttcagagtgtctgtatctgaaaatggatttatttcctaccctacatgccttaaaaaggaggcaggggcagttgtagccatatgaaccacactgctggccacctatcctgttcagtctagccttggatagtaacgtgccttggtcagactggatttctaattttgacctgtgcaaaatatgtagaaattcaaggtcatccttctttgactatgtacaatatgttttaaagttattccrgaaagaatgatcagaaagcgtgtttgtatgcttatgtatgcgtctagtggaggcaaaacagttaaaatggctgagaaaatgaaaaacaaaagaagaaaggcaacctaagcagttgtacctcaggagaaagtgtttgaagagaagtctgttctgcttgttaatttggaagaaagggaaggaaaagggggtggaaggcataattttatacataagtagtaagaataaagggatctaaccttaacaaktcttcagttttaaggaactcakgaagagataaaggagagaagttaatagagtatggcaagcagtttcctgaatgtatttgaataagtgtaaaagtaaggccatgaaaaggccgtttcatgtcagatagactgtgttgttctgtgacagattmaataaatatgagcgtcatccacttaacccttggaattaactctacatcttctagaactgattaagatttttttttttttkkcatatactcaataaagatgatgtcctcctgctgctgctttaatgataaagggaaagtttcatttttttttttttttactagattcacttaagaagatttgaatctgatagtctcattctgatagtctcaactattacagttgctctaattaactgttagtttaaccctctacagttagttgatacaatgattactcttataagacctgtattctgttttattgttgcttgaactttggattttgatattatgagtgtatgtttctggttttttttttcctcctctcttttgttggctttccattttctggtttgtacaattattaatttgtgtttacagggtggatgcgtagactcgaccaaccaaagcctggcgctactactcatgacccttggacagcaggatgtytccaaagtcctgctaggccctctctctccctacacgtaagttattctttttcaacctcgttattctgtccagtgtaattttctcattgcccaaaatgacaaagggtgttgtgctgcacagagcctgcactatgaacacctgcttgtgtttatcctcaaatcagccagcagttgtcactcttaacctggtgtttatttttacatacaaggatttttgcatttctttccttccttaatcccaggtaactgaaattgcatgatctctattgggcagttattttgttcgtgctttagattttgtttccaggttagaggtaaactcctggtttggtgtagcttggattttattactagtttttttttaatcattcttttccttagctgtctaacttgctgtgggaaaacaggctttttgtctaagatgataggatatgagctcactgggaaagatgacaaaagacagagtttgtattaatgctactggactagtagggaattgtagaagtgagtttggattgttgaatgttagcagaagttgactgctgtggtgtaaaagcaagcactcttcaaaaagaacagtgtcagaagacttgaattataaatgacactgtgaaagaagcatttcctattgatagtaaatgaggttgcggaaaacagcctatttgagtactgacattgtgtgtgtgtgttttcacgtgcttgcatacttggagatcatcatatggcccatctgaggttggtgagctgggtggcagggaatattcaggtagatatgagactgaactgtcctttttcggttatcatggtaccgatgctgtatatctgaaaggtacagtactgtgataactgaagaatggtggtgccatcacattgagaaagggttgaggactgcggtggggctatgcasccttgggccrtggckttgggggcatgaaaaccaggagcttgaaataaattcttatggaggcttttttttttctttttttttttttttttggaattcgtggtgggaggtttttttagaacaggaaaatggaagagaatacattctgttagcagagagggaagactgataagcaggaaactggtaaggaccacrttatctcctgatagcttgtgtaaaagtatttcgtaggacaggatacctaaaattgagtaatcctaaatggcgtggtaacatcagtagtaaacaatgctaaaatagacttggtagttaagtacttggagaggagatgagggctggaagaatggcaccctaggtacagagactcgcttcctgtagagagctcactggaggcggctgccagctgtgtggccactgtggccccaccggctttgtwgctgggctcgtagctgccgttycccagcccttgcttcaggcctggggaagtcctgcttgcacacacggtatgaggtatggggtgttgtcttgaatgtgtgtggtcctggggcatggggtttggcagaacattctgtgaaaatggaatacatatatgttttttttcgtgacactttttttcttttgcttttggagatttttcaatttggctccaggacctgtatgatgttttcaagctttgcagagatgctcaagatatgactggacatttttgaaagttcctgtgtcctcttcaacacatcttctcaccaaacattaattgtagtgtcttttcttccagaaaacttgcataaaatgacttcctctcctgtgaaaacagtgtcctgctctgaatggagctttaaaggagtagcacaaattgtaagatgatgtatcttgaggctggggcttagagatattctgctgcctcccagagctttgtgcagacgggtctgccagggtgggaaagggaagcctccgttctttttggtaagctagcataaagacaggtaagggagtctattttcaagaaagctggatctgtttcrtactctttctgcccctaatcrctrtggacagctccagcagcacaaagagatgaagggcaaaggcaggatgcagcaggcaaagttaacattgtatttgtgagtacagttgaggataaaaaagggatgaaatccacggtgaggaccatcatggtgggggaatagtttattctaatggattcaagagctttggagaccaaactaacacatttatttttatgtgyagttaaagtcatagaaacctgttttgtgaaacctcagatttctaaagaaaaccagaagcaagaccttccttggtttaaaaaaaaaaaaagcatttcttcaagcagtttggacctgtttttcgtgtgtataaaacagctttttaaatgtctatgtaaagagcattgggattgctgttggtggttttctgtgctacttgagaaagtaagtctgtatgtgtgaaactcttttttttttttttttttgagacagagtttcgctctgtygcccaggctagagkgcagaggcgcaatctccgcccactgcaagctcygcctcccgggttcaacgccattctcctacctcagcctcccgagtagctgggactacaggcacccgccaccgtgcctggctaattttttgtatttttagtagagacggggtttcaccatgttagccaggatggtctcgatctcctgacctcgtggtccacccgccttggcctcccaaagtgctgggattgcaggcctgagccaccaagtccggccaatgtgaaactcttttagaaaggcccaagagattttttttcagtagaataaaatactgttggataatcactggtatatgaagattctatttctgttaaatttgttgagttttaggtggcttacagttagtgacagtagttgcaccctccattcaacaagcttaattttacagtttagggagggaggatttatacttttggattaacagcaagaaaaatagcaaaaattaagatgcatcttaattagcactttcagaaattatttgtggaatgagactgcagttaccagagctctctgcattctgccagtgcacaagtcttggagtccagcctatctggacttaaggctctaccacgcgctaccaggagaccgtggaaatggtatttagcatcttggagccttggtgtcatttgtagatraggtgcgtggtcctgaagtcctggacttgtggagatggaamgaagcttagattaagtcagatgcttagtgctcctggcaacgtgcctgaggagctgtcagtgctgggtgctgtggttcctgcctggacaccccttcaccctgctgcagtccagtcccttggtcaggtcactttttttttttttttaactgctccttgaggagcaggactaccccagaggcagtgtggctagagtagcccggtcaggtcactttgaaccccaggaggcctagtaaacttgctttgggtgattttagggtttaagtcatctgtaagtggtctgcccagctacctataaatctatatccattaattttaaattatggattaaaaaattttaatttctagttattatttttatgactgacttcccctagtcacattactgagcaaactacacacatcttattgatcctaagaattctgtaaggtagatgtttatttaaacaacaccgtgtttactgtgtgcaagatgttgttttaagcactcagacataataacttatctggttttcatcataacttcataagggcaaaaaaggyaagtactatcatgtgcacygtcttacaggtgatgggattgaggcacagcgaggtcaagttacgtgcccagggtcacacagacagtaagtggggttcagacctggacagtctcctccagtcactgcttcccttacccactgtgctctttttttttttttttttgagacggagtctcctctgtcgcccaggctgagtgcagtggcgcgatctcagctcactgcaagctctacctcccaggttcgtgccattctcctgcctcagcctcctgagtagctgggactacaggcgcccgccaccatgcccggctaattttttgtatttttagtagagacggggtttcatcgtgttagccaggatgatctcgatctcctgacctggtgatccacatgcttcggcctcccaaagtgctgggattacagacgtgagccaccgtgcccggccaacccattgtgctcttatgtaagagctgggattccatccatatcgctggactccaagcaccttgcctgaggcaggatgccatgctacatcttttcagcaaagtcctcgtttcaaattctgctgtaaaatgatctctttctatctttagttggaaatctaaaataaaccgtgacttttttttttctaactttagttaatgacctttttccatgactgtggaagtgctgaggagctagaggacactgtccttgttaaacaccaactgagtggggcttcctagcccactcagcctaaagctcagccctctgaagaaccaatgaggaaaccagtggggaaactgggaactgccggccaagcctgcctctacttggggtcagtggcctcactgcattccatgagcttgcacagtaccactatgtcttagttttgtgaagcgtttaaattctgtaaagccctgtcacctgatgtttgagccctagaacataattggtgtatggtaaaagcaagtgatagccttccttctcagataaaaaagaggtcactgacctgcttatggtgagatcctgtctgaactgggcctgggaccccatctcctgacagtgcagctagcctagttctctgtttcctgctgcctcagtaactgaatgtagtaatttcatttggagcagaggtcagcttgtctttggraaagcctctattcagcagaaaaagcatcagcagtatatttaaaagctgccatgtaatgactatagggactccattgagcagatccttttcttatctccagatcttttccctcaacttccagagcatgtccttacacctgagatgtaggtacccccagctctgtcccatatccagtggcatagtaaccaggtggcttagtggaggaggacgcaggaccctctgttgtggtttgtgcctgtgggggctgccagagagagggctcaccccatgattgccttyaccccaatctctcacatgcttcaaaagaggggtctggtgggaggggctgtgtttaagggtgggatctggcagcctgtcaaatcctggtcagytgggattcaacggacccatgaccacaagcctcatggcctttcctgttgaccagcagtggcagtgggaacaactcaccttttgaaaatacataggaaggccgggtgcggtggctcacacctgtaatcccagcactttgggaggccgaggcgggtagatcacgaggtcaggagttcaagaccagcctggccaacatgtgaaaccctgtctctactaaaaatacaaaattagccgggcgtggtggcacatgtctctaatcccagctactcgggaggctgaggcaggagaatcacttgaacctgggaggcagaggttgcagttagctgagatcgcaccattgcaccccagcctgggtgacagagcaagactccgtctcaaaaaaaaaaaamaaaaaamataggaaaagttatctctgtgctccagaattctctgaaacctgcttgtcagatggactagaggctttcgtagaaaagtcagttgctttttgttttctgaaaatcattttgtcccggggaaaaaaaaagcctcactgcagataatcattctctatgttaggtgttaaaatcctttacacaggagttgcatagagcccctactgcctagaatggttcttctgaaaagctgctatttgcrctgtgtgggtggttactcattgaggggcagagctgctctcggtgagcggtgggtctctctttgccctgggtgtgtggctgtgtggttgtgtctaggaagtgtgaatctccagtgtagtgctgtggaagagaggggcagggaaatatgaactcaagaggcggtgcctcagtgcagctgctgctgtggagagctgttgggctgtggagmaggacgtggatcagcactggacaagactttgttcaagtgcatgtagatacaggacgagcttactcttcatttgcttttcgttttcttaaggaggctgtttgctgggatttaatattgtctgtggttttttttcaggttgtgagcatttttgctcttcaatatcccagctgccagagacatagggagaatggggctagaggtgggggaaagattctgaaatgtaccttaatctagtctcttacacagtcttccttggacaggctgaggagttggcagaacattatgtaaaaagtggaactaactttgctttttctaactgttccaaaggctacaaataccccaaacttgcaaatacacaggcctgcacacttgagcctgtgttcctcccatccttctcyaagagatcagaagcaagctgagggcccgtagaaattctgccagctggggagggtgtctggtttttcaagcacagttgagtgattcagagtgaagtaggctgggtgagatcctgggagcagagcatgccccaggcctgtgttagtttgaggcagcagcaaaggagagaccaatctgttttctccttcagatgcagagtgggtgagatggctggctttttccaggttgccgccagctggaagctttgcccacagatgtggactgtttatctgtggtttgctgtgttttcttttttccctaggacaggatgggggagatggtggratggatagaaagcaacaacgacaacagaaatttaattggttagtaagacaggaaagccagcagggaaagctgacttcccttaattgccaagaatgttgaaaattktttctcaaaattaccccaactcctaaattctatccagtgcctctttactgagaacctttacagtgccttgtttgaatracgggttcagtgatggagaagagcctctttactgaggctaaattctattcagtgcctctttactgagaaccttatacagtaccttgtttgaataacgggttcagtgttggagaaaagcattgctgttgaggtacttaaataatttaatgagggggaaggggacagtgatacataagcatttaattagacaccatgagcagagaatgctatggaaacctggaggggtgggaaagatcgtttggggtagggtttatgggctaggaaagacttcatagaaaagttgacaaatgggatgttattttaaagrtcgagatgaagttgcacattcctaggtggaaggaaagcaaggaattgggggatttttctatgagcatccagcactgaccagaactcctgccctctagggttgttaatgtttcatctcttagcccctgatgcgctggtcacttcagccacagggtcaggaattgttcaggcccccttttctccatgtagctgtttccttcctttaactagatcagtgctcttagcacagagggatggggatgggagggaaattcatcaaggcaggctttatatgtagtttggtatacaccgagtaggggtgagaaccaggatcagttgttttatagcatggcaaatatgtattgatttctttattttaaaaagctttattgagaaccaattcacatatgacacaatttacccattttaagtacacagtttaaaggttttttagtgtattcacagacttgtgtaaccacagccacaatctaattttagcacatttttactacccccagaaagaaaccctgtgccagctcacagtgcctcccattcttcccactctccccagccccaggcaaccacgaatctcctttctgcctctgtgatagatttgcctgttgtggctttttcatattgtgtagatagaatcatacactatctggtcctttgtgactggattctttcacttagcataatgttttcagggttcattgatgtagcacgtatcagtgctttgttccttttttatggcagaaaaaaaaaaatcttccattgaatggatataccacattttatgcattcatcagttggtagacatttgggttgcttctacgttttgactcttgtgaataatgccattatgaatatttgcgtgcaagtttttgtgtgggtgtatgttttcatttctcttgtacatattcctaagagtagaattaccgtatcctatggtaactcccyggttaacattttgaggaactgccaggttgttttccacagcggctgtaccgttttacattcccaccagcagtgtatgagggttctagtggttctgcctcctcacccacacttttgttattgtatgtctttttattatagcyatcctattggatatgaagtgatatttcacagtggttttgattttcacttccctaataaccagtgatgttgagcatcttttcatgtccttattggatatttgtgaggaaatatccgtttagctctcccacttttttttttttttttttcagtgagtcttactctgttgcccaggtgggagtgcagtggtgcaatcatagctcgagtagctaggactrcaggctcctgccatcatgcctggctaattttaaaacaatttttttgtagagatgggggtcgtaatagactggtcttgaattccaggccccaagcratttgcctgccttggcctcccaaactgttgggattacaggtgtgaggtaccatgcctgtactctcccatcgtttaattaggttatttgtctttttattattgagttgtaagagttgtttatatagttgagatgcctgasctttatcagatatatgacttgcagatcttttctccaatcctgtaggttgtttttttactttcttgatggtgcactttgatgcacaaagtattttaattttgatgaagtccaatttatttattttgtctcttattgccatccttttggtgttgtatttaagaaatggttaagaaaccgttgcctagcccaaggtaatgaatatttactcctgtattttctttagtgaactttatagttttagctcttacagctatgactttgatctcttttgggttaagttttgtgtgtgatgtgaggaaggggcccagcttcattctttcacctgtggatatccagttgttccagcatcatttgttgcaatgattatgctttcctcattgaggaaattagccataactgtgtggtttatttcttgactctcaattctcttccattgatctatgtgtttmgcgtcagtgtttttaaagctccttaggttattccatgtgcagtcgagattgagaaccatctggccagagtggagagtttggctggtttgattgggagacagtacagtgcgaggtttttgtaatacttcactatagatgtgcaagccatcattcttcactaagccagtattccctaaccttgcccaatgagacttgccagggattcttgttaacaacatagatttctggcctctatgaactggggagtacagggcctggtggagggtagggagggatcagctttgtgtgtggactrtgattctgggctcttccatatggacatttcctaccagttgcaagttcaccataaccttcaggaacctgtgtatttaatgaactgttcaggtgagtcttatggtcaggcyagctggggtgacgctaggtctgccaggcgagaccattagaagcctgtgcacctgcactgcggttcatccacagaattgctcttcccaaggtactcttggactgatgccatcgccctgtgatgccattgtccttgttgtgtttactgtgcacacttccccggccaccttatttaatattgccttctgccaaatatgtrcaaatactgtcatacccacagttcttccccgtctgtgttgtttgctttgtttacattacatagcacttttcaggaataaaattaatttatttatctagtctctatctataccactagattgaaatcctcctgagggaaggatttttatttttattttttttcatttgagtgcaatattcccagcaccaagaacagtgcctagcatacagtaggcacttgatacatattaagtaaatgcgagggtattattggagaatgaagggagggacttgtctgtttcagcatcagtagtcattgtgcttgttttgaatgtcatggtgctgtgaatcatggaaataggtgtttctgtctttgtataggccactcaaaaatcattgcctaagccaggtacattgggacacccatagtcccaggtagtcaggaggctgaggtggaggattgcttgagcccaggagcttgaggccagtttgggcaacatagtgagaccccatctcttataaaaaaaagagtcatcaccatatttctgtccattttctgctaggtctgaactaaataacttatgtgtcacgtacgaacttctaacctttccccccccagtttaatttatcttgctgtattgcgtgtatctctgcaaactatctaaatcttctttggaaactggctggctgaaaggaagtactatttaatcagattcgatgagaaggtcttaacttcagccctctaggtctgggagattaaaaccttggattctaggtggtagaggataatttttttttgaatgaatttctttttatttatttatttatttttttcctttttaggatagaatttttgcggcatttgaagagctttttccagattatgtttaaaattgaaaccaagccatgtggtgaagaactcaagggtggggataaagtgctgatgacctgtgttggcattggtttctccaaccttagcaagaccctcaagtgataaccatcacaagataaggccccartgcctacagacaaagcagaagctgccacggacaccaatgggaccaagtccaaatggattaatccaggacagaatagccacttgcttaattttctgtgaagaaatatcaatatacaaataaaagacatccctgtagcatatggtttccagctgtttctccagtggcattgccattgcccaggaggggcccagtcaccatgagagctcccttgccttacctggaggaagaatgtgccttcaggccacagtcgtgctgctagaacagtctcrtagctgcagttcagctgtgcttcctcagcctactatcataggcttcctcagccctctgtcatatggctgttttscaaacctgtggagtctgttactgttctttctgcaaggactcacctccttgagccttggtttttgttgtagggattaaatgagataatatgagtggcagctcttcatgagtcctgcagtgctaagcaaatgtcagaaattggtgtattagactatttatctttgatcttctgaatggattgctgtcatggacacggacacggatcttcatctggttcattgtatttatatgtgagggatggatggctgcggggctccaagtaagttattgggatgtttttatattccaggtgtgctgtacrttcttattttattttcacaayagctctgtgatgtaartgctatctccatgagaaaattcataaagggtgttttgttcctttgaaatgtataatgtaaagacattaaatctcctcatttaaggatctaagtgtaataagtgtaatagagtcagggtctgggattttacccttgcaagctaataagttagattattacttttttattgatgctaccagaagacatgaggatcctgggtcagagataaagaactttactcagcatagcaagcagcatgaacttcgtgtttatattggtttcccctgtctcacagtggacatggaggggcccaggtagatgctatgcatgttacaagtttgcatcatagccaaagaacttgttatgtttggggactccacctatttcatggcaagcctgttgtttcacgtgcagagattacttcatcccttaagactgcctcctgcaaacacagttttgagaaagaacccaggyaagagcctgcccagcaagaatatgcaggaataccaggatccatggyagatttcccctgccagctaatagagtctgcatttgatatgtgcataggcttgaagtttgtagaaggggaaagatgtacttctttctacttgaattccaaatggtgtcctcccccgggggtgaactttgcctcatcactccctctcggtaccttttgctttttaagtgaaaaggggctagagaaaggctgtgctttgatgtctaggggtgtgggaggatgtggaggtagagagttaaccttgaggaaggccaggacattctggactatgacattctactgagagctttacatactgtattggtaatatgctcttggtatataacaaatgctcacaaacttagtagcttaaaacaatacctctttatcatttcacagttctgaaggtcagatatccaggcagggcttggttggattctctgcttagagtctcataaggctgatatcagggtgtgtgtcacctgggctgggctcagctctcatctgaaggctctgggaaagaatgtgcttccagctcattcaggttgtcgacagaattcagggttgtaggactgaagtcacctgttttcttcccatttttcttgctggctgtgagctgtggacaactcttagcatatagacaggcactgtccgtatttctgttcacttggtctcccctaccttcaagctggcaatggtgcatggaatcctggtactttggattcaccttccgtttgataccagctggagaaaacattgcttaaaaatgactcatagcacaatagtcctacctggattatctccctatcttaaggtcaactgacaacagcaatactagatttgtgtttaaataaccaggggctgggaatcgtggattaccatctaagaattttgcctgccacacatactgcagtcttacctagtgccgctgacgttcgaactcagatctgcccatatagagctcaaatccagaactaaggggcacattgcttttggaatatcacatacctgccgttccttgtacaagctctggaaatggtgctgttggtcaatgtagggtggcacatagaggccaggcagattactataagcagtagaggggatatgtgctactgtctgctgcaaacctggaagtgtctggtgtggttccagccctgcatttggcaaagctgcttctggagttggaacatcttgcaggaatggtgatggtattgccaaaaagaggacaaatttaatatttatttaaacagctcactcccagccccttctcaaattcccaagagaagcaatgtaccattccttcgggaagaagtcatcctttgctgtttgctgggacatcttagagactattcaaatcctgcattctcttccttttttctagcttagctcctggtcggtccacttacttgctggggtagcttgaagcgagagattccagcgttttggggcttggttttctatcttggtctgtctgttcctttctgctgatagagatagaccattctgagttaacggcagcagttgttcaatgggagtgtgagttttttaggcagataaacctgtgaacttgctgggggtcatggcagtatcattctttgccttcttgtcatctacaaggccctgcttctgtctttcaacatcctttaactacattccatgcagactccagccagcctccatcatgatgattttaccatagtggtcaaaacagttgctaacgggtgggaggcagccagtgtgttgcaacatgacatgttgattgggaaggagcaacaggaggacctgctgaattacacattgccctcactgggcagctaagcctcaggggttttgttcttttaaaaaaaaawtaaattcttttttgagtcagggtctcacccaggctagagtgcagtggtgcagtcctagctcactgtaacctcaaactcctgtgctcaagtgatcctcttgcctcagcttcccaagtagctgggactataggcatgagccactgtacccagctaattaaaaaaaawttttttagagatgttgtccaggctggagtttttgtgtttttgtttttgtttttccaatttaattttaagttctgggatacmtgtgcaggacgtgcaggtttgttacatagataaacatgtgccatggtggtttcctgcacccatccacccatcacctaggtattaagcccagggtgcattagctatttatcctgatgctytcccttctgggttttctttattttaaaaaatcatttccaaaaaagtggtaaaggatagctaatcacagacccaaattataaaaacaaaaattcaagttgtaccatggtgcctgtcctcacaccaaacggcagaagaccatgaggtggccatttcctgttaggtctttgtgttgggaggctgctaggtgagaccaatcctggcacttagttttatgggccctgagtagaagagttgaaggtgctagagggaggcaaaggaagtaggcaggatgttgtacagagggctggaagcagttgatgaaatcaaaggtagttggggacactggagcatcagtgaaacaatttccaaagttttggccgtgcctgaggtgagggtggagttcggctgggggaggcggaatcagagtgagctaaataagtggatttactgtgccttcgttccagggtctttggagtagaatgtggggttctgttggccttcccagttggtagtgtcagacctggggtgtacaggtggcaattttagtctgtgatgagtgggaatgcagcactgcagggcctgtgccyacccaggatctccattgtcccttactccagagtggacgagaagtagttggcacttgggtttccatgttcagatggtgctggcctgttctttagaagtgactgaaagtttaatgggattgtcaacaggcaagctgggcctttttgtacttttcttggccacatctaagaggccatttgagtggaacgctttatcagtgtttggcatctaacaaaggccgagccacgtcactcctttactccagcaaatgaaagctgtccggttgtcagggtttgcccgggtgtggggctgccctccttcctggtcgcatttggcccgtacctgtcaggtaccctgagcacgggcctgggatcggcacctgttttaaaacatcctagatatttcaggtattcaagtgtctctgagggctcgggacattctttattcctgtttcctcctcattcccacccctctgaagagccttgtgtccaaaaatcctcagattgcttaatttgttaatttatttctgccacaatttgggacattacatatttcaactgatatagaaatcagaggccaacttaaagacaaaagataatgaacgagcctggctaaaagatatgtgcctccgtgtgtctgttccctgaataccctgttactatggctgcgayagagcrcttgggctgctgccggactccctgggggccatctaggcaactggtctccgtcttgggagaaaatgatgccccaaaggtaaggtcggctgctgcttcctgctacatctgggatggtgaaccatcctgaagttctttgtaatcttcaaggaagtctgttagtgtttgaaatggtacctggcttcagttgtggcaacccaacctcaggctgttttaggtgctgtgtgcaagcacttgtttcctggaccctcccacatgcccccctcttggtcctaagctctgttttgaccaccctgctattttacccattcattagacaatgaaaggcatcgtgcctaagatctataagctttgaaggacctatgaartgcttgcaagaaaccaggaaaaataatcctggctgcaaatcatgcaaagaaaagagcaagaaaaatatctacaaaataaaacactgtacagcttaatttttttcagcttaattgttaaaatattgagaataatataggtgagaatttcttttttcacaagatttatagttttagtgtctgttctgccaaagtgagcatgtcacaagaatttctaagtgcatgcagtgattaccaaggagtcatagctaagcacattgagttgctgatcaccaagccatttaaaaggtaaaattataaatagcttttcagagatttggatagggctacattttttctttctttctttcctttcttaagtttttaaaaaatagagacagggttttgctrtgttctcaaattcctgggctcaaataatctgcccacctcagctgcccaaaatgttaggattactggcatgagctaccacacccggctgagctacattttaatatgtgtggttcgataatgctctcataacacacctagaaagtaaaaccatctaagcctgcccctcctcctatggagccacctcctcagtcttaaagcctcagctgctcgtgaggaaaccctctatcctcacaatacacccactgctacatgttctcatagacgcctctccccgtccttatcgtagtactcactgcaccctgtcgttgcttaattttcctctctcttcacctatggtggtaggggccatcttttaagatctggtgtgtccatgatcttaaagtttttaagtttctattaaaaatcaattatattatttgtgagagaagttttttttttttctttttgaaatacgtaaaataaagctggctggcttcttgaattttagtagtgcattgtggaaataacacaggcttaggaattagctatgtttgaatcccagctgtgttagtagcattgtgctggccctctgtccttctgacccttagtttgctcatctgaaaatgggaattaccttgtgcccaccctgggattgagaagatttattaaacttgtgtttgtgcttaggattctttttagttgtttgatccttggtaaagattcaaagcagatttctgcataacaggttaatgtcagaatgagtcacagcatttatctttaacatctagtacttgggtgtactcagctagaagaccagagacaagctatggcacctacatgtgggttgaggtcaaactgtcccatgacatatgttacaagagttaaagagagggcctacaggcatctcagtgagttcaccgtgttccaacgtggagtgccaggatccatctagtcggcacagaggagaaagcctggctgacctggcaggtcctgaagccactgtgtacaccaaaccaaactgagtcgtaaggaactccatcctttcctctcccaccaagaaaggaaaagaatcataatctctagttgccaattctgaaattttatgtgtcagcctacgtttcctgtagccagcctggggctgcatgaaacatcatgtaatagaaaaagtcaaacaagcctaaggctctggtcttgggtcttctgcctaaggcacacctctgagcaaatcattcagctctttgaacctcagtttcctcattaggatatgaacaaaacctactgcaaaagactatgaagactaagcatgcgtactgtacaggccctggcaatactaggcattaaaaaactgtgagttgcctccttgactggtggtagagcgaaagattaggtttcatgagtccagagatacaacaggaatgtagaagtcagtttaacttgggtgagccctaaggctttgaattgartagaacatagttgcaaataagaaattgactcaaacagcaggatttataggctttttaaactgagaagtttagtagcgcatttagcttcaggtaaagctggatctaggggttcaaacaatgtcatcagaattcaactctcaggctgaggtgggaggatcacttcaggccaggagttcaagaattgaactctctcccatctctgctttctgttgtgttgtcttccttctccagcaggcattctttttcatatgctgttttttttgacaacccttaagtactggatagagattctctacccaatactgaatcctagctgtgtcagtagcattgggctgggcctccatccttctgacccttagtaccctcatctgaaaatgggaaatatcttacccaccctgggatttattgggtagtgagtgattctctctattcaatacttaaaaaaaaaaaaaaaacttttaaaaaagctatcagaattgtgtctccctctgttgaacacagagcaccccaattgaccagatctgggtcctgttctcatccctggagtggtaatgatgtcagcctcacctaaattgtacggactaagaggaaaggaagagttgattctcaaagggaagtctgaatgcttttatagaagagacaattgatacgggataggcagaaggagcagttgtccactgtagactacattgcctaattccttgaatattctcagaaagatgccccacaatactgcctgcccaccaccatctttcaccatccagaatcctccagcattatggtatagaatcgagtaaacaaggatgaattcaccttaacaaatgatgcccaacaaaggcaagatcattggactcagaaggccaaagttatcttggatgcttggcaaagatttgttatattagccagtggcattcttgggctagaagggggagcagtactctgggtggtaacccagagggaggaaaagtggcaatgaccaattccatgtgtgggagcagcatgggtgttgtgggccaagaggaggggccggggcacagcgtaaagaaaaatgtcagttgatgttcttgttctctatcatggtcctgccttttcttttttccttttttttttttttttttttgtcctaagacagagtttcaccagagacaagctatagcacctgcaggtgggttgaggtcaaactgtcccatgacatatgatacaagagttaaagaggccctacaggcatctcagtgagttcactgtgtagacatgttgcccaggctggagtgcagtgacatgatcttggctcagtgcaaactctgcctcccaggttcaagtgattctcctgcctcagcctcccgagtagctgggattataggtgcccaccatgacgcctggctaatttttgtatttttagtagagatggggttccatcatgttggccaggctggtctcgaactcctaacctcaggtgatctgcctgcctttcagcctcccaaattgctggtattacaggtgtgagccactgcatggttctgctttttctaacctctggaaaacagattcaggagctggggaggaagaccaggattttttgcccattgccaagatcatgaattgatggcaacaatgtcaagagctgccggcggaagagcaatgaagacatatcaaacctatgactcctccagtgggcgggagtgtgagaggtgcttctcattttcaaatgatttgcactattttttttttttggagatggagtctcactcacccaggctggagtgcagtggcatgatctcggcttactgcaacctctgcctcctgggttccagcaattctctgcttcagcctcctgagtagctgggattacaggtgcccgccaccacacctggctaatgttttgtatttttagtagagtcggggtttcaccatataggccaggctggtcttgaactcctgatcttgtgatccaccctcctctgcctcccaaagtgctgagattacaggcatgagccactgtgcccggcccgcactattttttacagttatatgtacacacatatatatttgtatatgtatatatgttagtttatattaagaatcccaggtagaactccagcaattttccatcagcctcaaggcaaataaagattgggaatcctggctaggtgtggtggctcatgcctgtaatcctagcactttgggaggccaaggcaagtggatcacttgaggtcaggagttcaagactagcctggccaatatagtgaaactctgtctctactaaaaagacaaaagtcagccaggcgtggtggcgggtgcctgtaatcccaggtactcaggaggctgaagcaggagagccacttgaacctgggaggtggagaggttacagtgagctgagatcgtgccactgcactccggcctaggcaacagtgagactccgtctcaagaaaaaagattaggaatcctctttgtctcactcctctgcaccctcaaaaatcaacaacaaccaaaaactacatatgcaatttacctgtggcagaggcctcagaagaggccacaaaagatgcctcaggtgacctgctgcaatgctgggcaagtggcttaggcccttgcacattacccattttccagggctggctccaggcttctgagtcagagcactgtgctcagcctccaaattagggtctctttagggccagtgtagtgcttcccagaggaggttccatgatacactakcatcatggggtgctttccctgaaaagggcttatagaggttttgaaaatgcagcagtctccatcacagtgtacattaacagagcaaacactacaagaagccttgcaagtgaagctttgttttacctgcactgttcaaactcacctaaccatggaactctccctaccctggaaaaagagagagagagaaagagattgtttgcattatgtagtgctcttattctgcagatcacactttgggtgttcctggtctgataggatttattgatgaatacagaaaatataagctcttgcattctttttttttttttttttttctgagacacagtctttctctgtcaggctggggtacagcggcgcgaccatagctcactgcagcgtcaacctctcctaggcttaagagatcttcccacctcagcctcctgagtagtagctgggaccacaggtgtgtaccaccacacctggctagtttttaaaaatcttttgtagagatgaggtcttgctctgttgcccaggctggtctcaaacgcctgagctcaagtgatcctcctgcctcggcctctcaaagtgctgaaattacaggtgtaagccacggcgcccagccagctcttgcattcttgattggggtatttgtgagaagccaagtggttgtcaagaatctaggtggaaaatccagastcatgtctaaccctggccccagccctacagcattgaacacccccgcacatgagcttcggatcagtggccatcagcccaactgactctctgccatcttcccttattgtctgggcttctagaaattagaggggccaggtatgtggatagggttggattttgtggtgtttatatgattattacaatgtcctcattttcttgagagttacacagactgttgttcttttcctcttagctcagaggctcaatataccaggaaagctcactttaggttctcagcaagaagttggaagaggtcagggagaaatccttggggaggaggaaccaaggagacatgaaaggtttcttgaagtcctatggttactctaaggccaagcctgaaccttgaaacacctagatttttagaggattcaggccaggacaccacctgctatcactgagatgcaaagacatggtccttgaagcaatggaccttgttgctcagaatggggagagagcttgagctttttaagttggcttttgaaaagatactcttgtacttaagcccctgcttgacctgcttctctgttaatgggctctccagaaaagagcttggcttatactctctgagtgtcttcttcaagatgtagagttaatgtcagtgcttttaaaatctgttgaacctgtgtgcccaggataaacttttgcacctcttgacaatctgagtgagttctatttgtagtcctgagttttgtctttgggagtgcagaaggtgaaagagaccttgaatcacctggacacccacctgagaagaagagtgagaaaggaagtggataacaacctcagttggaagtagtgtgctctgagtacctttgttaacaatgctaagaaaacagctttggcaaagtaaggggtgctgtagggagaacaggagtgggttagctgctccagtccgtcgaggactgtcctacttgtctgatctgtttgccggggatctgcatgccccaagaggactgtttgaatgcttagcacataatatgctttgtacatcttgtgagactatcttcccaaattttaagaaccattgttattatggataatatacaaatgcattttaaagcagtattgaattcatacttatttcattgtgtactttttgtttgtttgagacagggttgcactctgytgcccaggctggagtgcagtggcatgatcgctgctcactgcatacttggattcctgggctcaggcgatcctcctgcctcagcctcccgagtagctaggactataggcatgtgccaccatacctggctaatttttcaattttttgtagagacgggatctcgctatgcttcccaggctggtcttgaatgcctcacctcaagcagtcctccctcttctgcttcccaaggtgataggattacaggaatgagctaccatgcctggcctgtattttctcaatcaacagattctattgttctattctactcttctattctattctattctattctattctattctattctattctattctattctattctattctattctattctattctattctatacagaaagaagtctgtgaaaattttagatgctgaaaagaggtccttgtgctttcttgaaaagtgttatattgtaaaattgcttgccccgcagtagtcatctctggttagttgcctatcttggttatgtaattattctgaaaggttctggaaagtttgaacttcttgccacaaaccttgactgtttgcctgctttggagggtagggttagaagagagaagagggctcatcactcagagggctgaatttccatttagcatcactgatctcctgatactaaaacgtccaagctgagcctccctgctttgatataaagtgctgcctccttccctcaggatgtttcctccacaaagcagctgacttccaatgtggcaagagctcctatttttcttgactcacaattgccactgccttatggatttcagaacacttccatgaacattgtcccatttcatcctcacagatacttctcagtttaggcttagagaaactatcaaacttacttaagatcacacaattagtggagaaattgcagcaagaacacaacactttgggtttcagtagctctgaaccatgacatatgagtgtctttattaggtcataccttagtgccctttcaaatgggcattatttaaatgtttgctcaatatctgtttagagatgagaagatgaacagctgtgaaagaagggtagaaaagggagatgtggaggcagcacccaatttttcatgttttcctcagaaagaccaaagcccagcagctaaccgtggataaattgattatcttttgttactcaagcattccccttagaaatcatattaggactttttttcttgaatgtaagtgactaaaaacaactcaaaacaggcttaagcaaatgtattgactcatttaaaggaaaagtccagggatgtacctcacttcaggtataaactgggtccaggggcttgaatgatgtcaccaaaactcatcacttttgatccgtcctctagtagggtcaccccactgatggcagcaagaagtcatcagaagttcttggcgtgtatcctatcctctcagcagccccaataaaaagaatctgacagttcccaaaaatgtccccaaagggttgaatatcatgggattgatttagttatttgcccaactctaaatcaatcactataaccagtagtggttggtcagattggccacatctgggtgcatgccagctccaagagcccagcgcacttggacctcccgtaccaaatgagctaagaataggagaggcggtcaccaaggaaaatatgrcttctagtgccaaaagacaaagaaatggatgctgggcaggccaaagcaatgaatttgtactgaagaaatgttcctctagccccgaacacctggcagcttaccaaaatactgctttagacaatattccagacactccctcagcagaattccagtcaatacaattttctctattccactgcattatagtttggtaccctgggcagcttctcaggtaaatcccctttattccaactctgtcttcaccaggtgaggaagttgcagagtggagggatttggcccaagtcacacagccaggataaggaggaattcagaccagatcctgttcccagaccattggctactgaaaccaggaagcactgctgaccctgacacttgggccagcccagcagcacagccttgcttgtcccatgacccagccaagttctgttaggacccaagattggtgtagattatagcaccaaaagatctccaggttctggaattggtccattttggccagtgctatggtctgaatattcgtatcctcctcagattcgtctagtgaaatcctaacccccaaggtgatggaattaagaagtgtggctttagagagataattaagtctgaagagcagagtcttcatgaatgagattagtgtccttataagagacacttcccccctttcttttccaccttgaggacacagcaagaaagcactacctgcaaactaggaaatgggtcctcactagatactaaacctgctggcaccttgatcttgaacttcccatcccctagaactgtgagaaatacatttctgttggttagaaaccatctggtgtatggtcttttgttatagcagcctgaacagactaaaaccttccgaggtaatcataccctattttaggctctggagagggtgcatcagtgtgggcactgctgtggactttgtctaatattcagaatatgtgcattgatttaggtaaaaaatgttcttaagagtccccaaagagtgatcatctggaaggatacacattgtgtcattaatagaagtagcacaggcctgtgagattgggaagggtactttcactttttgctttatctattctctgttgttggaattatttagcggcaggtgctgagccccagtgtgatatctggaagaatcacacttgtacctgaacacagagtttgagatagaccaggcaaagtgtctctgatgaggagctcaggggcaggttcgttagggagaagactctggacccaagcataaggctaccacgtacccagaaaaattaagatctttatttttatcttttggagaaaaggtctcactctgtcaccaaggctggagtgtagtggtgtgatctcagccggccgcagccgtgacctcctgggctcaagtgatcctcccaccttagcctcttgagtagctgggaccacaggcatgagccactacacttggctaatttttttttttttttttttttttttttgagacagagtctcactctgtcatccaagctggagtgcagtggcatgatctcggctcactgcaaccctggctaattttttaaaaattattttttgtagagacagggtctcactatgttgcccaggctggtcttgtactcctggactcaagcgatcctcctgactcagctccccaaagtgctgggattacaggcgtgaatcactgtgccagccaaaagttaaggtctttaaaggatgaggaccttttctttcagtggcactgaccctagtagggaatgtcacttgctacactcgtcctaacaccatcaagactgttgaccagtgggcatgatgcttactggcctggccacttcccttatgggcaatcttacaaggcataggagaaaaacaatcactcaactggccacacttagatttttttttttttcgtctacacctcctcaaaggagcacacctagattttgacctaaaagggaaatgaccagcttattgtctaggcttcactccaaatgactttagacttatttcaatcatcaaatctgtcctgaaatgataatttgtcattttgaggacatctagagaataaagctatgtcctaaagtcaacagagggtttcctaaatttttattaaaaaaagtctcctttgttaaaatgaggattttggcaaggtgcagtggctcacgcctgtaatcccagcactttgggaggccaaggcaggtggattgcttgaggtcagtagttcaagaccagcctggccaacatggtaaaaccccatctctactaaaaatacaaaaattagccaggtgtggtggcgggtgcctataatcccagctacttgggaggctgagacaggagaatcgcttcagcccaggaggcggagattgcagtgagctgagattgtgccactgcacccagcctgggtgacagagcaagactctgtttaaaaataataaataaataaataataataaaataatattttatttttaataaaataaaataatataataaataataaaataataaataataaaataaaatggttttcacttttccaggtggttactttgaggaagatgttgttcctttgcatgagactccctttacaccgctgacctgagaatacctggtggctccaactttgcttggaactcaccttcttgctccactctcccactgctgattccttcccagaaagggcctggatccatccccaccttgacttcatcccttcttctcttacactaagtgaaatctccagtggctggactggtagtggccatggatgtgtctttttaatcattagtaaatctaaggaccttgatagttctgggccactaagttttttcttatagagtctacaagaaagagaaagaggtggtgacgggagataaaatagactcatcttttctttcctatttccccttatctacataagcaaaaccttttagaaaactgaaaatgagatgtacttggaataagatggaactctaaaccttcaagagatgggcactagaaggagatgtccagagcggcaggagtggggcacaggagtgtggaggcaagctgcagacgggacagtgcagctggccaggaatatactgcgtgtccctttgggggccttttgattgcatttctattactccctccctctggccctccagttccctccttactcccctttaatgctctgcctcagcctggtttcaaaatgaaggactgggaacaggatgacctttttctcttctgcattaaattgatagaaatgatagcaaatatattttgtaaatcaattaatgaattgcaaacatgaaaacacaacagggaactgtcttgctggaccagaaatagcaaagcattcctaagagaaggatgcagacaggaaacccaaagtaaatcagtcttgaaaccataagccaggctgctcctctgtcaagaaactgtctaagcccaagacttactcagaagagtaccaatcaagaattaccaaacatctgagamaataataccgtgaaagaaagaaaaacaactcagcaaatgaaagtccttcctaaggaggcagtgtagatgggaggtagagggctgagccataccctcccttaaagaatcccatgcgacctgggcatgcccacttcccagtagactggctcttcccagcatggtaaccagtggtggttgtgctgagcaaatgcttctgtgattggggaggtgctggcagggatgtakgcacacaaagatgctgtggatagtctggatttcytgctaacttggcctggggttttggagccttgggtccaggatgctcctggaagaagggtcagtctttgcagcccaaaccgtgaagttgaactcccaagttaacacttgcaaattcattcattgcctactaagcagtgggcaggttggctatccactctttctcatctctgtgtctttaaagccatgattctcgagggaggggagggaggggggagsatgccttcctaagtaagagtatcagggtcatttattctctccctctgatcccagcacctataaactccatcctgccccctcctcaattctgatatgctttctctagggtgtatgtggtgtccacccccactgaagagacgtgttttgatattcagctgggctaaggtagttaaaaatttagagaaccaccatttttaggtaattgtgattctttccaatttgtataaatcacctatctggtacaaactatcttccttattctgatgacccaaacgcatctctctcaccagagctcttaaactgtttcagaattacagcccagctttctccccttgaagacctcacaggaatgagaagcctaaatgctcaaagcagagctcattttatcttgcttccagagcccatcctcggcctacatttgttttcttggtggatgatagctcaatccagaaatcttggactatttattttattatttatttatatagaagatgcaaggtgagatcttggagtcctcttttgctgtaccctctcttatttcccatattctacaccccgctacctccccttttcagagacagggtcttgcttggttgcccaggctggagtgcggtgatgcaatcatggctccttgcaacctcaacctccagggctcaagcaattctcccgcctcagccccctgagtagctgggactatagatgcatgccaccatgcctggctaatttttaaatttcttaagaaatggggtctcactgtattgcttaggttggtctcaaactcctggcctcaagaagtcttcccacttcagcctcccaaaatgctgggtttacagatgtgagccaccatgcctggctcctacacccttttcatcagcctccagtcatattaattctacctccttaatagttctcatcattatcccttttctccacatccatggacacttgtttaaccatttcattaatttaagcatccacagtctcctaattggtttctctgactctagtcttgctccctccaattcattttcctctctgctctccagatctatctcagtaaaacaaatcttaccaggccacttccctgttaaagtcttcactgtaaaggggaatagagaatttgtatcagaagttctaaaaatcttcataggctttgatgggtatgatttccttgctagaagtttatcctaaggaagtaatcagatgtttggacaaaggtttgagtacaaagatggtcacaggaaaaatctaaccattcgatattaggaaatttgtcaaaccaaaggacatttataagatgaaatctcatatagccattctatgttgtgagctacagagaatttaaaaatatgctggggacagcttggaccaggtggtgtctttgctgatcctcatggtacccttggcatatctccctcagagcatcggaggacttatcccactgtgtctgcctgttcttggttcttccccattgggttataaggttctagaagggactgtgttatatttgtctctttacccccacgtcctgtagcaatgctggcatacagtatggtgtgggagtgggatgtccttaaggatagttgggcttcaagatctgacacacccttaagtggtatatccaaaactgaaatcaatgctcctcccaacccctaccccaaaaartctcagacccagaatgttattcctctcctccatagcaatctccatgaaagagtcatctttggtggccttggaggtaccaacctttcccatactggtgaagaacatggtgtggtgtgatcctatcccatagctccttaatcttccctatatcctagtacccagattttaaaaaatagggctcaggctgggctctgaggtgagggaagaggaaagttggggctagccagggccctgaggcatgggcggggygtggtgtgacatggtaaggggtgggagtgggcaggagagactgcctgggtgaggcttgcctcagatggagaagcctgacctggatccacttgctgcctgtaggagctcagtcgccaaaacctgtctggcctaaagacaggcacagtttgatttaatagttggtactgacctcacttgaacattaaatcaataaatgccaacttaatggagctgttgctgggaaactaaggagtatcaaatatccaatatctgcacagaggagattgttttgatctgttttgtttttctaaagctgcaacttgctccttggtgcactttaggttattcctttttggtaggaaagtggctcccacactctcctctccacccaccctttgaagaggcttggaaatgcactcagcagctgcccccatgataagccgaagggcctgtcctgtccaggttggcaggtcctcccagcaggcagagtgaggagttcatgaatgagggaggagactatggtgtctcagaaggaaaactctagaggaaaaacacttgagtaacaatgcccagttcaacctctggatctctcttgcagcttgctgaggctctatttccagctgaactgtgtagctctcagcgtgggtgccttttatccatcactggtgtcatgccaggtcatcttcatcttttcttagctaactgaggaggacagtcatccaagctggggtctcctctcctgtgtgtctctcctagggatggagttgccaggctttgtgcttgttttacttcttctccagcctttccttcccctccctttcctgttccctaggttggtcatagcagaggttgtgttggagggtggtactggcttttgggaaaaagaggacaatccccatgttcttcaacacggctgccgcaaacactacccagaaacaggctgggaatggggacttgaatgccagctgtggggtgcctgccttgcagccagctctgccaaagcttgtggttatgattgtctcctttcttctgcttcacagccagtcataaatgccatcttccttggatgtctgagtcccttggaaactgggctctgaactcgattccactggggttaaccatgggctatgctatcagaatttccacctaggcctccagtttccttagagcaaaaggaaaacaaattgtgaaaggggagtagcagagtgggaaggtggtctaaggacagctgttctgacctgagtaatattacatccctgatgggaggcagcaagtgcagcaccttccacacctgaaaccatcacttaaatagcgcttcatggtttggggactgtgacagtttcctagggggctataacagagtactgtaaactgggtggcttaaaacaacagaaatttatcatctcacagttctggaggccagaagtccaaaattaagttgctggcagttggttccttctgagagttctgagggagaatcttttccttgcctctctcttagcttctggtaatcccagacattccttggcttattgwtgcttatagatgtcctttgaatagtagacgcaatcctccattttcatatggtgttctccttgggtctctttcttcatgtctgtcttctgttaaagataccaatcatattgaattagaagtccacctactccagtataacctcatcttatctaattaaatcttcaacaaccctatttctaaataatgttacattctgaggttctgggattaggacttcaacatatctttttttaggggatatatagttcaacccataatggagatcaaaggctgaaggatttgcagcaagcagatccgggagttatgtgggtaacttggaagacctgccaaaacagtggtcttgttaattctacagggaaagccatctgaactccaagacttcataaaaccgtatttgtatgtattgtattggtgaagacttcggtggcaagtcatggaaattaacttaaataagtttaggttgcaaacgatggaaactcaattccagctggtttatacaaaataataagaaaagaaattcggccgggcgcagtagctcacacctgtaatcccagcactttcggaagatgaggcgggtggatcacttgaggtcaggagtttgagaacagcctggccaacatggtgaaaccccatctctactaaaactacaaaaattagtcgggtgtggtggtgggcacctgtaatcccagctactcaggaggctgaggtaagagaattgcttgaaccctggaggtggaggttgcagtgagccgagattgcaccactgcactccagtgtgggcaaaagagcaagagaggaagacatcatctcaaaaaaaaaaaaaaaaaaagaaagaaagaaagaaagaaagaaagaaattcattgtaatgaattgtaattcaaataatgacaaaaaccacgattatttttgtaccagcctaatataaccagaaaaatctgggaatggacctagttttaggtagagcagaatmtaaggttcaaattatgcatttggaagtgtctctcctccctcctcccttcttccctccttctctctctctccttcccttcctccctcccttttttcttctctctgctctctctttacctgtccttctcttggtttggcttgtttctgcttggtttcattctacaggcagggcctcttcgcaaagagggttttaaaatggtggctgaacattctgaaaacatmatctcagtttagctaccccagcagaatgagaacttctcttcccaactccctagatcaatcctggggaagacactgattggccttgcttgaatcatgtgcccacacacaaaccaatcattgtggccagggggatagggtgactggccagtctggatcatgaattcaccctctgggggctatccatgacaatttgtcctactagataggacctcatgagaatctggggaaaaccaaagaaggaggaaacaagttactagactaacactatagctactacggtccactacatattccaaccagcttaaaggaaagggggaatttatcttaaggatacaggrgtatcttgtggaatacgagggaaggcatacagctgggcctttggagagaacttggaagctatcaggaccctggcagcttctttctgcccagatgcttcattctctctctctgcaatcctcctttttctgcttcttagtgtacccagtgggaagaaagtggtgtctctacaacctcccggtyttgatcttcttcattcaagggaccagcctaatttaaatgtgcaaggaaagaaagctgattgatccagcttgagtcagatttccaccccctaatcaattgtgttcagtgtgtgtgggggaagggggcatacaccagaaacaacatacccagaggagaaggatccagtatgtgtcagttttaatctcctgcaagtgtaaaagctccctagaatcatcctaaggatcattttatcctaagaccttcattttgcagataaatggaagtctcaaaaagttaaagagtttgagatctcacccatacagacagaggcaagataatgacctagctataactggtgcccaggtcccaggatttcctttccagctccttctacaactccatgtttaggcttaataatttccatggctcttgtctatagagaaaagtacaaagcaagtataatcacacagaacacacctatgcacacacatgcacacasgcacacacacacacacacacaccccactggccaacagaaaacctgcctttctccttcatagcctttgcttctgctgtccctctgtctgagtggtccttccacctctgacatccaacccttggcttggttaattcctatacatcttttaaagctcagctcagttatgacttgctaaaagaagctcttctgaaatcccaaactaggtcagcccccaccctgttttgtgtttttctagtatttctggattttccttcttttgtcattaagttatcaagaatgaaaatttgtgtaatttgttcagtagatgcctcctcctgggttgcaagagctacagggccaagactgtgtagtatccctgtgttgggcaccattcttgcacatggtaggtgcttygtgaatatttgtcaggaaaaccaaaaagaatgaaacataagagaacaacaagaaaaagaatctttacctttaccctttctcttggaggaatatttgacttcttattcttgtgaawtctgggagattaggaaaaaagcttctgaaatgaaggttatttcagaagtaatttttatgggagagcttccagaattcttagcctcagtaatgataatggctaacattttggagcagctaccatctgccaggcttggcagtgctaagtgcattgtcccttttaatcctcgcatgaactctttggaataggtactataggtgctgagcctggctcttcagaacaataagcatcctgacaaatgactggtcccytgaagacagtaccaggtcttattctttgcacttggccggagactagccagatgctgaggtgtgctcagtaaatggggatcatggctgagaggcccttgcaggaagctagaacctcacacacttcctctggttccagagcaggggtgtgtagaatctgtagggagacactggtgggtgttttcacaggagactgtagtgcccaagcagctttaaaagggctaagggaattttctgggatgctctacgcttatgtgggagctgactttgctttgggccaaaaatctgtgggtggtgttcagatctscttctatgtccttgtaaataaaaaacctttgaaatgcacaatcacacaaaaagcaccatttatttgaactttttgaatctgttcttcctaagtgggtacttatgcttgccaccagaaactgaytgatttctttctaaagcccttggtatctgtcttagtcttttatatggctgtaaccatacacaataccataaactgagtgtcttataagcaatggaaatttctttttcacagttctgcaagatggaaggtccaagatcaaggcactggcagatttggtgtctggtgagggctcacttcctggttttatagatggggccttcttgctgtgtcctcctcacatggtagaaggggtctggggttctctaggcaccccccagttttttttaaataaggatattcactaatcgtcttctgatggctctgccccatgacataatcatctaaaggccctacctcctaataccaccaccatgggaatcaggtttcaacattggaattttgaggggatgcaaacattgaggccatagcagtatctaatgtctcacatgatccttgcaggagcagcctcctgaagtgagggtggcaagtatgtgacagggcacccacaaaggcagacgaggactctgagaaccaacaggacttctctggtcttattctgaggctaagacaaaaaccgcacctgagccagatctctcagcctggcagctccaggacccgtgggccctgccactggcccatctcaacggctaggacctagagcatcatcaagctgcaggttaaacaggttggttggttctgatttgactgcacctctacaaggacctatggctgcacttgttgatactttcccgaggagccacaacactgagcaatgaggggaggagcatgtgttagttcattcatcaagtcctaaatgttacctactatgtgccaggtgctgagccaggcaccagagataccatgatgaacaagacacataaatcttaccctcattgagcttacaccatgtgaaagagaagtatgaaataattatacgttatttttttttagtttttgagatggagtttcacttttgtcccccaggctggagtgcggtggtgtgacctcagctcactgcaacctctgcctcccaggttcaagcgattctcctgcctcagcctcccaagtagctgggattacaggcacctgccaccatgcctggctaaattttgtatttttagtagagacgggctttcaccatgttggtcaggctagtcttgaactcctggcctcaggtgatcctcccaccttggcctcccaaagtgctgggattgcaggcgtgagccacggcacctcacgaattacacattattcaactgtaactgtgaaagtgattctaaggaaaaagtacagagagctgtgggaaaacataataggaaatctttgtcattctgtcactattgtctattaggctgtcactgttgtcattgtcacccctaccctctcgcagagagtggttcccatttgccagagctcatttattgtcctgaaggtctgtgaaaagatgacaaagtcgtgttgccttctttccactttcccaagtctcacgtgagcacccctaactggcagaatcaattcacacccacaagcctagctgcaaggggacctgggaaatgtattcccagctttccaacctctccacccaggagatgaaacagccaatttaggccaggtgcaatggcttacacatgtaaaaccagcactatgggaggctgaggagggaagattacttgagcccaggagtttgagaccagcctggacaacagggcgagaccatcatctctacaaaaaatacaaaaaaaattagctaggcgtggtgtcctgtgcctgtggtcccagctcctcaggaggctgaggcaggaggatcgcttgagatcgaggctgcagtgagccgtgatcgcgccactgcactccagtctgggtgacagcgagaccctatctcaaaaaagaaaaaaaaaagaaagagccaatttaagtatccagcgcacacagggcaagcccaaatctgtatgttttctataatctgttttttaaatgggggtataattttcatataaacatgcacagattttaagcatacagtttgacaagttttgcaaatgctcacgtaactatatcccagtcaagatacagaacatttccatcatgctagcaagttccttcctgcctctttctggttagtctctcctgtctcctgctcagaggcgatgttctgattctaccaatttgttttgtctgatgatcacgagtcagtattgcctcttctaggactttaaataaataaaaccatacaatatgtcaccttttgtgtctgactccttttgctcaaactactaagtcagccatgctattacatgtatcaatagttcagtccttagccgggcatggtggtgcacacctgtggtcccagctacttgggaggctgaggcaggagtatcgcttgaacccaggaggcggaggctgcagtgagctgagatggggccactgcactccagcctgggtgatagagtgagactcggtctcatgaaaaaaaaaaaaaaatcagtcctttttttaatgctgagttgtattccattgtatgaatatatcatatcctctcaccagttgatgaatgttcatatcatttccagtttggagctattataaaaataactgcttaagtctgtattttttaaacaaacatccagctaattctgatgcaggtggaccacatgttgagaaacactgctctaacacagagaattgaagcttattgcccaaagccacataaccaagaaggctttgacgccagagcatggattcaagagcccatgcttttcctacttggacagtagatgtcagaaggagggccttgaagataagacatatgtttcagttgtcaattgaagcataacaaaataaccaaactttggtttcaacatcaatgatttcttaagattctgtcgtcctggccgggtgattctgtggcaggccaggtctcactaacaactctttcagtactgactgagtggttaagttaaatattaaaagccagtgcccttatacgaaggctgggatgtaacaaaagcccagcaagagttttgcctaggccttttctgggccttaaggcgtgacaaaataacaaaggaattcttaacaggacccgtttgggattaaacaagttttattgtgggtctgaagaaactccccagatctccacaaacaagtttactggaggcctgaaggaactcctctaacctccatgatttagcaggagacaagataagggtaatcaccccagcacctggacccatttagattaagtaaatgtactgaggctccagaggaaggttttcaggactcagatcatagttgtagattaaaagaagttaatcacttatgtctttagatgaatgcgcacttacacatagacatatagtttagaaggtatataagctctggaaaactttgtaattttgagttggtctggaaataatttccaggccttctctctgtaactggttacagaagtaaaagctctcttcttccccagttcatctgcatctcattattgggccatgagaaatagcagcccaaccctcagattggtccaggaactgttctttttttagtcttacctgggctgtctcatgtcactacgttcagcagccaggtccactggatgctgggtgaagctgggatggccggggcagcaggacctttctttccatgatctttcattcttaaggagtctagaccagccttcccttcatggcagtggcagtattccaagaaaaagctgcaaagcacaagtgcttttcaagcctccacttgtgtcacgtttgctaacgcctccctgccaaaacaaggcacatggccaagctcagcttcaatgtgggaagcaactatcctagggaatggcatgattcatttggtgcaggattcatttggagccattaatgtaacaatctaccattgctagtaagtttatgtttcagaggcaataggtaactggagagggcagagctagggagagccagggaattaagaggattagagaaaattttggtggagccagaaaaggtcaaaagggtctatgttacccctagtcatctttgaaggaaggacgtgttccctctagtcatctttgtggcccccacagcactacaggggttttacatatggtaggacctcaggaagtctttgcgaagttgaatcaaagtatcaatgataagttgggggagtttaggacctagaggaaggatggctaaatgataacacactgaaaggagcaagaccccttaaagcgtagaagggtaagtgctaacagaagaaaaaattaaaactgaaatgaagagagacagatgggatataaaatgtaaacaaatgtttgcttcacaattaaactacgtgcccactctttcaccaatgtttgtttgctagatgctatgcaagggactagagctgtgtttctcaaaatgtaggtcattagaacmatgtggaatacttaggtagagggttagaaatggctggtggaggtgtccagtggatgggcctgagacagtgcccctggctccattgtcttcttataacctgtagagagatcctagaagtcattgcctgccccagtcagaggcaacagatatggtcagtgctctaatcatctcatcttgcccttagcacttcagtgcaggacagaatatcggactgccaacccctgaatgttctccctaggggctttctctggctactcctgctatagagggagcagtcctcaaccaaagactgacaggagttggtggagattttaaaaccaagccaattatccattataaatctggaagcaaagagtgttcattatcctgcttagtcaaataccagttctgctgaaaaatgcaaaaggctagagtcttgctcattaaggaccaagtctttccttgtatttctgtagctgcctgatagatgggctcctgacttcaatcttgtttcccttcaacctattttctgcacttctgagtgaccttagaaatgcaaatacattcattaagctttgaggatggagatgtttcatattctccattggatcttcagtacctggtaagcactcagtaaatatttattgactgggtattataggagactcccaactcatgaacatgttatatcctaacatttctcgtctaaggaggtgattttgaatttagaatacatttgaccatcacaatgataggtggtttttagcttgacaggctagcttacaaaaaccaagttcaagccaggtacggtgcctcacacctgtaatcccagcactttgggaggccgaggtgggaggatcacctgagattgggagttcaagaccagcctggtcaacatagtgagaccctgtctctactaaaaatacaaaaattagctgggcatggtaacgcatgcctataatcccagctactactcggaggctgaggtgggagaatcgcttgaacttgggtggcggaggttgcattgagccgagatcacgccacagcactccagcctgtgcaacagagagagactccgtctcaaaaaacaaaaaagttcacccatgatgcagcctaatccaatcccagctttcttggtagtcatgagcaggagaccataacrggagggagggatgaagaagaaaaggaaaaacaaagcctttgggaattggatcatttgttaacatctttctgttttacacttctgtttttgcacctctacgtgctctatgagtaccttctctgctcctcttccctaccatgcctcatctcccactggagcaagcctccaaccccactccagggtcctcttacctttcccctctgccaatcacaactcctattccctgactacaaataatttcaaggattaagaggaaggtggtctgattgagcaactttactctccacatggatgtctaacggctatttaatcttcctagagatgcttccagttttccaaattagtttagattacatgaatctctaattagtggaatttactgtaacaagataaaatggaaaaaaaggtgatgagagatattttggggcaagtactctcactgattctgactttttttcagattctccccctaggattaataatctagattattctggatttttataactttttgggtcttttaaagatccctccctgcttctttttttcccacaactaccgccataagcctggttgagaaggggctatctgagtgagcacagccataggcgcaggcctacagagtgggcccttcattgactttcccgatttgcctcagcaagtgtgcacctttaacctgaccctgcctttggtgacacttgaaccaagcccaacaccaaaatgtggtcagcactcaaaaaacaagaaccaggaaaatttaagggattttctcactggacagtctggggatttccattccaacatttgtattctctttaattatatgttattcaaatggacttcaattcatctaccacaaagaactctagccaggggatttctgcttttgtagctgtaggaaagaaattagattagaaaagattaaagcgatccttgcccaaggtcacacagctagttagaagagagctcatctcctggttccaaatcctatgttcttttgataaaaacgtaatgcttcgtattatttaaaatataaggtttggccaaataagttgaagattagcttttccctcttgagtcagaggaaaataataaatctatttctgcagtattcttctattggcctgagctagcatttctgaaagtatgttgttccactgaatactatttttaaaatcagccaggcacagtggctcattc

SEQ ID NO: 94079 - DNA, 12673 bp, Homo sapiens
aactgaaattccaaatagaatccagggaggttaaagtgaaacactttcaatacgatgcctttatgttgtagaggttagactcacttgatgacttacgtggcttgttttcaagacctcttgaacaaaatatttaattggaacaatttatttgctatcagttcttttagtggatagtagatattcctggtaatatttacatttttcaagtcatataacaagtattgagctcttgctcttgttacatataacaagtattgtagctcttgttacaggtaacaagtgttgcagctcttgctaccgctgtacttgttggtatgtattaaggataacatttgttaaaaaggcccttgccctctgatttaaagtcaggcaggaaagtaatgcatgcaaagcacgtgagcaatgtggtctggctgtagagtatgtgagaggcaaacaaggatatgaactaattatattaccattagatcacaaaatcaggtggtaaacactctagaagggcagagatggtgaaaattaatggaggctggagttataagaaactaataaaacaatgtttcatagaaaagacccaagtactgttagaccttaaggaatgggtagaactgaagtttggttttcaaaatcatagagacagcataagccactgattcccccttccactagaaaaagcagcccacagaatgagagaagatatttgcaacacatacatctgacaaagtacttcatatggtttggctctgtgtccccacccaaatctcatgttgaattgtaatcctcacatgtcaggggcagggccttgtggaagatgactgaatcatggggtggactccctgccttgcttttcttgtgatagagttctcatgagatctggtcgtttgaaagcatgtaccacttccctcttcgctcactctctccctcccgctccaccatgtgaagattgtgcctgcttctccttcaccttctgccatgattgtaaatttcctgaggcctccccagccatgcctcctgtacagagactgtggaactgtgagtcaattaaacctcttttctttatgaactactgagtgtcaggtagttctttatagcagtgtgagaacagactaatatagtactcgttcaaaatatgtaagtaaactataggacaacagaaaaagggtgacaatttgtaagaaaagtgggcaaaggcttgaatggaaaatctgcaaaagagattacaggccaataaccacaggagaagatgttcaactgcattattcaccaggaaaaagaaaattatcttttgcaccatcttatacccattaggatggctattataataaaaaaaaaacagaaaatactaagtgttggtaaggatgtggagaaactggaatccctgtgcactcttggtgggaacgtaaaatggtacaaccaatatagaaaatagtaaggtggttcctcaaaaaattaaaaatatgattgccatatgatccagaagtttcatttctgggtataaaaacaaaagaagtgaaagtaataactcaaacagatgtggcacacccatgttcatagcagcattatttccaatagccaaaaggtagaagtaacccaagtgtccatgacagatggataaacaagtggtggtatatacatacaatggaatgttatttagccttaaaaaggaagaaaattctgacacatgctaagacacggataaatcttgaggacattatgcttagtgaaataagtcagtcgctaaatgacaaatattgtatgattccacttatatgagatacttagatcagttaaaatcatagagatagtaaatagaatggaggtaccaggcctggagggaggaggaaatgaattattgtttaatgggtacagagtttcagtttaagaagatgaaaagagttctatatgtggacgatggtaatggtagcacaataatgtgaatagaatttattctactgatctgtacactttaaaattggtaagatagtaagttttgttatgtgtattttaccacaattgaagtttaaccacaatgcaatatcactatttgcctattagaatggcaaaaatgaaaaagagagaaaataccatgtgttaccaatcagaacaacacatacactgactgctattagaagcgtaaaatagtacaataattttggatgatgcttgcagtgtctactataactgaacatacacaaacctaagacttcacagttccactcctagatatatatccaagtaaaaatgcttccatgtcttccctaaaagactgcaagaatgttcacagcacaattcatagtaactccaaactggaaacacccaaatgcctatcaaaaataggatggataataaatgttatattcatgcaatggaatattatacagcagtgagaataaacataatggtaactattttcaacatatgaatgaaactcacaaacatacagttaaaaaatgccagataaagtgtatcctttgggtagattatttgaagggtgccctggagtagtgttatagtactgtttcttgatctcagggctatttatatggatgtgttaactctgtggaaattcatcaagctatatacctataactggtgcaattttctgtatttttgtgataattaaaatgagaaattttgaaatcccaacagttatgtgtgtgtgcatgtgtgtgtgtctgtatgagagatagtgagtgagagagacagagagagaaaaaattggcaaactgttaataaaattcatacataaatgcaaaggaccaagaataaccaagaaaatgtttcttgaagaacaacagaattggaggacattcactattggctatcaagtctacagtatatgtaatattggcacaaggataaacatacaggtcagtaggccagaatagagactccagaaatagatctatgtatggtcaatcactttttcaaatagatgtcaaggtaatgggagaagataattttttcaaaaaatagtgctggaataactggacatctgtgcaaaaaaatgaacctctacccttacatctcactctctgcaaaaaatgaaaggggatcctaacctaaatttaagagctaaaattataatatttctagaagaaaatgaagaagtctttgtgaccttgaattaggcaaagaattcttaattaggacacagaaaagcatgaatcacaaaagaaaaaaatgataaattggaccttatcaaaaagtttttaatttctttctttatactacaaactcatacactgataatgggaatgtaaaatatggtacagccttttggaaaacaacttggcagtttcttaaaattttaaacacaaacccaccatatgactgagctattgtactcttaagtatttatcatggaacttttttttttttttttttaagattctgaaaaccctgtcacctgctttatttctggagaagggtaaagggagaagggaaaatattcacttgaatttgaggggcagctaaactggaagcaacaatttcaggcctctaaggttcctctgatccataagggaatgctgaaacttccttgtttggagattcaaagagtttaatttttccctacagcaagatcaacaattttcactgggataaaagaataaagaacaaactcaatagcaccaaatggggttttaacacagaaaacagggccactccttttgaatgcaaatttttacattaaaatatgtttataaatcatagtagttgttttccctcttgattcaacatttctccctcccctaacaggagccctagaacctgaagagcatgtacattactaacgagatatacaatccagccaccctgtccaaactggaatctgattactaatggactacactcgaggctgcccccaagggatgggaagcagtaactacgctctcagggagaatgggtactgaggatgccaccagtcaaagagccgaacgctgtgcactgggtccaggatgacttgcacaccctgttcactgcgcagtttccgaccaccatggacaggggaatcttggaacaccagtctcactcgatgatgccgcatgtccgtgctcacattgatagtaaacagagtaaatatcattcccatgacaatcggaataaagatgaaattgagggtggtgacctgcagtaggcagcagtcctggtctggattggtatgaacatcttcgtactgaacgggaggctgcaatcctcctgtacacttgctctttaacctaggggactgttttttgaacttgaagttgaattcccacattggttcctgtctgttcccaacaatctttctgcaccagaaaagtaagcatttggaattctttaatgtgctgggggtgctttctggaatggctggattcttggagattcgagcagcaaatggctcatacatatggtacagagatcggatcacacaagcccggagacagtgcagcttctccattgactctggtcgcagacgcaaaggcagggaagcatccagcgtgtagtgccttcggtacaacctggtccaaaaggcagcagtgcaagtgacagtccaggcattcttacaaatcagggaaaaattcacaatgtcctcaggacggatataggaggccagcaatagccaaatatccatgggatactcttctcctccagccccgtccagttcttctttgtgtctcttgcttttcttttttctggagacagttctctcatggatgttttcctcctgggcatccatctcatcactgctgtcgatgatgtcayagggctcaccagccccagaaagagcttcctctgcaggaacctgagaggcttccaagccacaaagagattttacttcctgccgaacagcgttggctacggctttcttgactcgtccagacctcacgaccgccagatccgagtcggcgtaatccgccacggtcactcggccggagcaggcgtcgtgggcccggaacttgagtcgctttcctctcttgggcatggcgaccgtatcggggcgaggcctgcctagcgggccgggcccccgggccatgtctccggccagagagccggccccggtagccgcaagccagctccgcccggctccgcggccatcccacaccctatcatggaactttaaatcacatgtttacacaaacacttggacaaaaatggttttagcagctttatttgtaataaccccaaactggtaaaaaactaaatgtccatcagcagaggtatggattagaaaattgtgatgtattcatataatggaatattattcaacaataaaaaataacacatctgatacatccaacaacagtgaatcatgtttaatgaaagaagccagaccactccccaccacaaaagagcactaactgataaagctgacctaagaagctttgaaatgcaatattttgacttgatactacaaggcagacaaaactacacaaacactacactctggttggtaaatctgtttctcacaggagcttggttagcaattctgaaactcttttacatgttgtgttttctaaggctgctgtaacaaattaccacagacttggtggcataaagcaggagaaatttaatctttcacagttctgaaaaccggaagtccaaaatcaaggtgtcagagctgcggtatctctgaagtctctaggggagaatccttctttgtgtcttccagctcctggtgacttcaggtgttcgttgacttgtggctgcttcactacagtctctgcctctgtctttacctggtcttctcgtcttgcctctatgtttctcttctctgcgtgtctcttataaggatacttgtcattggatttagggcccactgggataatctaatgtaaatgaatcttaagatccttgattatgtctgtgaagaccccttttctaagtaaggttacattcacagcttccagtggttaagacataggcatatatttttgaggatcaccaatcaacctaatacacatgtatataaaatgaataagtgctttgcaaacactgtcactgcccagagcccctgacaccagccatagtcgaccccaccatgctctttgacatcactgtcagtggtgagtccttgggccacatttccttagatccatttgcagacaaagctattaatacaaagacagcagaaaattttcatgctctgagcactggagagaaagaatttggttattaagagttcttgctttcacagtattattccaggatttatgtgtctgggtggtgatttcacatgccataatggcactggtggaaagtccatctatgcggagaaatttgatgatgagagcgtcatcctgaagtatacaggttctggcatcttgtccatggcaaatgctgtactcaacacaaatggttcccattttttcatctgcactgcaaagactgagtggttggtaggcaagcatgtggtcttcggcaaggtaaaagcaggcactaataaggtggaagccatggaatgctttgggtccaggaatggcaagaccagcaagaagatcattgctgactgtggaaaacgctaataartttgaatcatgttttatgttaaccacaagagaattgcttctgtagctcaggagagcacccctccaacccatttgctcacagtatcctataatctttgtgctatctctgctattctttaggttccatattttccttattcccttccatgtctagctggattacacagttacatttatgatcatgaaataaaaactaaataacaaaaaataaaaaataaaaattgaataagaaaatatattgtaaataatgagagccaggtttctcactgacatgagaaagaagttacaaatgggcaagagtgaaaggttagaatgacccctgtggtgctggattagagtcacatttatcagcatgagtttatattaatatgtatacagatatatgagcataaatacaggtattgtagatacatgggttagtatacatacatatatctcctacttctgttcactaacagaagctgaagcaatgacactcaagtagtaacaagtagacatactacttagatctttatttctaaataccttttttttgtttgtttgtttgtttgagatggagtctcactctgtcacccaggctgtagtgcagtggcatgatcttgggtcactgcaacctctgcctcccaggttcaagcaattctgcctcagcctcccgagtagctgggattacagccacgcaccaccatgccctgctaacttttgtatttttagtagagatggggtttcaccatgttggccagggtctcaaacttgtgacttcaggcgatacacccgcttcggcctcccaaatctaaatacctttttccaacaaacagaaccagtgctccttaaagaaatagttgtttctagatctagagcagagtaaatacaatatgagcctggagcatcttacagtgccagaaaggaagtgtccagaaaaaaactctatagagatggaaattagattagtgaatgcctatggctgagattgagaatgggaaaatgactgcaaatgaagatgaggcttcctttcgggatggtggaagtattctacaattagcttgtcctattagttttacaactctgtaaatatactaaaattcatattgatatcatgtacctcctgatgtgatgagtatgaaagttgaatatgtgcatacacgtcaataaattttatggtatataaattatacctcaacaaagctgattaagaagaaagtgctctataaaacaaacaaaaaaaaggccaggcacagtggctcacacctgtaatcccagcactttgggaggccgaggcggggggatcacgatgtcaggagatcaagaccatcctggctaacacggtgaaacccccatctctaccaaaaatacaaaaaattagccaggtgtggtggcacacacctgtagtcccagctacttgggaggctgaggcaagagaatcgcttgaacctgggaggcggaggttgcagtgagccaagatcgcgccattgcacttcagcctgggaaacaaagcaagcttccatctcaaaaaaaaaagaaagaaagaaaaaaaaaaaggatggtgtatattgaagacacacaagaaccaactgaaagtgctaccaatggccaaagttggaacaatctgagcaacaaattaagtaatggtagtattggattaaagccccaaaatagaatcttcgtgatattcatgactccatactgacatacatacatacatacataaatgggtaagaagggacaaatcttccttacagaagaattgtaagtactaaatatagaaggaatgagagaaatagaaaatcaccattagaacaccacagtaatagctactatgagcaagatccactgatgaatgctaaaattagtgagtgaaacttttaggatgagtgagatatttgcataaactcaaagtatttccttctaaatatttattaattactgtggtcatttaacataagcctataaagtctttcatatactctcctccagaggtagagtttaactccttttcccttgagtgtaggctggacttagtgacttggtgctaatgaacagaatatgaaaagggaaaaatagcaagagaagagtggcaagcatgaccctaagtgggtcaaagttagcatcaacaataataagtcatgttgatataatgtgcatgctgatatgtgataaatatgtatctttggggtttattcgtttgtttgtttgtttgtttgtttgttttgagacacagtcttgttctgttgcccagactggaatccagtggcgtgatctcagctcactgcaacttctgcctcctaggttcaagcaagtctcatgcctcagcctcctgagtagctgggactacaggtactcaccaccacgcctggctaattttttttttttttgtatatttagtagagacagggtttcaccatgttgcccaggctagtcttgagctcctatgatgtgatatatatcaaatctcccaaagctgatcgtacccataccctaggacctattcattccaaccataggtatacatgcaacaaaaacgtgttcacattttttgcaccaaaaaacctttaaaagaggctgaaaaacagcattatttataatagcccaataagtaatacctagctcaaaagactattttgaggactaaataaagactattttgaggactatataatatatatataaaatatacaaagtaggaccacaggctctggtacaatagacaataaaaagctgtcatcatcatcatcatcattataataaacaaggggggctgggtgaggtgcctcacacctgtaatcccagcactttgggaggccaaggatcacctgaggtcaggagttcaagactagattggccaacatggtgaagccccatctctactaaaaataaaaaattacctaggtgtggtggcagacgcctgtaatcccagctacttgggaggctgaggcatgagaatcgcttgaacctgggaggcagaggtggcagtgagctgagattatgccactgtactccagcctgggggatagagcaagactctgtctccaaaaatacaaggagaaccttccttttaactctgggccattctttgttgcatatgcctccaaagcagctcagcttgggtaaatctcacaaagtcccacttgactgtgtctgcttttagcctctccaaagaggttcaaaatcagccaaaaaagaagacatgccatcctatctctattcatcagctcaacacaaaagatcccatttgtgtgtgtggccaaaactgcccttctccctgctcccctaggtgaagtaaggatgtgaagaagccatggattgggtaggaagctttgaaaatggcatcttccaaggttaactaattagaagatattttgcttgtcatgtcactcaagctcaagcagaagataggctctagtcattatgtggtgatataagcataaaaatagaataagtttaaattgaaacaagtggtgtttatgaagggttatgagcttctaactaatgagttaacaaaaagtatagaataattggattgttaattagcaccaggggtcagttgcatcaccaaataaaaaagaggtccattcatgtattccaaaacgataaatttcctaaatgtcctacagaggtttgctaagcacacagactgaggtaatgaaactctggtggttccagcaaaagcaataaagtaccaataagaacatatatgttgtttaaaaccctaatatgacagatcaatctaccccaatatagggtaatgtattatatcatcttgaccaagtgagactttaaaatacattatttcagaaaacaaacaccaagttctgggggcaaactaaaatctagagaaaggagttgactttaaaaagtttaagcaacctaacaacaaagtttaataataagaaagagaggctattgtcttaggtttaagtcactttagaagaaaaaactgaattttgtgtaatcccagcactttgggaggctgaggtgggagaatcacgaggtcaggagtttgagaccagcctggccaacatggtgaaaccccgtctctactaaaaatacaaaaaattagctggatgtagtggtgggtgcctgtaatcccagctactcaggaggctgaggcagaagaatcacttgaacctgggaggcggaggttgcagtgagccaagatcatgccactgcactccagcctgggcgagagagtgagaatccatctaaaaaaaaaaaaagaaaaaaaatccaggaccccagggaatttggggttgagtaaaaattactacccagaaggtatccaactaatagtactgaaacattaggaagaaatcaaaataagtttatctctaatcctagaaaggtataaaacaactttaaggaagaaataaattcaccacatggtacttgatgtttggaatagcttaaggttaaatgttgtaataagttttgttgttttatctacaaaatgcattttgtgtattttgtattttagggtgttgaaatgttcaaaagaatcagacatactaaatttgcaattgctgtttaaaggaatttaatcaaattttgtatcaatacctaaatgctcactccactgacattaaggttcatataattgtgagtgttcctctctatgcaaaaactctctcagatattaaaggctaatctacatgccagcaaactcagtctctgcagagagaaggaccgtgactcaaaatgcaccctgtgtgctgggaagatttctgtcttagtgtgcttggactgctatatcaagtaccacagactgggggatttaaacaacagaaatttacttgctcacaattatagcagctagaagtctgacatcaaggtgtcgacaagattactttcttctgaggtttttctccttggcttgtagatggccatcttctctctgtagtaatacatggtttttcctctgtgcctatctgtctcctaatgtcctcctcttgtaaggacacctgttatattggattagggcccacccatatgagctcattttaccttaattacctctttacaggccctggctctatagtcacatctttaaggtactggatgggtgttaggatttcaacatacgtgtgaattttggggagcacaattcagctcataatgatttccaagaaccaagagactgagggctcaaacacggtgggcagaagaacccagccttggaaaggatctgcgatggaaactctgggggtatagaaaaggaattgaatgatatgaggagcagaaatcagagaggagggtgtattctgaggaagcgagagaggagccccaagggttgtggtacagaggcccctgtctgcacattggtcatcataatctcaatgcccaggttgtactcaagaacaattcaatcagaatgtctgggggtgaaacctgggcatcagtaacttttaaagctccccaagtgattccaactgtgcagccaaggttgaaaacctaaaggtttgatcacaaggccttcagctccagtaccctacacaaagaaagttagactagaggatggaactttctgacctcttgctctgcaaaaggtggggacgaatggcccccacagccacaccatagtaaatggcaggtgtcttgatcatcttcactctgacccagagggtcgtctgaaagagcctctggttgtaatgactcctactaaggaatactaaatctgacattcctgtctcccttgactctttctaggcactttacccctgatcttgagcttcagggtttttccatagctgtgtccaacccccacccacactctccccaccctctatccccaaaaagaaagaaaaagaggaagtgggaaagtgtgtttaatatatttgcagatgtacatattcacaaatatgttgggaatgtttgagccatgttaattgggtgaatactttgacccaatccttcaggaatattgaatcatgggaatactgtacttagaacaacacaatattaccatgggcctctctgccctgcgcaaatattagtctttaactggaatgaccaaaaacagatgtttcatatctagaatgttttctcacagagagtttcaatagaaatattttagcccctcagatacatccaaataaaatatttggtcttgaaacattctattttaaaagtcagtgagttgtggcttcattatagcagaagaagcatgaatcagagay

SEQ ID NO: 94080 - DNA, 40944 bp, Homo sapiens
caaaaaccaaagtttaaaaggatacaaaaagttgaaaagacattttacaaagaatatatatggttgacaagtacatgacaagatgttcaacatcatttgatagtagggaaatgccaaaaaaaaagccacaataagataccactaaacatccataaaaattgctaaaattagaaagactgaccatatcaagtattggtaaggatatgggtgaactgaactcttatacactgaagttgagtatgtaaaggggtacaaccactttactggaccaatcagattcacattgaggtctcttttaagtttttagcctttttattccttcaatatcaaaaagctatatatatatatatatatatatatatgtctgtgtgtgtatacatatatatatagagagagagcaatatatatatgtgagtgtatatatatatatatatatgagagagagagagagagagacagagttcttcaatctgaactaaattacagtagcctcccctcttctgcaagggatatgtttcaagacctcaagtggatgcctgacactgcagatagtaccaagccttacaaaagtactatgcttttttcttatataccaatgacaaagtctaacataaattaggtactctaagagactagtaataatgaataataaaatagaacaatgataacaatatactgtaataagagttacgtgaatgtggtttctgtcccaaaatatcttattgtactgcattcacccttcttgtgatgatgtgagatgataaaatgcctacatgatgagatgaagtgaggcaaatggcgcaggcattgtgatgtagcatttggctgctgtttactttctgatgatacaccaaaaagaggatcatctgtttcaggagaccttggaacatctagccatgacaatgtcaatggcaggatgtcaggagcaggtgacgatgatgactactgagcaggtagggtatgcagcctggatacgctagacaaagggatgaggcatgtcctgggtgggatgcaatgagccagcaagagattttatcacactactcagaacggggtgaaacttaaaacctacaaattgtttatttctggaactctccacttagtattttcagaccatggttgactgtaggtaactgaaactgcacataaagggatctactgtaccatgtattattttatactatcagtagaatgcaaaatgagttaaatttcttcaaactttctaacacctttcttttcattcccactttttgacctacagaagccttattactttattttctgcttgtttcaccagctcatgactccaacatgacttacctgatttacattcagatagacaacccccctcctccttgatcactttagtcacttctgctaactttgccatgttccttgtgtcctttgtccttttctacacctcacctctttcgcttacctagccttaatcttaaaccaatctaatatcttaagtccttcagttctggtgtggaaaccataccaaccctatccaccagggctggcctgcagtccactctggccaaccatgtatatgctcaccgtaagtagtctctgccatccctcactttggcaagtcaaaaccacccactagcaaactgttacattgtccttcactttctctggtgaccctccatcctacttgctctgtgaaaggagtatcagcaaagttggggtggactttaattcgggatcaaatatttgaattggcattatctcgagtttcctgggctttgatcaccggaagtacatctaggaactgtgccaaggcaaaaagaaacatgcagaggagcataaggagcaaggtgtgatgctgggtgagaggagtgagattgactggggaaattaggaagacataaccttcaatataagccttgagatggaactagtggaaaagaagtttagagaacttttccagaaaggaagacagtaatgcaaaaacgtggaagcacgagcatatttgggggagttcattagctatagcaaaaagcccaagagctctaggagataggcacagtggaaagaagtgggaagagataaggctgcagctgaaggtgatgcaaaattttgaagcctaagttttgctaggttaagacacttttactttatcctagagtaatagctggtaaataaaaattaagaaaactgcagagtaaatttttttcctaaagtagtaattaacaacagtaaaagatgatagagtgggagattggtaggaaggagcaggactggccatgtgggcataaagccagtggaatcacatagggcccagctcaatgtgctcagaagggtctactagaagggatttaatgctctgaggttgctgtcttggtattctaaatgataattttaactttcaacaataaagcctgtgcaggggcttggaacctcagcttgcaggcatcctcctcctgccacttctcttggacagcacacattttccacctcagctaacactgccattttttccaccttcatcccggtgccatgggcaaggaagtggggattagcagaggcaggcacaaacgctccaggacatctttggggccagacaaggcaggggctgtcactgctcctagttagcagcacaatgacatattcagcaggcaattcagcccatgtgggcctctcacttagctccaatccaggtaccaagtaagtcccatcattgctacatcgcatttgctaccttcatggaggttactatagcttgggaggaggccctgtaggaagggaagatgatgcccggctcggctttcctgttgctggtgaaagcaccatgcattacttattccaaatggcataggtgcagcggctggtgggaagagaacccagcaactggagggctaagtcaatgtgtatgctccaagtcatggggtggaccactgggggggacctgtgaaggttggctcttgcatcactgtgctgggggaatatgacatcaaatagtaagtataaaatactgtgataggtcaggagacagggaccacagaagaaaggaaattgttttatgttttaatacctttaaaggcacattttcattttatactgggccccacaaattatttagcaggcccagagaggaaattagtcgtacctactgtggtccaggaaggggcctagagtgggagaaacaggatgatttcttctcaccctgcactaggtcaactgaattctagcagctcctagattactcaattccctaaaataatattatgcacactgcattgtatttagaagttcctagtcagtgtaaccttcctccattaaactgtatgctccttaagtgtagactatctttttaattaagacgtaatctcagctttcaaagagaacaaaataatgaatcctcaaaaattgtgtgttaaatagcagaagacttcagatagtgaaatacagaagaataagaagtaaaaattatggatggatatgtgtgtgtgttgctttaacagagaccataacctctgatattaagaaacgtgtgtaatctaacaaccgtagagtagtggaagcttccctctcccttatgctagaagctaagggctatttttgycctgaaggttgttgttacctaatcagagaaagaagtcaggataattaatatgttaatggtaaagcatcggtcctcctttcttgcagtttaatagaagttccacatatcttgaaaacaaaactaatatttgaggagcttatgggagggaaaactctattgccttcattccctacccaagacataaaaggcacaggagagaaagtgaagagggtttggcttttttgagacacaaatttcattatttttcagtttgggacaataattgttttctttcctaatatctaaaattgtaaacaattaaaatattatgtcagtaacaagtgtaaaatattctggcaaatcaatatctttacttaacacaatctctggagtccattacttattactttgtcgtatgattgggttcctgctgaatctcaccaaatcgcaccaaaagggtgacaaaacaacttcctgtaagcaaaggacaaacagttaagtaaggtaagtaaagggcaaaagacttgtgccaggggcaaggaattggggagggccaggggcatgtagggcactccagggcagaccccggatttaaaaatacatttttaaatttgtataaaaatttaatgtagttggaggaatagaaaaagcacaaggacctgagaaagggcctttgcaggcaaaatttattgaatttttaagctaaagagagtgagaaaaaaaaacctctaagcaatacaaacaaattaaggtactgtgtatgttagaatgttaagaagtgcaaaggatttggaaaacattgctgcagagcctgagaagcatttgcaggttgaggttacttgtgtctcagaatccattgtaaacaaaacataggaaagataacagagtcatggatctctatggctctgtgactttaggcaatttcaacctctcagatccttaatttccttattcacatgaagggttggataataatagttgatagattgataataataatacttgccttataaaattgttataagggttagaaatagttaatgcatgtgaaagacttagctcaacctggcatgtaatgaacattcgtcacatgttatctgttgtgaatgacaagaattagtgagaaaaatctcaaaattgcctttgtgattctggaactgaaacagagggcaggttttgacttagttctatggtgattaaaagctaaatgcttctacctttgtttaycatcaacagctatatctctttctcatttttttatctgtcaaaattcaatgaaaatatgcaagttcctttctcactgagtctttttttttttcctgtgtgtgtgtgcttagggaaacaatatatttacaagcatttgtctttctcctcaattacatacttaaacatttatcttttaaagaaacgaacagtaaacacacatacacacacacacacacatgcacacacactaatggcaatactcttggacaaatgatagttgcttttttttttttttttttttcatggaaagaaggaggtttagtttacagatgtttgaaccagcttaagctcccccaggtctcaacctctgtaagtcttctgttttcttcctctttaccttagagtcttttccaatgatacagttagacatattaactttattttttaaatccatgcctaattggtatgattgtaaaagcaacagtaattagttatttctttgaaggaggagattagaataaaaagttatttgtaaagggaatgaaaacaattgttttatcactgctattgttatttaggggtggtgaaatcaaataaaattttgttcttggagaaagaatggagtctcttcagaagtgccaggaactttataggaattttaagaaagcctgacccaaattacttctagatctaaaatatttgttcttttctatgtaacattaaagtgaaagtgataaaatattgtaaaggctgacataataactgatgttcagagcagtaactgtaagtgacaaggagctgtggctcatggaaaataaaagcaaaacagctttcccaatgctctgatgatattgactaactagcaacgaggggtctcatgatatatttatgatattttctaaataactcatgcattttttaaaaaatcgattcatttttcagggtgataagagtagctgtggttttctttcacttagggtatgtgtgtttattcctgatgtctttgtaaacacagagctgaggatggtgatccatcttcatgaaattcactaggcgcaggcttcactgtacttaaacagagtgccaaagctgacatcaccttccttgttctcacagggctccagctgggtgaactatggggcatttgcccggagttcatgctcagcatcagggtcaaagcaaagggaactctgacaatgattccattgtgaacttgttctgggaatgccatgatgattctctatcatgttcctcgtacactgcaccagcaccactgcttcccttcccagtgagawcccgatcaagctttatcatgcagcccagaagggtgggggaaagaaaaagaattaggagraaatgtaagttgaaacagttgctgtactaacctgttgcatccccaaatgatgaatcttatttttcctgcttctgtaatttctgccatctactctaaaatagaaatattagaatagagaaaatgtaaatgtcattttacatgtaaggaaatcaggacacacagtgttcaaagtattgactctagaagtggaaatcaggggttctgtaatccattcaggagctgattcctatatattattttagaaacccttaatacattctaaatctgtctcattattggctaagtagaaataatctgagtacagtatcaagacatagaaaaatgtacagttggtatctttcctagctttaagagttaaactgttaggaaaaaatgtgaaaaacatttcaatggacaaaatcattactgaatgttctgttagagttatctcttttccttgtctttgaactatttcacaactctatgtgttgtaaaaaaactaataataggggctgggtgcagtggctcatgcctgtaatcctagcactttgggaggccaaggtgggcggatcacctgaggtcaaaagttcaagatcagcctggccaacatggtgaaaccccatctctactaaaaatacaaaaaaattaagtgggtgtggtgrcacacttctgtaatcccagctacttgggaggctggggcaggagaagcgcttgaacgcaggaggcagaggttgcagtgaaccgagatagcaccyctgcactccagcctgggtgacagagtgagactctgtctaaaaaaggaaaagaaaactaataataggtatccatggcaatgcaaatgaattgtgtgtggtagaacttaattagttattgtcaggtggatattgacagtatcacaactacatgtatattcacttccaaatttctggggatgtctgttgtatatgtgtgctctaagaattctcctttgacgtgattataacatcttagtggtactctcattaattaatgaattaaataaaatatttgacaaagtttgctttctatttgtgtggtaatagttttacaataaaaaatccttcatcaagagctttaaacaatttatagaagctttgttttttctttcaattataaacctataagtaaaaaaattcgccacaaaattagaaatgttctgatttgcttagtcaactcctattaaatgtttctgtctttggtgttgaacaaaggttgyaaaagtaatgagataatatgagaatgtgctttgggaactgcgaatctggagtcactggtccatgaggaatctaggataagaagaaggaagctgtgaagaatggttggctaacagtgctggcaaggaattcagatcaacatacctctcaaaagaatggaagtctcttaaactcaggtaattgttaaattggttcaagtgtattatggcaagaatgcttctctctccttccctaatataacactgccctaaatgactccctacctccctgttttgtctcacgcttgacagtgaaaacaaagataaatatttgaggaaacataaactcaataatgtcatttattggaaagctacagtttacagattctttgcatttattaccagagctgttccttacaacaactttatctgaacagtattattagctacatgctgtagatgagaaaagcagtgctcaacgaaactaacttgccctagagtatccatccagtaactggtgaagctgggatttcaacttccttttcttttttctttcttttttttaaaaatcttaattctgaagctgttatgcattatggaacctgtgtagttccgttctgagttctactatctggttcagaatcttggctctaccacttcagccctccccctcgctccaggaaagaaatcacacaagcttttggggggaaagattagaatggaaaggtctgaaatacaagaggaaaaccataaaagtgtgtgtgcccagagggaagagaggagagaatttcaataagaatgggatgattacctgtgtaatcaggtaatcagctaatatagatgaaaacagtattttgcattgcgatattagatagttataggccaactttgccagaaaactttagcagagtgcagacagaaatgagataatagtctgttataggcagggagaatgtggagacaggagaaagaaactgaaaacacaggagagggatgagacgctggtaaatatttcttaacagaccccagagaagtaggcaagaccatctaaaggagagacagatgcatgagtcttggaaatcagatggtaaaaacctggtggcaggtttgaatgtctctgtgaagtaagagagaagggtgctgctagggaaagggattagggtgaaggagcagcaaggaaggtgaaggacaactggacagtttgcacgtggatggttttgacttgccattgtgagggatgacaaaaactgcattctctgagcataaacatggttggccagatagtctgcaggccaactgtgagtgtaaatttggagcagcacctatctgaagggtggtgtggtttccccaccagaattcaagaacctaaaataatggagtggtttaggattagggctggrgccaagtgtgatagctcacgttggtaatcacagcactttgggagcccaaggcaggaggatctgtagagtccaggagttcgagaccagccttggcaacatagcaagaacctgtctctacaaaaaatagataaatttttaaaaataaaaaaaagattagggctaggtaggtaaaatagataggtttaggaaaggacaaagaatatgagggaaacaggaatgctaacagaactggctaaagtgataaaggagaaagagggctgtctatctgaatataaaagcagtcgagcttggttggggttgtgagctggtgaaacaagcagagtacaaagtaatgaggcttctctaggacaaaaaacggtggtgatgaaacatcctcggtcagatttcatctaaaggcaaggtgagcacacataggacattgctgattaaattggaaaactccctctgtgtctcaaccctggaaatattaaaatgaatacattattaaacactactttttatcctaatataaaccattttaaacagactcctcttccagctaaatccgaaatagcattagaatatgatgagcttataaatcagtaatggtctgtagatgtatcttattatttctttttcctttgggggtaggtaatattgtttttgtctgtccgtgctttgcttagaagccatccaagtcatctacccaaacccaagaaacatgatagcagaaagcccatttaagtaattcttataagtgatatctttagagtcttcttgaaaatataaaagggaaatgagaaaccaccacacaaatctcaatgttcaaatttcaagatcttaatctattttatttatggacttgattgggaataaagaaaagctagtcacctttttttctttttctttttcttttcttttcttttttttttttttttttgagacagagtctcattctgtctcccaggctggagtgcagtggcgtgatcccggctcaccacagcctccacctcctgggttcaagcgattctcttgcctcagccacctgagtagctgagattacaggcatgctccaccattcctggctaatttttgtatttttagtacagacagggtttcaccatgttgtctaggctgatctggaatgcctgcgctcaagtgatccgcctgccttggcctcccaaagtgctgggattacaggcgtgaaccatcgtccccggcccccaaaactagtcactttctattcacgcacaggaaaacaacctatttccagtcagatctctggttctcatgttgaaagatggcagaaagcaaaaggaggaggagcaattttgatagctaaataaaactcatttatcaccagtttctatatttttgtgtgtttgatagattttcgccttgtgttacttgtttgtttaaaaactgatgaaaatcttaagaaatttaaaaggaatttgtcattacttaaggacagcagaagggtttctttttcttgttttcctctcacctctttatgaactcagtattagttgattctctatgttaatagcaatatagacactataaatacaaatctagagaaaatccyagacttaatatttgctgaaattgcccaagaaaatgagacatcaattctactagtcttgaatctgcttaaactttctcatctttaaggaaatattaagttaaagtatcaatttggaaaacttrcaaaataatttggggcagggtggcagggctggaggggtcagtggaagtgttaatgatggactccctgagatggagttggcagtggcactctgcaaatcaatccagagtcagaaggctaatgtatgcacacragtctattaagctcttctctataacaggctcagcattttcctttccatttttctacctggaaatactgttagtcagctaatgcaccttgctacaagaagcaagaaagacttttgggatttggaatataataatgcctttggtattgtacagattaattttcttagcattttgcctaacgtaaactggcctaatgcaaaaaggttaacttcttttaaatattattttcaaatcttaattttcatttcaatattttaatatatagcaatataattttaataatcaatttcccattcaaatccaaagggaaaggaatgcaaacgaaacaaatgcagggaatcatatcagaaccaaaagaagttagatggaatttaagggccttctacatacttagtaatagttaattattttagggatttcaaattctatcttaattcagtaaaattttaaaatgaaatttaaatgaaaacatttcaatgaataaaatttaaatgaaaaattttaagatgagtcattctttttctgaatatgttcctttgggttttaattagaatatagcatatgcacaaggtaaccatctgggatgagccctgagcaaagtcagaactacatcaggaaaaggtggttttcacatttgctgccttttcccattatcatgctttctggtactcctatttcatgcaagtgttatataatcaaatatcttcattcttgaattaatttgggggaaaattttaactttttttctggctttattgaggtaagttaacacaaacagtataaattcaaggtatacaatgtgatggtttgatatacatatacattgtgaaatgtatctaattacaattaattacaattaactaattgctgttaattatcagattaattaacacattcatcacctcacatagttaacattttgtatgcatggcaaggaaggaatgaggacacaagttctattctcagcaaatttcaagtaaacaatacggtattagtaactatattcaccatgctgtatgttagatccccaggacttactcgtcttgtaattgaaagttctggattaatgtatttgaacattaacttgtaaatcatttttttgagaaaacctaaagtgttctagaatgctatattttaaagaagaattctcaaagtttatttatttattttttagcttattttctttatggctgccccayagccagccccctagcaactgtctgctcttcggcctgatgcaaaatgtcaggtcacttgctgggaacagagtttggagggcgggggtctggaaatgaatttagagccgtaggatgcaggttcacattttctcctggatcagctatgtttctccaggcttccgggtacggatcttcagggaagaagtagctaggcactcccaagaaagctctcagtctcttcaacttcctcatttcagcttccctgcactctggaattaaacttttgtgcagccaggctgtgagaactgatgcataaatcatgagatagggctttattagggggagtaaagaattctctcacatggaaaatgttcacaaacagatcctcaacagttgtttagaatgcctgaaatttgttattaatatatatgtaccactgaagagttacagtgaatgtcaatagaagaatataattttgcacgtctccattttgtcaccgtatcttcagtgtttcaaaatcctttgctcccttccaaaaaagattctgggatttagtaacataatgatactaagttactttctacttaaaaacatattaaaggtagaactgaaagatattttacaagccaagacagaatcccggctctggagttctgttactcttgtaaccattgataaaatcactcgaccggaagctgctgcttggagctgcattctgcagtgctaattttaagtgtttgatgttatcagctgtaccagggaaaaccaaagcaacaatgagtgtcaagtcttggtagaccaaagaaaaagtatgcctagactattttgtgaaaattcagatatctctaattactgtaaatccagattcatgtgccagcaaacatttgttgctaaaattgtttaaaattcacttccatcaccttcttcatgaaagcagagaccaacttgactatcattgtttatgctgccctttgaaaacwtttctgtgatcaaagatgacaaaagcaatgcaacagcctacttctctgggaaaagctagccccagtgcctaagggaaaacattcactaactcttttcatatgaaaatcagtctttgttcagagaaggaggggaacaagcagagacttttactgggacaagtaaatcaagccttcagcaactcaaggaacaaacatacaagacaagctcaactcctcgttaagaccaaattaggayaacactacaagaaaataaattgttttatctggttgtggtgctttggggatagttaattgactactcaaataacaactttgatagtatatgaactgtgactgtgttagtaggttttaattagcaggaactttttgtaaattggacaaaaactttttttattatgactaggaaaactgctgttttctatttttgttttgctcttttaartgataccgaactttagttaatccctcagtcctaaattatggctgttgcgaatgagggctataatagttatcccattttattttaaattttgtattaatgttgatagagatgaaagaagaaaaatatttgcactcatgctgaaattgcaaaggaacatgtgtgaatgacctcttggatacttgttgcttggaaatgcgagcaatmgtttctttatttttattttattttagttttttgagacatggccttgctctgtcacccaggctggagtgtagtggtatgatcagggctcactgcagcctcaacttccctggttcaagcaatcctcccacctcatgcctggctaattaaaaaaatttttttttgtaaagacacagtcttgccatgttgcccagactggtctcgaaggcctgggctcaagcgatccttctgcctctgtctggaaagcagtagtttctatgcagtgacacctatactactaactataattgaacttaacctagaaaagcattttgcatgtttagcttttaagtgtgtttgacagaaaaggagaaaggaacctgaaataagaaataatytagtgataaaattgttgatgttctccttcactgtaatccattccaaatatagtttattttgctacagagcatgttctgtaatgtaaatggaaataagattgttaaagagggaatgatgtgaacataacttgggtgatgagaaggctcctaagggattttccccctgcattttgcactgccagcatttacactgcagcagagtgcaaaatatgctaacaaagctgcatacagcaaaccttagaagaatacagtactgtacaccatgtccattcatcctatcttcccaggaggttgatcatgtgcaaaagaaacaatgacaagataatgatccaaaatcaccagccatatctttgctgtggtatgtgtgaaacttgcatctacttattacataaaatgctacacctgtaacttctgatggtgttgtgcttttttctgtaattcagcagtctttcttttacctcattctgatagcctactttcatttgtatttggaataaagtcatattagttactgtagtattgctttctttattatgattttaacattttttaaaaactgtgataaattgttattgagtaggatttgttattgttgttaatgctctggtcatcaagtgcattaagttttgagtggtctatgctaattctattttttcccccattaactttgtaacttgaagtgtgcaatgtagcttaatgcaagcttttcagaaatgcacgtgtatgttatatcagatgtttgtactgtggtaggactttctccctagttcagctaaagatggggtccttgccatacagctatgtagtattaggcctgcagacactttgaagggtgagaaaaatggaatttattggaaaaaaggaaaaaaggggaaagagggaccctcagcagagtgagagtcctgctagtatatgcttccygcgtcacagattgaattccaggttccacccaggaagaagaggggccaggctcctccccagggcaaacagagtgaacttcctgaggctccaccccagtgtgcattcctcccagcacacaggccagttgggggttctccagtgactcctttatatttggctgtctcgttacttctaaaatatttcatattcataaaataaaaatgttttaataatgttatatatttgtaaaggcrtttacaatcttcaaacttctgcatgaaaaatctctcagaagtcaaaaatggatttactgtcctgatgtaaaataacctgcaaatcttactttctaattttggtgatatatgtgtaaaaagaaataaatcatctcatgaacaaaattaaaaaaaaaacaaaaactgagaagttgcggtgagttctgaggcagtacggtgtggcatragaatgcaggctctgaatctacagactgcctggttcaaatactagctctgccaaaaactagttacataaatggagcagattatttaacctctctttatgcctcaattttctcatttacaaaattgttgttagcattaagtgtgttaatacttataaaatacttcatatttatatgtatgaagtattattactgctttaaaatacmattgactgatcacattattatacagtacatatcttctactgatatatgagttccttgaagtaagacctatgtcttattgctgttacatcttcaatgcatgaaacataagaaatgttcaatcagtgctagttgaattgaattaaattttttaattactattttttgttttcctttgactagataatttgtttggagattcttccaaagataatcacttttcttcctgtgcaacctatatattttttaaaactattttaaattatttagttttagaattctttcttatctctaaaatgtaaaaagatatcaacagatagcatcaacaaataggtatcagatggtgagataagagataacaaaagctgataaatgtaaaagcaarcaacagtgaaaatttgtgatatacaagtttcagttccaaagaaacaacggattaagcttttataaatagctaaaatgaataacaattcaagtgaatacctcttaagatrtgctactcaacaaatgctttttgagccaaacactcttttggatgctgaggactcagaaaaagaaaaaaagtgcttttcctgaaagtcttctgatattattaaagggatgaaacatatatattataacccttgactaacacggagtcataaagtcttgaatatatgaagtcatgtcataggtaattaaccagattgggttctaacctttaaataatctctccaagcccgtcagctgtaaaaaagttgttaatgttccttcaaaatgtgaaattctagagcttaatatcyataaatagagctttcattgttatgcctcaaaattcaacagctttctcagttgacagacatttgtctcatattccttaagttaccttttcctactcaggaataaccttttcttacttttcaaagaataaaagacatacagatttggcaacaagtaggttattagtaacattcaagcaaataatagcrcaactttttaatgatagtagatttaattataaagccttataaaggaaattgataatatattccaaatgagacatcttattcgaatgctctgtggatcattaaaacacatttattactgttggtcaaggaaygcaaccctattccacttcatattaaggtgagarttatgaattaattccttagtattcataatgtttaaatagattaagatcaatttccttaaactccagtgtctctaaatacctttctaatttactgtttccattgtcatccgttgtatagcatggtgtcttttacctggtcaacatatcacctcctcttgctggctagtctatgtatgttccagtttgactgttcagctatagtctgagtaagaactggatatgtccttgcttttttgatggcatagtccttgttgattagcttttctttcatcagtactcttgattcagtcttactgtgctctgatcatgctgtctacaagtaatggtaaagggggtgttttgcctcctatacaccttaacatagaaaaatagatcacatagtttttcactgtgcatgatattgagtggttgtgtctgcattctttcttttgtgtctcatacagcttggctctgtgtccccacacaaatctcatgttgaattgtgatcccaagtgttgaaggagggatctggtgggaagtgttggatcatgggagctaatttctcccttgttgtccctgtgatagtgaatgagttctcatgagacctggttgtttaaaagtatgtagcaattcaccctttgctstctctcctgctggccatgygaagaagtgcttgcttcccctttgccttctgccatgattgtaagcttcctgaggccttcccagctatgcttcctgtacagcctgtgaaactgtgagccaattaaacctcttttctttataaattacccagtctcaggtagktctttatagcagtgtgagaacagactaatacaatgtcatttaataatttgactttcacttcatcctaatttccagagaactttgctcctaaattacttacatatttattattttatagggtttcatacatatgtagtatatatgtatgaaatatatatataatagggtttatatatatgagaaatacatattttgtagggtttcatacatacatatatatacacacacacacgtatgtargatttcatatatgtatatgtatgtatgaaaacctaaaaaataatacaggcaaaataagagtaaatcttcatgatcttgggttaggcaataatatcttagataccacacaagcataagcaatttaaaaatttgataaattgtacctagtgaaatttaaaactattgtgctacaataaacatggtcaagaaaatgaaatacaatccattgactgggagaaaagtatttgaaaattatatctctcataagagacttgtattcagaatttataaagaatacctatagataaataatgaaataawaatggacaagaattgaatagacatttttcaaagtgtatacacattaacacgtgaaaatttgttcagcaccattaatcattaggaaaatgcaaatcaaaaccaaaatgagttactactttacaccactagggtagctataataaaaaaaacagaaaacaacaagtattggcaaagatgtggagagattggaactctcatacattgcttgtggaaatgtaaaatggtgtagccactttggaaaaccatctggcagtttcttaaaaaaaattaagcatagacttcctatatgacccagcaattccactgtttattacctacctaggagaaatgaaaacatatgttcactcgaagacaaatttacacagcaacatttttcataataaccaaaatgtggaaactattcaaatgtcaatcaactggataaaagacatgaaaaaacatgccttatacacatataatggaatattacacagcaataaaaaagaacaaggtacccatacgtactatactatggagaaacctcaaaaatattatgctaagttgagggagcccaaaacaaaagaacacatcttataattttatttatatgaaatgtctggaacaagccaatctatagaacaaaaagtaaattagtgactgcctaaggccaagagtttgggatggaaagggtgggtggtggggaaggggaaggggtaggaataggaatagggaataactacaaataagcaaaatatttcttctcagggtgatggaaatatttcaaaattagattgtggtgatagctgtgcaactctgtaaatacactaaaaaaaatcactgaattgcaaacttgaaacagtgaattttatagtatttaaatatctcaataaatctctttaaaagtaataaggtacatccaagaattataaattcaactgctatttacatactgctgaagtaaaataaratatagagatgaatgtctgaaattaaaatgttttttctgggaagaaagaattgcaatttggggcatgtatgcagactggctggtcttgagtatgacagaacaaagagaaggtaagaggtattattaaaaggagaaatgttatgtattgctctttaagaaacgtcattggcaatagtgaagtttgggggagctggtaaactctgactagtgagtgattgaactgggtaaaactcgtcttaaagttgcagcaggttgtttcagtagtctttagataaaactggcatcaggttacagttggcaggttcagcagccaggcttacagacaattacatttttggagcaatgttatgtgccctgagwgcttttccctgctggcttttcaactctgttttagttgggtgtgataagaataacccaatatgtattatcaactttcgcaataccaaagatgctcatagctttaacacagatgtattgtgagggaaaaagactcagtagtgttggaaattggaaattattctataaattctttctctctatagtacacaaattcttcataaagttttctstcttttttgggggatagggtcttgctctgtctcccaaacttgagtgtaatggcactgtattagtccattctaactttgctgtaaagaaatatctgagactgggtaatttataaagaaaagaggtttaattggctcacggttctgcaggctgtacaggaagcatgatgctggcatctgctcagcttctggggaggcctcagaaaacgttcaatcatggcagaaggcgaaggggaaacagccacatcaaatgaccagagcaggagcaagagagcaagtggggaggttccacacttttaaatgatcagatcttgtgagaggtcacttactatcacgaagacagtaccaaggggatggtactaagccattcatgagaaatccatccccaggatacaatcacctcccaccaggctccacttccaacactggggattatatttcaacatgagatttgggtggggacacatatccaaactatatccagcaccatcatagctcattgcagccttgagctcctgggctccagcaattctcccacctcagcctttcgagtagccaccatgcccagcttatttttaaaacatttgtttttgtacagttggggtctccctatgatgcccaggctagtgtcttacacctgacctcaattgatcctcgcactttagcctcccaaagtgctgggattaccggcatgagtccttgtgcctggccctacaaagtttttttttgtttgtttgtttttttttttttttttttttttgagatgggggtctcactctgtcgccctggctggagtgcagtggcgcgatcttggcttactgcaacctccgcctcccaggttcaagtgattctmctgcctcagcctcttgagtagctgggactacaggctcacgccaccatgcccaggtaatttttgtatttttagtagagacagggtttcaccatgttggcccrgattgtctcaaactcctgacttcgtgatctgcccacttgggcctcccaaagtaatttttaaataaaatttagttaaaacgaaaaccaaacacttcccattaaagatgatacactaaatttgctgtttgtttttctcactgcatgatatgtaatttactcttttgaaagtatagacatttgaarcacatcaggagtctaatacttcacttgctttcaaatttattttcacttaaagaatgaaagccacaattatgaatatgatttgctttatgtttcatgtaccaacaagtacataggaatgtgtatttcttaatccaagctctgttactaacaagcagggtgacctcaagcaggcttcataaattctatataatttttcctacccttaaaatgacaataataaaggtataggccccacaaacatgttgtggacattaaatcaatcaatacatgtaagccactttgaagaatgcccagcagataataagcactcaataaacataaattattattgctatatttctttactaagatgaagagttttctgaggtcttttgtatacaagaactccgtcagaaatcatttaatcctcgtattcttttgctcactttagacgtctgtgaagaaacaggtagatacatctgattctaaccaggtaggaaaatataggctgttttctttcaatggacagagcagtaaggtaaaacagaaataattgtgtctacaaacttttgttacaatgatgtggggcctggtacaatgagagcctcatgggtgttactcagagtggtttatttcttttccttcctcacagtggtactgtgaggttgatggtgttggctacaactttacagctaaagatgacaatggtcagaatagagaaggtgatgagagggtaaatggtgtccttaaggagggctattatatgtgagctaatgtgtccaatacactaggcatattaactctgggcatagtgttacacctatttatacatggagacactagagcttagcgatggcaatattcactcagtcagcaagctagatagtaacagagacaagactcagacttcaaagaaactcctattattcccacaacaacactctgtctttcccaaataccaaccacacagtctgatacattgaaaaagtcaattctttactgcttgagataagttgcaagccaccaatccttccctcctggaagattttatttgacagctgggtacagcttgtgtctcttttttcttaattttgaaatctgctcttccctttaccctagatctatatagttcattttaatgtggttctctgcagcccacattttcctgtttaaatctttcctctgacaagtgatcgtttataaatgcaataacagatattagttgtgacaactacattgaaataatttgtatggtaaaattacttctaaattagtttttggtagtgcatagatttgcagcttagtattgtataatttgtacatgaaattgggttattctgtctgtgattacaaaaacagtcaggggcatgggagacataagaaaaaattaaattgattagtttaaagaggatacattagtatggcaagaatatttttttcctgtccataaaatcccactttaatcgtgttattccccatatcagaactctcaataattccccagtccttttaaaaagcaaactgtttatatagttttcaagtttatcgggtacttctccagtcacatctctcatagcttctcttaaaaacttcctgctcaacccactgcctgttcagcacatatccacctctttcattttatgtactatttactttcactgtaatactccacattcctctctggctatatgcatcctactcctccttcaaatctcacttacttcatgaagagccttccttgccttctctctcctctgaactcctatgttcttagtgtagttgtcatttacatgattttagagataatttgtaaatcctgttatattttagaagaggagaatgaagataaattaggttgtgcaacatgacctctttctgattgagctcattaagaacaaggctcatgctttcctacggttacaacatcaaaaggaaaaaaaaaaaaaaagaagaacaaggctgattttaattgctccaggtggtggtggatgcctacaatacggaaagcattgtgctaagagcttctgggatgcaaagtgaataagattatctatatgaattacctactttcagaacaaggctttctatgtcttaaaataaaggaagagaaggtattgtctgatattttctggctttatgactctgaaggcccttttatagacttcaggaaaaagtttatattaacactaaggaaagatgtgaatggtttatttgtcatccagcttgggaaattcacttctctgagtgtctttccaaatgtgcatattggctgatgtgatgattaattttatctatcaacttggctaggccaggggacccatatattttgccaaacacatcctgatgttgctttgaaggtgtcttttggatgagattatataaatcagttgactttgagtaaagcagataaccctccayaatacaggtaggcctcattcaactcattcaatcagttgaaggccttactggaaaaaaaaaaaaataaagactgacttccctagaagagcgaactctacctgtagtmtgtctttttattctttctttctttctttttttttttttttggatatggggtcttgctatgttgcccaggctggtctcaaactcctgggctcaagcaatttgcctgcctcagcctcctaaagtgctaggattacaggtgtgagccaccatgcttggctcctgcagtctgtctttggtctcaagtggcaatatcaactcatctctgggtctccagcctgctggtctaccctgaagaatatggatttagcctccacaattgcattagcyaattccttaaataatctctctctcctctctctcttctctctctctctccctccctcctttctccaacttattgattatttttctctggagaaacaatacagctaaggcccagtttagcactagttgcctatgatttatgtataaaataaaatttatttttcaaattagggttcaactttgtacacaaatccttgtctgcattaattacttttccttagtttatatccttgaagtggaatcactacatcaaaagatattaacatttttaagatccttgatacttatttaggttgtataaaataccacagggctttgtggcatgttccctgaatttataattttggaatttgaatagcgtagaagaaataattacagaatttttgcaatttgcatagtgtcatttattttacttctctttcttttctatgaggtgctcccttttcattctatgccttcgtggataacagcagcaatactagtctatgaatatcaattttttcccataggccttaatctttttctgcttgtggctgagaagatacctctgtctaaagccactcatatgagaaacgagtagcttctaaaatactgttggagcaaaaaggcactttctagctacatgtgtaggacagtatacccttacaaaaaagtttaattcagttctcctaaatattatacattcatttttactgaacattgacctgaatgcacccacacctgttatgctgttgtgccatgtttttctctaagtctccactgataggacttagattcatattaatgcatttttctttaatatatttattcagcaaatagttacccagtttttagtatatgccagacactgggatacagcatggagaaaacagacttttgtctgctctgtggagcttacattctagtgggaaaagcatatctttgccaaatgcacaaaagttttaaaaattaagaaagtaaaaaaaaaaggtaaaatgaaatggttggaattacaaagtaggaatgggttgcagctgatttttcttctttttttctaaggtacatgagccatgggaacattgtattcatgacccttttgtaacatatagcctttggagggtctggattctacttccgaactctcactgttctcttgggcttggtggcctcccagaaccctgccgggtaagctagaagacgcaaagctttcaagggaagtgttagtacatttgatagagttattttaaatttataaaactaaattatgtgcattatcaaagcttcataaaataatcaaggagaaagaaaaattgacagttcaacttacaatcaagagagaaccactattaacactttaatatattaaaatatgtaattgaaataaaatatgtacatataaatgtacatactttcaacaccaggctcatattgtacatagtattttgtagcctatgtttatacttaaaattacgttgtgggattttttgctgtttttaagtattttctcagaacatgatattgaatgactgtaagagtgttcgtaatgcacctaacccatgtactattggtgggcatttatcctttctttatctgtttatcttattatagcacctctgattacttccttaagataatttcgtagaagtaaaattattttatcattcttgatgcatatatctacatactcccaccaacaatgtgtacaaacactaaagaggttatattaaagggcaaaaatcaaccaaagactggaaagtaagatgaacagataaatgacagcagtgcacagtcttacaggtatccacagtgataattgctgtctttggtgaggactgtctctgttcgggtccaaccatgtctttaggtccatgttcacattggttgtttaatgggctgagtagtattttacaagtaagatttgggcattcttccagctctggccagtatttatatagtcaaactcatttctttgcacaaaacagctgaagtgagactcttcccttgaaggtttctgggagtctgtaatgtgttactggcaggagaatcgcttgaacccgggaggcagaggttgcagtgagctataccctcagcctcatagaccttctttctgtcccttgaacttaattaagctcattctaattccagtactttgcacttccagttctgtatttctcttttctcatgtctcctcttctcgattttactgattctgacgtaaatgatctaaaacatctccctccccccattactgctctctttcttaatactctgctttattttcttcttagtgcttagcattattggaaattacaccatttatttatttgtttttttcttgtctgtytcttcttgatggaatataaactctatgaaggcaaggatcttctgtggctttttcaatatttgctatatcactctgcattttgaactgtgctgaatataataaatatgtgtcaaatgaatgaaggcaaaaaggagtaaatgacaagtaccaaatatactagctctgggctggcaagacactctacttttctcctagtgtgctcattttaacacagaaaatttagcctttagttatctctattcattcagtctcagcctgtttctaagtaaagctgtattcaaatatgcaatttaaaaaatcttaatcttatatgtcttgagaagtgccttcygttcctcaagtaaagctggaagttcttacctttatcatcagagataactttaaaataatcctatgcaagtttagagttgtcctacatcctaatatttgccctacaacatatttaagaaattaaagtcacacatcatttttttagttattctttaattatttttaaatttttgtgtaaagtttcacattacatttttgatctcattttatttactgtttatctactttactctccaatttcttaaataagattaaaaggcaaaacataccaaaagtcctaaagaagttgattggcacatggcaggccctcaaaatggattaattatctctctaggagtgtatctctttattttctgaaaagacatagaatgaaaaaaaccaagaagcagatatcaaaacaatatgtgaaggagggaaaatactgttatttttcctttttaatctctctttttaaaaagcgttattgctttctgtatcttcttttccaaaatttgataaattgggaaactcattccaataacagttaaggaatattcaagagaaataggatttatacattgatctgagctctgcctgctaatcagcatattgctaatgggcagacatctggaatgctgttttcttaatgcaaaactagaggtttcaaactggtggtctctaagatgatgatgttaaagaaaaactaactgactacaaaactgggttactttacacacgtacaaaaaaattcttgtttttggttctctcaaaataatgattagaaatcggacagcactaacaccatagttctaaatggcaatatttggctgcagatatatactgtcagctctgtccacatggggtatattctctgcagtgacccacactcatttttgttaggctttgctcatttacgccacattcttggccctggagacatcagaatatgttcttcctgaatgatgcgctctcccaggtaccttatttccctgactcaatgggaccttgagtatccacccctggctttgttttgcttagcccactgccccaaccttaccacattaagagagaccaggactattttgtgcattctggacttgggcctgcaccatgggtgagggctgtggtttgtcttcagtttgtgcccaagttgaggtgagacacttgagagaaaaaaagaaaggggtggggaaccaaacagtcaaccaaacaagcaaaatgaaacaaccagggaattaagagaaaatggtagagaagagaagtaaatcagagttttggcttttctccctcatctgtctgactaaatttatgttgactttgtctgtatttaatttatagtgtgccactcatttagaataggcttcaaaaatgtgaactcccctccaaattttggcctcgttaggaagtggagagtgtgtgatagcgttatcattaagaggaagtttaaaaaaaagccaaaattacacttatgtatgtatttttgaagaaactcattttttgtgcgtgtggtttgagaaaagcaaaatttgggaggaatttggaaaagaggattactcatcaaaaggtagatcwtgcttaaaaacaaaatgggaacgacgaccttaaaaatgggaacgactggggagaaaactgacaaggacacattagagctgcacttcactagcagcatgaatgtggtaatggtgaaaggagaacaatatctgaaaggaaatgaaggtcttatcrtaggagccacagagatttcatttttgtttttctgaaaattatcattatcagctgtgactgctgatgaaggaccacttagcattccccccaaggaataattgccaacctcctctttggcccgacctcacatggactaacacgacaaagacataattttgccctaattctgaaaagaacaggaaacagtgatgtaatctatttgtttaattctaggaatctttccctaaagtctgcttttgcactgccaaactgggaagggatgtctgggggagtaattaaaggctttaaatgtggaagaaagagattcttagtgcagtgtggggagtctcaatgagattaatgggaaacaagggaaatttagatggacaagcaaaagccagtgggagttatgtcaatactgcacaaggtgtttaaggtcggtgcccatgagggctggtcagctccagtttacccttgcacagtctgtgcttagcaaatgagtactttaaacaaggttgccagaggcagagaaacgtctgggaaagaggtctgggaaagagaacaggctcctgaaggacttgcgctgcttcctgttgcttatagattggtgtagataatgcataaagtcctttccttagaacttctaagtttagactcattagagttactggtaagacctgaacacataaagtgtgcatgtaaaaattacattctgtaatgctaattatatatatatataccttcaaatatatatacagtcagaatctaatctgacacacacacatatatatatatatatacaccttcaaattagcattacagaatgtaatttttatatatatgacaattctacaggcaatctcagctggacatagtcaaaactgaagtcatttgttttcctcctgctttgctggctgatttgtttttccatctcctttactagtctttcctcttctttataacccatatgtgtttgccgaattcagagactggttctcagtattcatgcttctcaggtgaactcactcagatttatggctttagtggtagatatactcttactgccaaattaatatctgcatcgctgacccaattcctgagttttgggtttatatgtttaactgcttactgaacgtccctactttacggtttccaatcttttcagtatctaatagatactgtgttacatgtatctattagatacaagtgttacatgttcagagaactcttgagtgtaaacttgatgatgtttggggaagatttttttctagagaagtgctagagatgtagtcaaaacttgctacatatgtggtgaattaataaatatcytgatttactcccaaacctgtcttttgtccagtattttttaaattttagttaattttacagctgtatatctagctgcytaagctagaaaacttggaggcattctcaactcttcctgtacctcaccttccatgtcagatcaatcattaaattatcttaatctacattagaaaattatctgtaatccatttttttcctatcaccaccatcactgcatattcttgtcttctctaacaaaggcattataccttttgctatggactggattgtgttctccttaaaattaatatgtgaagtcccaactcccaatacttcaacatgtaactgtacttgaaaatagrgcctttaaagaggccaatgggggggcctgaatctaatctgactgatgtccttatgaaaaaagaaaatttggacatacaaagagacacaagagatgcatgcacacagaagaaagaccacgtgaggctacagtgagaagctggccatctgcaagccaagaagacaggactcagaagaaaccaaccttgtcaacatcttgatcttggactcgtagcctccagaagagtaacaaaataaatttctgttgtttaagccacccagactrtagtattttgttatggcaggctgagcaaactaatacattcttcctaaaaagatcctccagtcttccctaataagatgtcatcttatctctctctctctctccccccccaccccccaccgctttctctctctctctctcgctctctgtctctccatccgtccgaagtggattataaaaagaaaaaaaaagtaaagacagaaaaataaatataaataatacatactcaaagaataaaacagggtctcatgtatctttctctgtggtctttatgcttccctatgtgatctttcttaaagatgatcacaacagtaaatgaggatgttacttcattgcttcaamgtgtttggctccttatatcctgacaaattgcaaaggcttagcagtgtattcaaatgcgatttaccatttgttttcccccacttgcctttccaaatccatcttatctgtggcctaagaaagagtaaagcaagaatcagaattccagagagaagcaaagaggagcgataaagacacagataaccgggctcccattggaaacatgtcattaattagaacacattgacaattccatattcattgtcgtagtaaataaagagtaaagaatattatgggaggaaaaagaaatagaactaaatttcaaatgggaagccttaggaatttacctggagctgtcaaggaatgatgccttctgcctggaaaaactcttaatatcccatagattctaggactggtttagaagaggcatgtggaatccagaatactggagatttctttgattgcatctctgtctcctcctcttttgtctcattttgctttttccagatgtacttgtaatactcttagagagaaatagggtgtttttttctttttctttttttttttaaggttgggctggaaatagagggctttggtcttcttgtaaatctactagatacatggtgctaacatcctaactctctgctcatttcaattttgagctcagaatataggcttacaaagattgcctgggatttgacaattcttgaagctctaagcatttttgaagcataagggttcattgcagttttctataccagaagaacgaatattacagctytaaaggttagtagaaaggatctactcttatatagattgaaaaaacaataagggaaagaactgcttcctggaactgataaaattttatagtatcagcattactaactgaacaaacccaaaaaatctccagattttttttctttttagcttgtgttccttgtaagtgttaattccataaaggagtataggtttggagactgaatagaagtaaggtaatctggtgaattctaataattcccccttctttgtctcagaagatacaagggtatcccatgtacttcccataaagaaaatattagagaaggcaggtatatgaattttaagtatttcctagcagaggaccttatggtaagaatatctgatatctctactgttatgtctcagtaggtaaacatacacacttgcctattaattagcagatgtttcttctgtaacaattaccaatatattaagacctctaggactgtgagtgatactccaggacagaaaatcattgagtagatcaattttttgaatactaaaacacttataaattttttattataattcttacgagaaagttaaacaacctcagcactcagcattcaacataatttcaaacatatgagagttcttatttgggcaattgtgactatcattcctagaaacaaaagggagaagacctccttaatcagctcagccacattcccagaagctagggttgtggagccaggctcagttttggctcagcctctaagaagtctccacctgtaggataatgggttctgtaggtacttgtggaaagtgacttctgtagctttacaatgccagaaatagtgccattgattttaatgattgtactttttccaagaaactgagtgagtggccaagaatctgggcaaagtcacagacaatgagacattacagtcaccatggataggtatccacctgggggctggctggaagccttgcaaaatctatctagagkggtagacgttaagtcagtgagtgttyaggggctgaggaacgtcaacggcagtagaaaactttctgggctgatggaaatgttctatattttgactgggggcttggttacatggttatatacatttgccaaaactcatccattaaaactcattcactaattaaaatgaatgaattttattgtagctaaataaaattatgccaaagaattgtttaaaaataaaaatcagagttaggatggtgactaactttagaggcaggatcctgagaaaaaataaggaggcaaagaatatcctggaaatttcccttttctgagccctatgagcctgttgttctttctctccctgccccataggtagggttccctggaggacccctcagactcctcaggcagaacttgtctgcctctctattctcttcacaaaattatttaccctatcttcccatgtttgagcttatgatctattttcactcctcattttaaccctagcacctaggtactctacaaatatgtgttgagtcaattaatagaaaaataaataaatgaaggatggaaagagctcactaaattttcagctcactaaactagtttcctcatctataagaggcagttaatattgccttttccatgaaactgtaagaattacatgaaataataagcttgacatttgatagttattttatctttttctttcttgatcactagatactccccacactagaacaaccagttgtgcactaagagtcaacagaaaccctgacagagaaccccagagacaggtggtcattggacagaaatgacagggtcaactagagggagaatgatggtggcatagacagggctgtgaggtgtatgtactaggtgatagagatgaaggagtgttcctctacatcacagtgtccctccttagttaaatgacaaatattctattataagaaaattaagagttaaatatatcctgtggtgtaatgctctgtgaagacaggaattaatgcctgtattgttccctgctttatttgcagggaataaagactggcacattataggcacacaaatatttgttgtatgaaagaaagtcaaaaccaaaaaatatagtcactttaagtaagaccagaagaaatgggtaatacttttctttttaaatggcttaggatttggattgccatgggaacttttcagaatggactttcacaaaagctttgctctgagagcatggaagttggctacaacgttgcctgggaacaatacaaaggaggatggttttgaatgtcagtaacttttctgaatatccagcctacaaaataaaactttttctttaattgtaaagtaacaaaagacctctgtaaatatttgaaaaagaatagagaaaattaaaccataccattcagatatatataagtttaagttgtcggtgtttttccttccagtctgtgtttttaagcagaacatgaataaatatatgcatacattttcagagttgaaattatagtgtggatgaatttttgctttctgatttttactacaacatcttttatgcattttgtccttaataattcttcatacatttttaaatttcttcatattctatagagtgggtatccaacatttatgagaaatgagtttagatgtattgcagaaagatcgagtcctgggcaggtgccatcaataatggccagctccagaatgaagcacgtgtacctctgtgataatgatgtcatgcccaccatgccactgagaagtaacacttccaggagtcaaagagaatgcatgtcagactaattatattacaaagacagctgaggacctagagttgtgaggaaaagaaataacttgtgaggaaaaagacctacaggaaagccagaaaatcaatgcttaatgctctgtcagcctgtcaaaagtatttttggcaccaagagtactgtccattattaaggaatagaggtaatgacgtatttgtatgagtgctggcatccttctccacctacacacttgagcagccttgaaagaagaggtttctaagtgaattgtaaaagctctctaagatggattatttttgctgtaatgatagctaacatttacttattgcttattgtgtaccagtatctgttctatgttctttccacccattaactcatttaatccttacaacaattccaataagtactttccattattattccattatccatattttacagacagaataaaggaggcacagagaagttatacaaattgtcctggcacaaaaaactgataagacttaagcccaggagtactggcccaagaagatattaggttggtacaaaagtaattctgggttttgcattgttggaatttgccgtttgatattggaatccattcttaaataaatgtggttatgttatacatcaatttaacgggcatttcttactttatgtttttttgctgcttattttatgtttattttagactatggaaatgatgttggagaaaaagcaaatttgagcgattttcttatttgagttcaaaatgggtcttaaagcagtggggacaactggcaacataacaatgcatttggcctgggaactgctaaccaactcttagttcaatggcggttcaagaagttttgcaaaggagacaatagccttgaagataaggagcatagtggccggccatcagaagttgacaacgaccaattgagagcaatatttgaagctgatcctcttacaactacasgagaagttgccaaagaactcagtgtcgaccttcctatggttgttcggcatttgaagcaaattggaaaggtgagaaagctccatacatgggtgctgcatgagctgagtgagaagaaaaaaatcgtcattttgaagttttgtcttctcttgttcttcacaacggtgaactatctcatgattggattgtgacgtacgatgaaaagtagattttatatgacaatgggcaatgaccagctcagtggttggactgagaagacactccaaagcacttccaaaagccaaatttgcaccacaaaaaaaggtcatgatcactgttgggtggtctgctgccactccgatccactacagctttctgaatcctggcaaaaccattacatctgagaagtatgctcagcaaatagatgagatgcactgaaaactgcaatgcctgcagctggcattggtcaacagaaagggtccaattcttctcccaaccgcgtgttgcaaaactaatgcttcaaaagttgaacgaagttttgcctcatctgccatatttgcctgatctctcaccaactgatcaccacttttttaagcatctcgacagcacaactttttgcagggaaaatgcttccacaaccagcaggatgcagaaaatgctttccaagggttcatttaatcctgaaccatagattgttagctacaggaataaacaaacttatttctcactggcaaaaatttgttgattataatggttcctattttgattaataaagatgtgtttgagcctagttataatgatttaaaattcacggtctgaaaccgcaattacttttgcactagcctaataagtaagtgtgtacttgtgtgtgtgtgtgtatttaatatatatttgtatatataactcatagtgtgtgtgtttgtgtagtttccctattggtgtctttcctaatctagtgaaaccttgcctgtgttcccctccaactatggcccaacttcttattatctgtttacaaaacttggagaactgcactggctatagctaattttcttacctcacatatttattccagcccactggaaactttatttatttctcacgttgtattaacatagttctctataagaccaccaacagccttccagatgccgtgaagacttttaagacattgtactattggagctctttgtagcttttaaaacagtaacttctttcaagatattctctaccatttagtttctatattgctgagcacccttgtttctttttgtatttttataatacttcttcctctatctgcttaatactttcttccacttgggacccttaacattgatattctccagattttcattctcatcccatcatttttctcactttacacattttccaagtctaacatcatcatttttgaagtttttgtctatcgcctttatgtgataattcttcagcctgtactttccaaaactggacataagtctattcagacttttatatccacctgtcaactgcatgtgttctgaatggctgataagcaccttaaatttaacatgtgtaaagctcaactcattatctttttcccaaaacttgctttttcttctgtgtactttatctcagttaatagtaccatgctccatccttcactagctagaatattagtatcattttcattttctcactttcccatccccacatggcattagttttcaagaccttcttattttatttcctaaatattacccaagtcttgtataaatgatgacactttaggttctaagtaactgaaacaaaactcagcttcaatttctcttaggcaaaagggaaactataggcttatgtcaccttgattgggggaaatataattgggagagaagggaattaatgctatcaggtgtctcttaatttctcagtctctctcatattacccccacactgttttctgcctttctctgtgtgttggctgtatatccttcctggaaattgcagagttacagcttcatatagagatgaaagggtccttcttcttttaatgccaatcctagaactgatttttattgacccatctagtgttatgtctcccctgcttggccccagttagtgtggtgggctggaggataagaagatagaaggaactgacagatttgatccatccacatagtagcccctgttagaaccacactgttggcatggtggagggcaagtatttaatccctaaatggagaagttggttttatcagaagaatcagagaaaggggtgctgcacaggaaatcctacacgtccattacaaattaatttctccctctctaaccttatgcttctcttgtctttcttttcgcaactaaagtaccattagaactttctttcttaactgcctgagtccaagtcttttcctctctaaatatattaacacagagatctgatttcataaaaatgaataaataagatttgtgtgtgtgaaatcattacccatctacacaacactcttccaatggctccattcacttcctggttaaagtgcatatttcttcttcctccaagaagcctagactcatacttagcaattcaacctgaagaagagctttcatttcaggtccaatattttaccctgtagtaatatcaataggttttgtttgtactgaacacaattaatttttcctttgtttctgcttctcagattagtttgcccttctgtctttcttctatgactgattccttactctctctgcccaactcctattcagtctttaatgttcagttcttatataaatcacccaggagatctctctaataggtgttgaacttcctcaataatttgtgcatatttgtatctttgcaaacgaatgcttatgtttttatcttctccactcaaatgcaagctcctgagaacaagaactaaattaaattatcttgacatccctcatacaacaacattgtctggtgaatgataatcactctagaaataccatgaaaatgaagttaagaatggaaataccacaaactcaatcaatcatatgagttattatttctgagctacctggaaaaattctactctaacacatttataaatcacattttttacttatgtgaaaccatgttactttttaaaaattatacccattatatctgaggttcaatttaaagaccttttgtttaattatctgttttgaaaattagatgaactgattattttgattttttaaataagtggatgatttccagaatcatatgctagtctatattttccaacagagcatattggccaaaataaaatttttctttgattctgaaacttatactatcccagcaacaccataattttgtcacttatatgatgcttttgtcacttatacaatatttgaagaaggttttggattttaggtcggatctctactaaccctggaattctttaaaaatgaatactttggcctggcatggtgtctcacacctgttatcccagaaatttgagaggctgaggcagaaggatcacttaaggctaggagtttgagaccagcctggacagcctgtctgtacaaaaactttttaaaaattagctggacgtgatggtgcctgcctgtagttctagctacttgggaggctggggtgggagaattgcttgagctcagaaggtccaggatacagtgagtgaaatccttcctctaaataagtaaataaataaatatctttatcaacctatattagtgcaatctgttccatagctttatttgtctaaactgatcactctttttttccttttttaaaataatgcttaccttttccttcacttgcttcatggaaaactttctcagtctccttggctgctccattcattcattcaacaattacttcctgggtccttcctgggagctgtctgtcagtccccctgctcaccagccactttctcccatatgtctctcttgtttactcccatgaagccatgttgtgctgaacagggacctctcttctgagctccaaaaccatatatccatttgtttgctttatatcatggatttcaattgctacctctgactcagcatattccaaactgaacataggttttcctccccagtttttgctttcttttcagtgaatgtcaccattactcatgagatatacaagcccaaacactgggaataagtcttatctttttcctgtccttcatcatcctatcaatcaccaaatcacattgaccttgcctacttgatagctatgtaatcattccttatttttatctctactatcacgatcatagtctcagtcaccattacttatttttttgcactactctaattcactagtaaatagtccctagcatctatttttactcatctccaatctattattcacatgtttacccagtgatctattaaataaacattcatttgatcatgttgctctcatgcttaaaactctaaataatttcccattacttttaggacaagattcaaaatatttaaaatggcccacaaagtcttaccttcctttccaagcaattattatttctcttctgcatctggctctatgcatcaatcatgaaaacttccttttgtttctcaaagaatgctctttctcacctcaaggcctttgtacacattttaaaattgcatttctgttcatattaaggcagaaataaattatccacatggctagaaaactaaagcagcacaaaaatctgtaaaataaaaaactaaaagctttcctctcactcctccatgtcactcttctccaaataaccaatgtcatttgcctcttgtatattttcctaaagtgtgtgtgtgtgtgtgtgtgtgtgtgtattttgggagacgtgggagaaatgggtgtgctctatactctgcaatatagtacaatgattaaaatacaaatttaggaacttgcctgccgaattcgaatcccattgtctcgggatgtttagggtgttggttttccagccagaaacctctgtggccagtggtgcctttgcccaagttttcgctgaggcctgctgggctcattctgcccatttggcctggcaggctgcactcaactcatgctaccagcccagatcccacaactgctaagggtgagccaggcgcagagtggcaagcagtgtgtgagcgagcatggggtccagccactgtgcacagccaggcatgccagctgcagtggggtgggcagctgcaggcactggaacakgtgccggctccctgcaaggctgcggctggaccaggcataccacaagtggctaccactgcaggcaccagggaatgtggtggcacccagaagcttggagttgccaggaattgcagagccccaaagagggagtcatagccctggctcagggagttcctaggtctggggtcaccgaagggctgcagttcttctcttcttctcatcacctgcaacacggcaagtagggagtgtgtttcagccctgtttgtgttacagctctttcagtcccatcatttggcaggtcctgagttcttgccctgtgtccaggaggaatgaggtatgcggacaactggagggtgagcaaggtggagaggtgcctcattgaatgacagaacagctctcaggagacctgaagtgggtagttcctttccacaggcaggtcatcccaataagcacccagctctcagcagagaggatacccatagtgggtatctcctttctgcaggcagatagtcccaagtgtccagctctcagtggagggagacccagaatgggtagctcctttccacaggcaggtcatccaatgagtgtccagctctcagagaagaggggacccagaatgggtagctcctttccacaggcaggtcatcccaacaagttggggagacccaaaatgggtagctccttcctgcagccagtagtctcaatgtctgcgtgagtctgactgagtccaggatttttatgggctcagaagggaggaagtgcatgctgattggtcaatgggtggccatgggcaggcccagagaaagcatcataagttctcattctgggctgtggactctacctggaactgacagctcagcctccaggcttcaggccatccctggcttgaagagaccagggacccacccctttctgcccaggaacccgtctgcctcctgccatcaacatgttgtccatggtgtccaagctgtttatgccaagggatgcctgcaggcccatgctgagctgccctcagcatcactcctggcctctctcccacagtcatcagtgcctgtagttaggaggggactgaggaagtgggggggctggcatgtcagcaccaccctgagtgcatgcacactcagctgggttgtgacagcacccaggctcggccacaaatttgctccaaaattggagtgggcattggaagcagggagaggtcagggagcaggagaaggcacttctgatcctgtgagggcaaggggggtttcccgggctcccaagagtgcaaggatgcccaggtcaggagccgtggctgggtggctgcagctgcacccagaagcttggggctcccaccctgccaactcagtagggggcgtggctcccacctgttcctgcctcccaccagctccatagagagcacagccctggatgcccttcccctgctgcaactggcatccctgcagtggctgctccagacaggctgctgggagcatcaccatctctgccacaaacttggcttgtgaccttaggagcaagttacttattcattctgggtcttaatttctttatctgtaaaatgaaaaatcagtgggctctgctttataagttgtgaattaaatgaatatatatacacacacaaaaaaaaatacacagagccacatgtagctg

SEQ ID NO: 94081 - DNA, 81563 bp, Homo sapiens
  misc_feature (1)...(81563): n = A,T,C or G
gatctctgctcacagcaacctccgcctcctaggttcaagcaattctcctgccccagcctcccgagtagctgggattacaggtgtgcgactccatgcccggctaacttttgcatttttagtagagacagggtttcaccatgttggtcaggctggtctcaaacttctgacctcgtgacccacccgcctcggcctcccaaagtgctgggattacaggcatgggccactgcgcccagccaatttgttcttaaaaactctgatccctgaatgcttagggagactgatttgagcagtaataaaactctggtctmccacacagccggctctgtgtgaattactctctctctatggcaattcccatcttgatagattggctctgtctaggcagcgggcaaggtgaacccattgggcggttataaaagtatggaggtttattgcaaagagaaaattacatattcaagaaaggggagtgtgaacatactcgagagtgacacagcccgatttgaggtttttatctttacggatttctttaaccaaggaatggaatattcatgaagaatcctggaaaaaggtggagatttctcagaaatgtggtgccatccattttttaaccaaatatgggactgtcatggcactggtgggtgtgtgatttagtacgttaataagcatataattaggtcctaggtgaaacctaggtcaaatccagcgccatgttgtgtcctgtcagccttagcgagtttggcccacaccccggtttttagaatcttatcagcttctaccttatgtagctattttaacagattttttccttgttagttacgtgaaactgctgcctggaattattaaatttttctgcaaccaccttgtattattcctgtctcattttcccctctcagagatgactaccttttatttttcaggattgatgagggaggaggtcaatcttatgtatttactttctgttgaatggggcattggccctgcctattgagggtatggaaatctctggctgcttggtctgagggtcccaagggtggatcatcaggagagtctgaatatgaggcagggattggctgcaatctttgtatgaccattatttaggcattgaactgcggcaacctagaagacacagactacaaggaggttaaacaagcaaggaccaaaaattagtagtaacaagatagttattaaagatcctaggaaaggtaggaactatgtcacacttggtaggtatcctttaatgaagtcccagatggttcgagtagtggagctattgaaattatgcagccaggtagcctgttggtaaatattttgaatttgtagtttaactaatactagtttaactagtttaatattagtttaattaatttgtagtttaactaattgagttgttaatataagaacaataggtgtggtttattattgtgcaaacccctctttgttcagataaaacctctttttttttttttttttttttgagacggaatctcactctgtccccaagcctggagtgcaatggtatgatctcagctcactgcaacctccgcctcctggattcaagcaattcccctgcctcagcctcccaagtagctgggactacaggcgcgtgccaccacgcccggctaattttttgtattttagtagagacggggtttcaccatgttggtcgtggctggtctcgaactcctgatcttgtggtctgcccgcctcagccttccaaagtgctgggattgcaggcatgagccaccgcgcccgacccaaaacctcttgtttatttgaccatttaagtggtttatgctctggccttgttagggctttatacaactgcttaggaatgagcccaaatcctgggatccaaattctgtaaaatcctgccatattcaggaaagttctgagttttttttgtttgctcgttaaagttctgttttttaagatagtctctttttcgcctgatggacaaggttcaatatcctgggcttaggaggtactccagatattttactttcagtttagaaatctgggccttgaggctgggcacagtcgcccacacctgtaatcccaacactctgggaggccgaggcctgcggctcacctgaggtcaggagtttgagaccagcatggccaacatggtgaaaccctgtctctactaaaaatacaaaaaattagcctagtgaggtggtgtgtgcctatagtcccagctactccagaggctcaggtaggaggatcgcttgaaccagggcaagggaggttgcagtgggctgagatcacatcaccgcactccagcctgggtaacagagcgagactctgtctaaaaaaaaaaaaaaaaaagaggccaggagcggtggctcacgcctgtaatcccagcactttggnnnnnnnnnnnnnnnnnnnnnnnnnnnnnnnnnnnnnnnnnnnnnnnnnnnnnnnnnnnnnnnnnnnnnnnnnnnnnnnnnnnnnnnnnnnnnnnnnnnnnnnnnnnnnnnnnnnnnnnnnnnnnnnnnnnnnnnnnnnnnnnnnnnnnnnnnnnnnnnnnnnnnnnnnnnnnnnnnnnnnnnnnnnnnnnnnnnnnnnnnnttccagtgagctgagatcgtgccactgtactccagcctggacgacagagtgagactccgtccaaaaaaaaaagaaaagaaaaagaaaattttcccagtgatgcttgtgccttttgagattggttaagtatacttggaatgtttaacaaacaatataaaggctagaaccagttagcttggtttgaatctcagttctgtggtttactacctatgtgggctcaggcctcaggctagttaatttctctgttttctcaatcataaaagggtgacaagagtatagtaatatctaggccaggcacggtggctcaggcctgtaatcccagcactttgggaggttgaggaaggtggctcacccgaggtcaggagttcgagactagcttggccaacatgttgaaaccctatctctactacaaatacaaaattagccaggcatggtgatgcacgcctgtagtcccatctatttgggaggctgaggcaggagaattgcttgaaccctggaggtggaggtggcagtgagtcgagattgcgccactgcattccagcctgggcaacagagcgagactccatctcaaaaacaaaacaaaacaaaaacaaaaacaaaaaaagtagaaggtggcaagtattaatgaagaggaaagggttatgggatcacaagaggaggagacatgtaacccaagacttcagagttgtggggagggaatcagaaatactccacacagaagatatttatgtacaaaaggcccacgtcaagacagaacatgtcatgtttatggagttgaagcagtttaatatggctagagagtagagtgatgggggcagtggtaagagagcaggctgcaaggtaaacaagggctagccaaacctccaagtgcctaataagaaatgctagaagtttggagttcttcctgagagctgtggggagccataaaatgatcacatttgtattttagaatggttgtcttcaattaaaaaaaagtttttgctgggcacagtggctcatgcttgtaatcccaacactttgggaggccaaggcgggtggatcacttgaggtcaggagtttgagaccaggttggccaacatggcaaagccccatcttcactaaaaatacaaaaaaattagccagacatagcggtgcacaggtgtaatcccagctacacaggaggctgaggcaggagaatcacttgaacccaggaggtggagggtgcggtgagccaagttcgcaccattgcactccagcctgggtggcaagagcgagactctgtctcaaaaaaaaaaaaaaaaaaaattagccaggcatggtgctgcgcacctgtaattccagctacttgggaggctgaggcagaagaatggcttgtacccaggacgcagaggttgcagtgagccgagattgtgccactgcactctagcctaggcaacagagtgagattctgtcccccgcccaaaaaaaaaaaaaaaatctcacatactcacatactgccctaaaagaattttgcaaaactgtgtacctccttccacatcttaacaactaatatttctcataagtttaaaagctaattttttgttaatgggaggttgaaaatattaaacattttgaaagatgaaataaggtaaccatgtattattcctgaaatacatattttatgacatgatacataccaaatctgaaacattgtatgaaatttctatctgtgggttttagcaactgtattttgaaaaaatgtattggtcctagaaatcatacaattgcatttaaaggactcaacatcactgttctatgctgcctacgttttttgaattcaaggcaactttgtcccttaacaaaaatatttatatgacaggtaaagaaggaagaccttgtaggtttaagctgcctcaatgtatcattaaaagagacttccattcagcaggcatggatctacaggaacaacaacaacaaaaaaagatttccagacttctgcttctgtcaaagaggaggtaacagggattggatttaccctcctgcctgaaacaaacaaaaaaactcagacaaaatatatgaaacagggccgggcacagtggctcatgcctgtaatcccagcactttgggaggctgaggcgggaagatcacttgaggtcagagttcgagaccagcctggccaacatggtgaaacgcggtctctactagtaatacaaaaattagctgggtgtggtggcacacatctgtaatcccagctactcgggaggctgaggcaggagaattgcttgagcccaggaggtagagattgcagtaagccaagattgcaccattgcacttcagcctaggcgacaagagtgaaactccatctcaaaacaaataaacaaaaaaagcaatgactgtaatttaacacattcaaaaactgaaaaaagaaaaactatatagtcatttgaatagccacagagaaagcatttgacagcatccattcttgaccaaaactctcagcaaaataggaacagaaggaaacttcctcaacttgataaagggcatctatgaaaacctacaggttattggtgagagactgaatgttttctccctaataagtgtcagtgagtagccaggtatgatggttggggggggcctgtaatcccagctactcgggaggctgaggcaggagaattgcttgaacccaggaggtggaggttgcagtgagctgagattgtgccactgcactccagcctgggcaacaagggcgaaactccatctaaaaaaaaaaagaaaaataaaaagtaagtgtcaataagaagtttgggaaagaagttttgttttgaacttgttgagtttggggcctaatatgacactgacaattgaactgaggatgaatatagttatactgggtctggagcacagaacagagttgttaaaacatagagcatattaagggtattttaacaagtccgtattttannnnnnnnnnnnnnnnnnnntccgtattttatttatttatttattttgaggtggagtttcactcttgttgcccaggctggaatgcagtggcacgatcttggctcactgcaacctccacctcccaggttcaagaattctcctgcctcagcctcccaagtagctggattacaggtgtccaccaccacacctggctaattttttgtatttttaagtagagacagggtttcaccatgttggccaagctggtctcgaactcctgacctcaggtgatccacctgccttggcctgtcaaagtgctgggattacaggtgtgagccaccgcacctggccaacaagtctgtatttttaaacaagtgctccaaggaagagtaagatgagaaaaggattaggaatagaaatactgaagaaatccaacacttaaagctcctgaaggccagacataggaaaaggagctagcaaaggcaaccaagagcaatcacagagataaaaagacaactttttggtgcattttaaggaaaatccagtttcaacaaagagggatgggtcaatagagtcagaagctaaagaagaaagaatatcaggatcctatattgtgtgcatgccaacattcttagccattaagcacaggtgaccactagaatttatttatttatttgtttattttgagatggagtttcgctgttgtcacccaggctggtgtgcaatggcatgatcttggctccctgcaacctccacctcccgggttcaagcgattctcctgcctcagcctcccgagtagctgggattataggcacatgccaccacgcctggctaatttttgtatttttagtagagacaggtttcatgatgttggccagcctgttctggaactctgacctcaggtaatccacccgcctaggcctcccaaagtgctgggattacaggtgtgagccaccacgcccagcctagaatatatttaaactaagcattgtttaagatagatgggacttagccaatccttaatgccagtatatcacatcacattccactccattaggggtggatgtttatgtaagttgaggttctcctattggttactgcactcttctttagattgtgcatacagacctacccagagaagccagtatccatggctttggagagttcaaatattcaattttccgttcaaaaaaaggtaagcgaaatacttaagtctcaggcccactaggaccttaagcctttcgtttttgtaaatatttcactaataaactgtctacactttcccagattgggcaggccttacattctatatatactgagaggcacattatctcactaagcctcaatttcctcatttgtaaaaaggataagaacatcaatcctaccttactactttcacgggattggttaaagttagcttttaaagtattttctcactctggctccttaataccctagctacagtctgacacaagaatgactgcagcaaaatgttggctgtattataataaaaatatttgtggaaaggctttgttagctggaagccatctcaagtattattctttataccccaatctcgatttaggcctctaggtaaccaaattcaaagtaacacctcatcatgatggttgccaaggggtaggtggagggactgcagccccttccccacaaacaattccaataaaaacactgttgtgcaaacagagcttcacgaccagttccctgggccagctgctcaccagattaccactcccaaactcccttttctttggaaatactgcacctgctgtatttgtggggagctgtataacttttgaagtatctaagtgatcagttcctacaatgacatccttgagatatggccacggaactttccaaagcagccttggcctccttcatgtccagcaacctgagataaggccacgccaccggctaagagttccgccaggggcccagctctcaggaggcctcttcggtgccgccagcctcccgaagtcatccaaggtagcaggcaaatccggcagcagcaaactagctcggattcggcttcggtttttctcctggccggcgccacaggcccctcctcccggggcgggctcctcggtgcgagggcaggaggggcggagccggtggatgccgcgggctcctcctcccaagggcgggccgcgggagacccggccggctttgccggcggggaccgggctgggggcggggccgggcgccgcgagcccctcctctcgagggccggccggtttggcggcggctgcggagggtatctgaggctcggctgccaagccgaacgggctctggctcctcccagtggccggccggggcggaagcaggaggcgggggcagcgtgcgcgctgctggtcttctctcccgcggcgctggggcccgcgctccgctgctgttgctccattcggcgcttttctggcggctggctcctctccgctgccggctgctcctcgaccaggcctccttctcaacctcagcccgcggcgccgacccttccggcaccctcccgccccgtctcgtactgtcgccgtcaccgccgcggctccggccctggccccgatggctctgtgcaacggagactccaaggtcagcgtgggggtccctgcagcaccgcatcccggcggaggcgaggctcccggaccggggagccaccccgcgaggcccttccccacccccttcccccagcccgtccgcgcagccctgcgccccgggcagccacgcgtcgtagagtccctggtcggggcctgtggcatgttttatctcgggagcggcgatgctttgttgatcttgtctgcgtgtcgaggtccgggcgtcggggagggcatcagctccccgcggccgcgtcgctggcccccgcctcccccgcgccgctgtggggcgcagagcccgcgagcgcggcgcgagggtgggggtagggcggcgagcgggcttgtgtgtctgcgtgtcggggtgggggcttcctcggctcccaccccgtccctctgggaggctgggggcccgttgtggcgatcccggggcccgccgaaggcagggcagggtcggggcctcctgtgcggcgttggagctgggccggcctctggtcttcccgccaccccgtttcccgcctgccctcggcgaggcccgctccattccccccgccagccttgggctccgcggcggttaggccggttctggacgaacccctcggagctgcactgtcttccccctcccccaacgcccctgcaggcccgcgtgagggctggtggccccagggtcgcgcactccgttctccctccccgcttccttctcagagaggaaagggtgtgtgtccaggtcccgcccccgtccagcttgctccctgtcgagcttgctggtttgcggggtaacccgcttccccgcctttggggtccctccccgggacgcgagccgtgccagctcgcccgaggcctgggcagtccggagttccggagtgctggaaaagttgccgccttgacgtacccggcggggagagcacgtttgaccgctgctgctcatctctcctccaactcacttttcttagaccgttcctcttactttcgtcccgcttttgaattgggcaccttcgctttcacctctgtattaaaattttcattggcctggagttctttctgaccttcactaagtcagttttgccagcgggaaaccgtgcagttttgaattgcgatttacttcattaagatacacctcctctgtacgctgttgagggcctagctttaggaaaaaacttaattaaatttcattcggggggtgggattgtatacttcgaggtggatttggtgctctacgtcagatagtagtgccttgttcaggcagaattttaacattctttttaaaaggtgctgctcaagggtcacatcttaggaggtcctcttgaatggttgcttagcacccggtaatcattcaaaaagtatttgtcgaacaatgagtaaaagattataaggtagctgattttaactcttttaaaccaaggcaccagtggtgcttaggtccagggagctgttaagacacacaaacctttagtttctgacctaaggagcaaatgtaaaccccattgtccagctctttcccgattactagtcgacttgcaaagcatttttctgcctagttttgagtcttacaactcattggaaagattcatctttatgctgatagatgaaataactggtgttagaaggactgaaatttaatttatgggctttgaaaaatatatagtgcatttgagaggagtattttcacaaaactaagtgacagaaaagtataagatttgtttccagagtatataagaggatttttctttttcctaactggtattttttctttgttttgctctagttggaatgacaaagataatcttatcagtttgctatatttgagcctagggtgaattaattttatttcaaggttctttatgttttatagcataattaaacattttaaaaactatgttaacaattagttgtggactgaattggaagcattttcaagaggaacatctggagaattaatatatttcatcaaatctatgattattgtatgtacccctgaggaagaaagtcctgacaaaccataacatgccagtgatcataaacattttaagtaaagagatattaaatatggggaaataccttatatcacctactttattatgcatatttctaagaggcccacctggaaataagtaggagtcttattttccatagcctaccactgaaccacctttcccttgggaggaaaggcttactttgtacattgattgggccttggctgtgtgtatcttagttcataaattaaaagttgggcaagagctggttttgattcctgtttctggtacatttcagttatcaggattttctaaaacggcgtttttgcatgatagaaactggagaggggcctaaaagctatgaaagcatttgggttattttaattattttttatacacaatattttatttaatttttawtttatattatttttttgagacaggatcttgctctgtcacccaagctggagtgcagtggtgtgatcacagctcactgctgccttgacttctttagcctcctgagtagctggaagtacaggygtggatcaccccgccctgctaatttttattttttgtagagacagttctcgctgtgttgctcaggctggtctggaactcctgggctcaagctatcctcccactttagcgtcccaaagtgctgggattacagtagtgagccactgtgcctggccagtattttatttatttaaattttttatttccgtatgttattggggagcaggtgtcgttaggttacatgagtaagttcttttttttttttttttttttttttttttgagatggagtctagctctgtcgcccaggctggagtgcagtggtgtgatctcggctcactgcaagctctgcctcctaggttcacgcagttctcctgcctcagcctcccaagtagctggaactacaggcgcccgccaccatgcctagctaatttttttgtatttttagtagagacagggtttcactgtgttagccaggatggtcttgatctcctggcctcgtgatccacctgcctcagcctcccaaagtgctgggattacaggcgtgagccaccatgcccagccatgagcaaattctttagtggtgatttgtgagattttggtgcacccatcacccgaacggtatacacaacacccagtatgtagtcttttatccctcacccgcttccyaccctttccccctgagtctccaaagtccattgtgtcattcttatgcctttgcatcctcacagcataggtgatcagcttttctttaaaaactttttattatggcargggtgtatttgacatagtaacttgagttttattaaggcagcattatcagagtaatgctttgggtgacttgtcaagtttcctactcttttcccctgtctaagggtgaaactcttggttggagtaaaggtggtacctgtcctatcattgagaggttatgactaggttatatcatacttggatgaaagatgttttataaactctcccttagtgattgcatgtgatacagaatctttaatggcatttaataatgttaattttaagtttggaatttccaaatttaagattttgaatggaatgggaatataacttgggatttttatctgggatgtactgagaattaaacaactatatcaccttttgtcacaacttagtaaatttttttcttagataaaagttagatttttcagattttattccgttaggatattcatttagagtggaagaactgctgcagacaaaaggaatggtttttagtgtagtgtgttcttagacctgaaaggttttgaaattcctccaggaatctyggatgacattgcctttagcgtgggccaacttgtcacttaaggaaaataattcagtcttttaagaatttttacaaaaagtatagacttgtcttatacttgtacaaatgtatttgatacttttttaaggttaatgaattacattccaaaggatgttgtttgaagtaatgaataattatttgctacccagaataatcaaattttgctgttgtrgtacattcttaaactttgttttcttttttttttttttttttttttttgagacagagtctggctctgttgcccaggctggagtacagtggcatgatctcggctcactgcaatgtccgcctccctggttcaagtgatccttgtgtgatccttgtacctcagccacccgagtagctgggattacaggcgtgtgccaccacatacggctaattttatatttttagtagagacagggtttcaccatgttggccaggctggtctctaacccttgacctcaagtgagtcgctcaccttggcctcccaaagtcgtgggattacaagtgtgaaccactgtgcctggccttaaatcctgtgttttgttttgtttgtttttgagacaaagtcttgctctgtcacccaggctggagtgcagtggcatgatctcccctcattgcaacctccgcctcccaggctcaaggaattctcctgactcagcctcctgagtagctgggactaaatgcgcatgccgccgtgcctggctaacttttgtatttttagtagagatggggtttcaccatgttgcccaggctggtctcgaactcctgggctcaggtgatccaccggcctcacctcccaaagtgctaagatgataggcgtgagccattgtgtccggccctggccttaaactttgtttttatgcctctttctaacctaaaccatatttagatgctgaaaatgaatgaaagtgtcagggttaatgcataattctgaagcactttgtgaatcaacagaaaaataattgtttcatagaattttaaatctttgtgtggcatatacaattctgggttgcgtagaatattatttttttcatgcttattgtggaatagagatgcttctgtatttgctcaagaaggacggtggttaaaaaaattgctttattatagtaaaaacataacagtcaattggttttcttgttggtggacccttgctatggcttcaggttcatggttttgaggacctaggagattatatagttaagtctatacactcattaagattgttataatgtgaaagggaataagatctctaaactggggcacatgagcataaaaaaagaaggtgtggaaaatttaaatttataataattgctgcaaaataaaatattacatacaaaaaaattgtagatttacacaatacaattagtaagtaaatggcaaaactcctgtggcaagagtgttcagattactgtcttctgtacattatacacagggacatataacatctctttcctgcatgtgttacacaaataccccatatttcccagtgacccagcttataatggcctcgaggctcctgtgcatcttgcaaggtgaggagtggctgtaacacaactgggaggtacactgagtagccggcaggaatagcaacttcagatatttctcctgtcatcacccaagactagatagagttagctatccttaattgcctgtgtccaagagtacttgattttattagaaaagagtaaggaaggatgtgttaccagtatttggcattcagactgaacgagaagttaaaaatgagaactgtttactatgcttgcaacccacacaacactagacaaagccatagccgaaggtggtattagatataaggtgaaagtttaacaaacccgtcctattttactttaaggcagttattcatagtatgttgttaaaaagaaaaatctgagacaaatgttaagctgggtgggatatcggactaacagatgtacatcaggagagtcctgggcagactggaccatatggtcactccatttatagagcacatattgttctgagtttggctctgatttctccccagtgatgtgtatttaaaatttggctaaaatttaagtctagtgtgtatacattagcattatttttctgagttaattatataataagagtattattctaaaattcttgaaaactgagtgtcattaattacctgtgttttaaaagtggtgtgagccagcagcactgaacctgaccctaaggtaaaataatcttctctagtctgccataacacttgcaagggatgtttcccaaacctttaaagctgcctggacatgtgaagttttctgtttagttactcccgtttgtcactggaaaaacagtaaccttttaatctcaaaactcacagcggtccatgtaaatttaatttctacctcatttgcaatttggagaacgagtctcagtaattcttctgaatcctattatgaatgtaaatttaggactccagatttctaaaattctgctttggacaaattttggatcaacgatctctgattaatttgggaaattttagatgaacaaaagtacctgtagatatatcattattttgatgttattggtagcagtagaacttcattatacttattatttggcaagcaaattaaaagaaattttagtcaacatccatgtcctcaatctggattctaccatttacttttcctaaaaaaatttttataacagctttattgagatataattgacataccatgtactctgcttaaagtatccaaccccatagttcttagtgtattcacagatttgtacaaccatcaccccccatttgtacagtcaaaaaaacattctcatccctcctcccaaaaaaaaacctctacccttcagcaagggtccccattttcctgcaaccaccgctccctcccagtcctagtcaaccacaaattcattttctgtctgtagatttgccaattgtcttagtctgttggggccgctaaaacaaaataccagaaactgagtggcttatgaacaacaaaaatttctcacaattctgaacgctgagaagttcaaaatcaagggacctgcagattcagtgcctggtgagggcccacttcctgggtcatagaagtgcttgatgctgtgtcctcaccttggggcctttttttttttttttttgagacagagtctcgctagtacagtggcgcgatctcagctcactgcaacctccacctcctggattcaagccattcttcttcttcagcctcccgagtagctgggcatgcgccaccatgcccagctaatttttgtatttttagtagcaacggggttttgctatgttgaccaggctggtcatgagctcctgacctcaggtgatccgcctgccttggcctcccaaagtgttagaattacaggcatgagccaccgtgcccagcccctagggcctcttttataagggtactaatcctatccgtgtgggctctgccctcatgctctaaccacctcccaaagacctcacctcttaatattatcacattggtgattaggtttcaacatatgaattttagggggacacaaacattcagaccgtagcacctattttggacattttgtgactagaatcttaaaatatatggtgttttgtggctttcacttagcataatgctttcaaggttcatcttgtagcatgtataagtactttattcctttttattacctgctaatattccattgtatgtataccaccttatatttatccacttatcagttgatgaacattgggttgttttcactctgaatattatgaataatgctgccatggacatttctgtataagtttttatctagacaaaagttttcatgctcttgagtataaacctaggagtggaatttctgggtcatagagtgactccgtttaaccttttagtgaactgtcagactgttttccaaagcagctgcaacattttatatttttgtctgctgtgtggcagtttatgtcaggattctccagaaaaacagtaggctatagatagagaaatagataatagatatatatakagagagatatatgagaggaaatttgttaggggaattggctgacgcgattatggaggctgagaagtcccacgatagactgtctgcaggctggagaacctaccaagctggtagcattacttagtgtaagtccaaagacctgagaatcgggagtccatggtgtaattctcagtgtgagtctgaaggcctgagaaccttggtgggagagggatggggggagggtgatgggagagtggctgctggtgcaagtcctggaatccgaaggccatatcctgaaattcttatatacaagggcagaaggtgtcctagctccagaagggagataatttgactttcccctgccttgactttgttctgccctagcctcagctattggataatgcctgctcacattggatgagggtggatcttcctttctgtgtctactgattcaaatgccattctctcctggaaacaccctcagagacatacccagaaataatcctttactagctatctgggtattattagtctggtcaagttcgtacctgaaattagccatcacaatttctccacatccttttctgcacttgtctttttttttttttttttttttcctgagacagagtctctgtcgcccaggctggactgcagtggtgctatctcagctcactgcaacctccacctccccagttcaaacgattctcccacctcagcctcccaagtagctgggattacaggcatgcgccaccacactggctaatttttgtacttttagtagagttgaagttttcccacgttggtcaggctggcctcgaactcctgatctcaggtgatctgcctgccttggcctctcaaagtgctgggattacaggcatgagctaccacgcctgacccacttgtctttttgattatagccatcagagtagctgtgaagtgggatctcattttggctatgatttgcatttccctaatgactggttatgtgcattttttcatgtgcttattggccatttctgtattttctttggagaaatgtctgttcaggtcttttttgcccttttttttttttttttttgaggcggagtctcgcactgttccccgggctggagtgcagtggtgtgatctcagctcactgcaacctccacctcctgggttcaagcaattctcctgcctcagcctcctgagtagctgggatttcaggcgcctgccaccatgcccagctaattcttttgcccattttaaaattggattatttttcttttttattgagttttaagagttttttttttttaagtctagagatgtttcttatcaatatgatttgcgattattttctgccattctgtagattatctttttacactttcttaatggtgttctttgaagcaccaaaacctttaattttgaggcttaatttatttcttcttttgtcacttttgtttttggtgtcatctaaaaaactgttggcctcattcaatacatatcacaaagatttgtgtaattacctatgttttcttataaaagttttgtagtttttgctcttatttatgtctttgtttcattttgagataatttttgtatcttttctaaggtgggtttaatctgacttagggttttttaacagactggctcttagatttggatgattgttggccttgttattgaccatggcagagcttgaccatgagtgcccctgaaggctgagggtaacagttgctcattgtggtagtatctttttgtatcagttttgtatctttagtgtcagtttgtggagagaggtggtagtttaaaaaactcactaataggtgttttgttttgcttgtttttattgtggtaaaatgtacatgcagtgaagtgcatagatctttaagtatgtagttgagttttgacatatatatgtactcatgtaaccatcaccccaatcaagatatagaacatttctgtcactcacaacattcccttgaacaataaatagaatcagaagcactctggatttaacaaagttgtttttaaaaaatgcaaacttggtattggtgcagtatttttaagttaaaacttttttcagttattaagaaaatctctgtcggtttgtctgttaggcatattatcttgcctaaggtggtacatcttgggttaaccacgtctggctctctagaggttaatagtgcttctcagtggtttcttttctctgatgtctttccttcattagttaccctcttattaaaaagaaaaaaataagtgtgcgtttgtattttaatgtctaaagccaaagaatcagtgtaatgtttatcataaagacaaagtcaccgagagatgaccataattatagacatttggtacagttttacttacattcttatgtatttctgttagcaaaggcagaatcaaaatatgttattaatatttattgtatatatttatggggtacaatgtgatgttttgacaaagtatgttaataattaagagcctgctatggatgctttgatattagtttttttttttttttttttttttttgagacggagttttgctattgttgcccagggcggaatgcaatggcatgatctcggctcaccacaacctctgcatcccgggttcaagcgattctcctgcttcagcctcccaagtagctgggattacaggcgtgtgccaccatgcccggctaattttgtatttttagtasagacagggtttctccatgttggtcaggctggtctcaaactcccaaccttaggtgatctgccctccttggcttcccaaagtgctggggttacaggcgtgagccactgctcctggcttgwtattagttttttaaatgttacttaagctggtggtagaaacatcttcacaaaggcatatgatgatactaatttttaaaattgtactgtggcatttcagttagctattgccacggtaatggtaattaacaatcacaaaatgtaagtggcatacaaacataagcacttattttttgttcgtgagtttgtgggtcagctgacattgctcagctccacttgatcttgtccttttcctgagactagtacactcatgatgttctcatggtggcagaagtctaagaggcaagtagaaacattaagactgcttaaagcagcagggcctggtggctcacacctgcaatcccagcactttgggaggctgaggtgggtatatcacttgagctcaggagtttagaacagcctgggcaacatgaggaaatcctgtctctactaaaaatacagaacattagccaggcatggtggtgcatgcatgggtggtcccagccacctgggagactgagctgggaggattgcttgagcctgggaagcagaggttgcagtgagctgaggtcgcaccaccgcactccaacctgggtgacagagtgagaccctgtctgaaaaaaaataaaaataaatgaagactgattaagacttggtgtactatgacttctgccctcattatattggccaaagcaagtcttgtgcttgagcccagtgacaaaggtgaggaagtatgttctatctataataggacaagctgcagacttaagtgataaaatcatggatacagggaatgatgaagaattagggccaacgatgttatatatggaaaattgaaaacatttgcataagtacagtgaagaatataatgatccctcaggtccctatccagttcagcagttatcaacatgtgaccagtctttcattcatgtttatgtagtgcatcacagtaagagagttacatatgtctggttgtctgtttttgtatgttaagctgcattagttgattcagatgttaccagcttatccgtcattatcaggtttctcattaaccttttacttaatggttttaatagccaccgttcagtgcttatcaaacatctgcaatgaagaccatttaaaaaacatttccagtactgaggactgctacttttgtaaaatacagtaaatttctagacaaatgaaaatttaaaatccaatatattttaaaagcccccaatttttattatagatgcaacagaaataaaattactttgtcaacttgttatgcaaatttatggatgcttatataaaacttatggattctttttttgtcatgaactggtaacagtttgcttaaaaacgttccttcactaactatgtggttaccctggtaaagtcagaatacatgcttgattcattctcattattaatactattttaccaattttgtaaatagttttttcagattttattcattatttccaatggtgcaattaatgtatgctgtataatagaaagggtcgtatgtagaaaagagactgggtttatgaagtacagaaacatcttgaaaaatagaccacatactaccacatactaaatacttgtgaaattgtgacactctattacttgaagtttaattttttttctttttctgtttgagacagagtctcactctgtcgcccaggctggagtgcagtggcactatctcagctcactgcagcttctgcctcctaggttcaagccattctcatgcctcaggctcccgagtaactaaaactgtaggtgtgcgccaccacgcctagctaattttttttgtatttttagtagagatggggtttcaccatgttgcccaggctggtctcaaactcctgagctcaagtgatccactcgcctcagtcttccaaagtgctaggattacaggcatgagccactgtgcctagcctaatttatttcttaaggaaaaaaaatgtataaatgtgttaatattttaggaatagtgatcacgtgataatcaaaattgagagtgttcacaaattcagtatatttagaaaaatacagccctttgattatctttcatctcttcataaaaactgtctcgtattttaaggtcatctttattagtacattgatagtatggggagacaaactgaagagaaygagtcagagtttgggtatccatctgtattgttttcatttcttcgcttctttgcaagatgcctttggttcttcatgcaaacaggctatacatgtgcacatacttaaaatcaccttcaaaagtaatttttgttaaaatactagatctcagtctcctcaggaatgcagagtgagtcaagacaactaaaggtgaatgtaagaaaaaacccaaggagtttaacagaacaactaatcagactgaacatagttcagaacttttccttctaatattttgatagtttgacaacagtttttactgaatgtttacccttttcaaaattgtgtatgttgccagctttaggaaacaagcaggttgattcgggctgattgatactggtttaaacctacgcaaagataaccttgttcctcagttggctaatgcttgttattgaatagaaaaactagctataataaagattttaatctttattatattaataatatattaatattaaaaggatttaaatatcatgaggcaggctgggcatggtggttaacacctgtaatcccagcactttgggaggctgaggcgggtggatcacctgaggtcaggagttcaagaccaacctggccaacatggtgaaaccccgtctctactaaaaatacaaaaattagctgggcatggtggtgcactcctgtaatcccagctacttgggaggttgaggcaggacaatcacttgaacctgggaggcrgaggttgcagtgagccaagatcgcaccactgcactccaccctgggcaacagagcgagactctgcctccagaaaaaaaaaaaaaagaaaaaaaaatcacgaggcaaagaacagtatactttcattttagtcaacagtgccaacttttcgtagttatttgagaactggtcacatacgtatattgtgtcaacaaaatagtattgccttaactttctggaaagacaagtcttaggataattgaaactcgaggggaaaattggcgttgwtttcaaaggttaaaaaatcagattagaaattgtggccctggaccaactttaaatttcccctcaaattagaagaaaaagataataragaattgttctattttcttacccctagtgttcataatgtgcagattacatacagtagaactgtattcagtttacctgagaagatagaattcatcaacccaattccatgattagggtatgtgtatggggttctggctgtctttaggtgggtgctagaactggtaactaagttgaagctaaattgctttttagttcattgatttagatagtacattcagctgttcattatattctgggaaggtgcccacatgaacttgaaaggagctattggccccttgtagatagggtagaagagagtctggactactttgaaaawctaagagatgtgtttggttagcaaaagaagatgaagctgcagtcagaggtacaaactggttcagttaaggaggaaaaataattgaatttgaaacaatatacgtaacacgtagaaactaaatagtctttaatgaatacctactagcttgaaatctcattagggaaaagagttttttcaatgtatgaagttattaaccaagagcagtgaaaagctgacataacatatgtcagtagagacttgtatttcccaaatctatcgaacattgaaaacttaaacatagtaatttattgaaggcaytcccatagaatcctatctgttgtgtactcagattaaaggaggtagtgaaaatgaactcagatgaattaagtgattgaaatttttgtttatatttaatatctacacatttgttaatataagactaatggaacaaaagttagtgatcataatttaggcaacatgaaacagttggtaattggtaaacattgtttatatgaccaaatgtagatctaatattgtacattattgcatcagggtatgtcttgtgacttccagatttttctcaggtataaacacagttttctaaaggcattttatacatttgttacctaaaatgaacaactgtgtaactgtcagctatacctagaattttttatcagaagtattttagattttggatttyggagtatttgtattatacttactgtttgagtgccactaatccaaaaatccaaaatgtttcagatttttggattaaggatgtttaacctgtatatagaaagagacttatttagacaaacttgaaagactcatgtactacttacacatagggttttgttttgttttgttctatgttttgagagaatctcgctctgtcacagcccaggctggagtgcagtggcatgatcttggctcactgcagcttccgcctcatgggttcaagtgattctagtgcctcagcctccggtgtagctgggattacagacatgtgctaccatgcctggctaatttttctatttttagtagagatgaggttttgccacgttgcccaggctggtctcaaactcctggcctcaagtgatcctcccatctcagcctcccaaagtgctgggattacaggtgtgagctatggcgctcagccttcagttggtttttaaatgttttgctgactaaaatattaagggattgcacttgtccattcataattgtaggaataataagttgctacacttttctagggatcttactcaactgttcacagaatacatagagaaatggcaaacttggtgagttatataaaaatctagcatgtctggctgagtgcggtagctcacacctgtaatcccagcactttgggaggccgaggcgggtggatcatgaggtcaggtgtttgagaccagcccagccaacatagtgaaaccccgtctctactaaaaatatgaaaaattagccgggcgtggtggcaggtgcctgtaatcccagctcatcggaaggctgaggcaagagaattgcagtgagctgagaggttgcagtgagctgagatcgcgccactgcactctagcccgggnnnnnnnnnnnnnnnnnnnncactctagcccgggctacagtacaagagtccatctcaaaaaaaaaaaaaaaaaaatctagcatgtctattcctgatgactttttttttttttttttttgacacagagtcttgctctgtcacccaggctggagtgcagtgatgtgatctccactcactgggtttcatcatgttagccaggttggtctcgatctcctgaccttgtgatccacccgcctcagcctcccaaagtgctgggattacaggcgtgagccaccgtgcccggcctcctgatgacttagctgggctcacctctgtttcttcccttgaagccttgggatgtcttcctgttctatgagaaattccttgagacacactgggaatccctttcccttaaggaaaagcttttctgmaactttatgtgactcaatatgaattaacataatattaacaatggcaatgatagttgtgtcattggactagtggaattttaagatattaatatttaagatatattgtaatttcagagatgcgtggcttctttcacttggcaagtttgaaatgattcatttatgttttggggatttttcagccagaaaggacagcataccactctggagcaatagagaattttaaaagagcagtttggctaaagagtaggccaggttcttataggtcttgggaaatattttgagctttattgaacagtctaaggggaagtcactgtaaggttttgagcaaaggaagatttgaatctgattttttttttctttcttttaagcacactggcatgttatccaaactcagtatcaccagtaatggaacaaaatgacattgtgtctttgcattgtatcatatcaagaggaggcatgataacattaccaatgtaaatttcttgtcaaatgtttatctagaatctgatcatgatacaacaaagagatccagtgtgggacattctacaaaaagctggtctgatctttaaaaaaggtcaatgccataaaagactataaaaaggtgaggaggtgaatagttgaaggagacaatgtatgacaatgtgtgtactgtgtgtgtggtccttgatagattatggaattttttaaaaaccataaacaccttgtttttgacaattggggaaacttatatgtagataattatcaatgttaactttcttggatgtgataatgatattgtagttacataggagattgtccctgtttgtaggagatgcatgctgaaaaggttttgggggagtgaaaggtatacagtttaagtcgttcaggtggaaaaagtgtatgtagatggaaataaagcaaatacagcaaaatgttactgatcattgatatagatgaagagtggtgtttattgtaccaaactttcaacttttctttaggttaaaaaatttaaaaataaaaagggatagggtagaacaacagaactacagagtcttactttttgatttaacattttagtttaggttccaacttcattcagtgttatgtgagatgatggcctcttatgaaaaacctcagtaaaattgaccaacattcctttattttaattattaaaaattttttttaagagatagggtcttgctgcattgcccagactagtctccaattcctgggctcaagtaatcccccctccttagcctaaaaaattatgtgtgcttttaatctaaaatacccaaaggctttttttttttttttttaatccagtaattttgttggagtatgttttagggttggtcgttctgagttcatagactaattttgattcatgttctctcttgccttgtgtaattttaaaagtatcttttagctactatagaaatagtacattctagttttgagctgaggatgtctttcttgcttattctcatagagacatcattctgttctttattccctctattttttatttttatttttttgagacaggatctcactctgtcacccaggctggagtgcagtggcatgattatgactcactgtggcctcaacctcctgggctcctctcacctctgcctcccgagtagctaggaccacaggcacgtgcacccactcccagctaatttttttttttttttttgagatggagtttcactcttattcaggctggggtgcaatggtgtgatctcagctcgctgcaaccttcacctccaaggtttgagcaattctcctgcctcagcctcccaagtagctgggatcacaggcatgcaccaccacacccagataattttgtatttttagtagaaatggggttttaccaygttagccaggctggtctcgaactcctgacctcagatgcttcaccctctttggcctcccaaagtgctgggattacaggtgtgagccacggcacctggcctaatttttgtattttttgtagagacaggatttctttatgttacccaggctggtctcgaactcatgggctcaagcgatctgcctccctccactaccgcctcccaaagtgctggtattacaggctttagtcacagggacctggcctcccttttttttacttttagtaactttgtatgggatttaacttctrtactttgtttcctttttatgtgaatttagttttcctcaacttttagaaggaagctagtcaagataacgtttctaacttcatacaacttcctcttctgttaaaaaattatggcacttgtttcctaagaattcctggctctgtccctgtgccccatgttagtctgttccttctccctttttcctgtcctgttagttttggtcatctcccagcagtggctcttcatagcaggccctctcctggaaaggatctctgactggttagtgtcaagggttcatgggggttaaactctcctggcccctttatgtcttaccttgggttccctgccacttgtgtactattggtgtgggcaaacctcctcctagcgcgctgcggttctctaattgggtgctgtgccttctgggtcgtacctcttgggtgttgggaattctcctgttttcaggtcctttaataaggctggattgcttcccacgtaggtgctgtagcactagggtttgtggctgtggtagtttgtcaccaccaacttgtattttggggttcttgtaaatgtctttgctatctagttgttcagtaattatgtgggatccaagaaaatcacaaaacatttccataaacatttccatctccacttttccagaatctgctagatcttcttaccctattcttaaagagtttgctgtatatggtttaattttttccttaatattttttcttgatatcttaaaatatatctatgaatattgcttattttattatgatgcactcagggcagtgagggatattcaccttaagtctttaggcatttgtctttttaatagctttatgtaaatagatatggtagatttttctatcttgtgatgctgaattttatttgtctctgcattgatgtgactaagtttcttttttctcattaggatggtttttctaatatctcgaatctaattatcaaactttacaactgtgtgtgaagtgtgagcaaataaattccaggttttgagggagaggaactttgcttttactagtgggagcctttttgttttctcctgaattgtcaaagctgtgacagttgctgcataggcaaggtcatacccacagtagaaggaaatagggcaaggattcagtttcttcagtaatctcttgtgtcacagaattgaacatttattgctaaggaaacaggaaaattcttttaaaatacattttttgagtaaagattagtttacttaaataaatacaggcagtccttgctatgcaggataagtaaaacagctaaaaataataatgcaagctgaaaccatgcaaagcaattttaatagtcagtgggaaaattacaattgttttgtgatctttaaaaatttttgttaaatcactaaaaacttttgtcaattacaaaagtgtagggaaataaaaaaatagtaaaactactgtttactacagtataatttaaaatactaggaacattgagaattaaagtattttatttctttgtaaaaagcttatcaatagtagtttaaacagcacttctctgtgtcgtttctgtgccttggttgcttccaacattttatcctttgcagttttaatgtcatgaaatatctcctagagttgctttaatgtgaagtattttcctggagtcacttcctttgggacgttgccattctttccatcacaaccagtttcctcactgatgttggtaagttctgtggctgtatatctagaggctctcaaaccctgtcagccttgccacagtcagcattttcttctgtaactccatatattcaaatttcactccagcattatcacttttcatttctttgctgcattttcatctttgttggccagccccgtttggattatctgtatttgtaaaaagtcctttggggtttatcagtgtaagacaggcaacacactgcactctggctgtttgttgtccattgaccaatcaccaatagaatgaaagaagggaggtgattggtcactgatcctgatgttcatctgttatttacatggtggtttgtggactgaagagctggcaatgaagtttgtcctttatataattactcacagtaatgtatgataactgaaatttgagccatgttgttggggactggtaattaactaaaccttggtataaaccatggtaattgaaatttgtgcatattaggattatgcaaggcaggaactctgcctgtaatgtaaaaaagcatacttagatttggtaaaaatggtaaagataataatgggactgagtctgagaaatttatgcaataatgtagtgtttaaaaatattttttaaaaagttaagattaaggaattatagagaaaatccatgaaggggtgtgtgtatgtgtatacattaatactaagggtaaaggtctgaaaggacaaagttgtagtttgttctgtgatttcacttttctacggtrttgaatattcatatgaccagaaccttcatttctatgacctgagtaatttcttctggcaccggaytggctccctctcacaaatcctcctctgtagatgactgatttgtttgttactttttttttttttttttttgagatggagttttgctcttgttgcccaggctgaagtgcaatggcgtgatcttggctcacggcaacttccgcctcctgggttcaagtgattctcctgcctcagcctcccgagtagctgggattataggtgcccaccacaatgcctggctaattttgtgtttttagtagaggcagggtttttccatgttggtcaggctggtcttgaactcctgacctcaggtgatccacctgcctcggcctcccaaagtgctgcgattacagctgtgagccaccatgcctgaacgcttgttcgtttttgcagcagacggaatagtggtgttgtaggttaggcctgcatttattttttgcagataaatggagaagggaggaatggtggaaaagattacacaagtggctaaaggactgacttaaggtttttatctgcaaattttacaactagagggagaaaacctccctaaatatgtttattgtaaacatttaggacatattgaagagtataaagaaataaaaatataaaatcacttatagttccattacttagatgaactacttcatcactcttaatattttggtgtatggccagccatactcttccttttttatacatgcatacagacttttgcacttttatataagacacattgaagtggcattatactgtacatgcttcctataagtggatttccagggtacacacaaacttttaaagcgtttctttatgtaaaatttaaaatatacaaacaaacaaaaaagcaaacaaaaaaaacccccaggatagaaaccagacgagtacaatgaacttaatgtacctatcacccaacttcagtgatttcagtacacgggcagtcttgtttcatccatagccacctacttttgcattattttgaagcatcttccaggtaagtattttggtatatttcagttaaaaacttgacattttgccaaattaacctttcagaaaagtgttatccatgtatacctgacagcaatcagatttaaaaagtctttttatttttatttatttttgagacagaattttgctcttgttgcccaggctggagtgcaatggcatgatatcagctcactgcaacctccgcctccggggttcaagcgattctcctgcctcagcctccccagtagctgggattacagtgcccgccaccaygcccaactaattttttgtatttttagtagagacaggatttcaccatgttggccaggctggtcttgaactcgtgacctcaggtaatccacctgccttggcctcccaaagtgctgggattacaggcgtgagccaccgcgcccggcctaaaaggccttttaaaaatcttagtgttatgagttagatgcatatatatcattttcctcagataatacaaaaaaaatcctaacagtgaatttggccatgcttatactctagtgtcaaacttctagtttccccatcagtatatatccctcataaaaatgttgtgcctattgatagggtgaccraataacttattgtccaaactgggacacttkgagattgaaaggatgcactgttaataataatgcccatgtaataaacataaaccaggactatattttggcgcagctggattgtgtgctcatcctaccattagatcaygcatgtaagatatatatacacatgatcactatattacatagtcaataagtggtaagatttattaagtttaagtgtttaatatatgcccatgcatggatatatattaaaatcttccctttaaaaggggtattttgaattggtaactcagaaagtcctaagttttcattcctatgtgtttttggagctgacagtgatcattartttttttttaagtactgtagctttaattttcrtaattaagactttgtatttgtattgatatttgcagctggagaatgctggaggagaccttaaggatggccaccaccactatgaaggagctgttgtcattctggatgctggtgctcagtacgggaaagtcatagaccgaagagtgagggaactgttcgtgcagtctgaaattttccccttggaaacaccagcatttgctataaaggaacaaggattccggtagacttttcactaatcttttcatgaggagattgaacttagattgtggaatattttattattaatttkcttgagcactgaatttttctacgaaaataagatatggaatggttttatgagaaatttcccatggctctgatttggggagaaaaaggaaaaatttaagctttcagtttaaaaagattaattttaattgtacagttaaaagaacttatcatttgagtattttatgttttataggatttgtgggtcagagttagatgtagctgttgtggccattcattcatttacttaaaagcatttcatcaaaggaaagtaggaagttggctagaatactccaaagagaagaaatctgtgtacaataagtgtttttgcttcctatcccaatagactagtttctaaagtatggagatttcttaaatctaatatatgggctaattttgacagcttgtacccttagaactagtcaaaataacagccagcttatgtagtttcttcctttaacaactatttttggttaatgtcatgctttctttttttttgaggcggagtctcacttggttacccaggctgaagtgcagcggcacgattttggctcactgcaacctccacctcccaggttcaggtgatgctcctgcctcagcctctcgagtagctggaastacaggcggatgccaccacacctggctaatttttgtatttttagtacagaacgggtttcaccatgttgtccaggctggtctcgaactcctgacttcaggtgatccacctacctaggtctcccatagtgctgggattaccggcgtgagccaccgtgcccggccagtgtcatgctttttaatgcttttttttttattgttgttttttcttagattaagactgttacgtagaagcaagcaactgtagtttatgtccttaattggctcttaaactctaatattagatgtactatgcttctcccaaaatttaaaattttatttttcttaaaagaattgtctktccagtgtgaaagtggttaaaagaacttttaaagacttcacagacatgtgtgcattatcctgtgttttgttggttctgaagtagagtgaattagaaattataaaaggcgggcttaaatttaactctgctctagtgttaggatacagataacaaatgactcttttaaactatggaattttagagtaataagggacccttgagtttatctaattcagctgattttatttaccagcaagaactagttttttagagggatcaaaaaactctgtgataaatctgaatgcctctctgtcaaatcagagctccatcattcccctcacccaaaacaaacaaaaaatccccagcaaactaacagactaaacagatactagaataggatagctgaatacttggcaagagaaatctaatggtgtttcatgtcacttgatcataaacagtgtctaggttcagcttgtacctagaatttcccttatgtagtaggagaatagaaactatactgctgtggcttttattactgtaatcctttctgtagaaataactatttgaccaccccttttctagaacattttgtgacatgagagacatcttaacctacctatttttattttttttttattatttttttgagatggagtctcactctgtcgctcaggctggaatgcagtggtgcgatcttggctcactgcagcctctgcctcgcaggttcaacctggcagattctcctgcctcagcctccggagtagctgggattacaggcatgtgctgccatgcctggttaatttttttatttttaggagagatgaggtttcgccatgttggccagtctggtcttgaactcctgagctaaggtaatctgcccgtttcagcctcccaaagtgctgggattacaggcttgagccacccytcgcggcccacctatttttagaagcttgatctgcctgatacataaaattggtatttggaatgaattacggcttattgggccttgtgattgcaggttactttcagaatagcaggatagaaatggaaggctcaaagagtgattagcttttaaagatttgttgaaataagactttcttaattggtttaagtactacttgagttttatccttaactaagtccatgacttttttgtttttttaatagcactaagaatcttatatcctagagttctttagcagattaaggggtactgggcagtcccatggtggttatcctttgtgaaactaaatataatataatagaatctagaggtcttgattattcagtatgtgttttatagaattttagcttctgttttttttgtttttgtttttgttttttttttttgagacggagtctcgctctgtcacccaggctggagtgcagtggtgtgatctctgctcactgcaagctccgcctcccaggttcacaccattctcctgcctcagcctcctaagtggctgggactacaggtgcccaccaccatgcccggctaattttttgtatttttagtagaracagggttttgccatgttagccaggatggtctcgatctcctgacctcgtgatccacgcacctcggcctcccaaagtgctgggattacaggtgtgagccaccatgcctggcgttagcttctgtatttttaaggagttaggttatagatctacccttaggggtaaccccatccccctttagaattgttatcttaaatatcatttttatcatctgagtagcttgtcttccatctctcttttgcaggacacacactaacaaatgtttaccacatctcaggttgcccatacaaagttcaaaaggtgcttttgagctcattgaagttgctgtttttttaaaaaatgatctagcttgctgagtattttttttttctctcactgttttggtttttatttttttaaattttttgtagacatggggttttgccacattgcccaggctggtctcgagctcctgggctcaagcaatctgcccgtctctgtttcccaaagtgctgtgattacaggtttgagcatccatgcccagccttactgagatttttttttttttttttttttttatataaatttgacttatgttgtattgttcttctggatgtattataaatctagcaatatactttgtatatttttatatgacagggaatcactatttaaaaagtgtgttgcagtccaaatttgtaagtaagtttttattagattttacaatgcctttttctttgaaatacagataartcagatttatctgcaaactcaaagtgagttagagagtaccttaaattgaataaagggcctaagtataccttcattgtgtgagtgggcatgtgtggcaaactggagagcatgtgcagcttgaaggtgcaagccactttatgattccaattggttgtagttatgcaggagtgaaggcccagtgtttccagatttttttttccctgaagaaattccagaaatctgaatttttgtgaaattcttgatattaaaatgtttaagtttttttgagtgaatactcatggccagtgtagatgtattagtggccaggagaggaacataggcctcagtttgcagttttcccttattatagtagtttgactcccaagttaacccatgctctgcaaattataagatagctaaattatactactgacctgatttctgagagcagggcatgtgggggcagaagtgttactagctccctttcctgggctcagggaaaattgttggggatggtggatgctgtaaacaggcaaagttgggtaatgtatactttctattctgccgtcttttgttgtagagtattttgctctgagccatccagggccttcataataccttcagttgttgttctttgacctgctaggctctgagaagacctgtattttcaccatctctagaattcttacgtacttcttccattgataaggaaacaagtaaaacaaatccatgctaagtatcacagatagaaacattggtattatctatttggaagtttgtgyttattaacaagtaaatgctgaattgatagacttctaaacattgcagtaaagtacagtaaaaataattaaaccacgtaggatgacaattcgctgtgatataattagaatttgctacattctaccaaaaacaacgcaatttctggatctgtgttgtttccctcagtggtacaagggagagagggcatagaccttgtataaaaattaacagagattcttcactgattgttccttaaatcacagtgctattatcatctctggaggacctaattctgtgtatgctgaagatgctccctggtttgatccagcaatattcactattggcaagcctgttcttggaatttgctatggtatgcaggtatgtcagcaaatttgttttgaaagcttacttatattttattctgtttgtgagtcatactgtattagtattttctctctttaggatatttaggatacttagttggatgagataacttgtgcatgttacaactatgtgaattgccacactagtatggcagaactggcctgatagggaatctattttcaaagtagtaagtacactgtttcatgtaacaaaacactatccatttaaaaaaaccttggacatgcaaatttacataaaattttcagaaatagtacatagagctcctgtatacctttacccagtactccagttgttgacatttttgaaccatttgaaagttgcacacgtgatgccctgttacttatatttcctaaatattaggacactcttactgcataaccacagtacaactatccaggtcagaaaagttaacatttactcattgttagaatctaatccacagactccttcacatttcacagtttgtctcattaatatcccttataggccacagatcagtcaggactatgtgttgtttttagttgttgtttctttagactctttcagtctgaaatagttcctcagtgtttccttctctttcatgagcttgaaagtatttttaaaaagtacgtgttaattattttgtagaacatttcccaactttggtttctgtgatgattcctcattgttagattcaggttatgaacttttggcaggagtatcacagaattggtgctgtgcttctcagagcatcttatcaggaggcacacggtgtggatttgtggcatgacaggtgatgttaacttggattatttgggtaagatggtatctgtcgggtgtctccattgtaacattaattaataagtatatgtgccttggttttatatcaaaagtaagaataggccaggcgtggtggctcatgtctgtaatcttagcactttgggaggccgaggcgggtggatcacctgaagtcaggagttcgagaccagcctgaccaacatggggaaaccctgtctctattaaaaataacaaaagtttggccaggcgcagtggctcacgcctgtgatcccagcactttgggaggccgaggcgggtggatcacctgaggtcgggagttcgagaccagcctgaccaacatggagaaacccccgtctctactaaaaatacaaaattagctgggcgtggtggcgcatgactgtaatcccagctccttgggaggctgaggcaggagaatcacttaaacctgggaggcggaggttgcggtgagtggagatcatgccgttgcactccagcctcagtgacaagagcaaaactccttctcaaaaaaaaaaagtaagaataagtagggacttactgagatcttgagataagatactcttcttttcttttttttttttcaattactttgtttttagaggggttttaggttcacagcaaaattaagaaggtatagaaatatcttatatacctccaacctctacacatgcatagcttcttccattatcaacatcccacaccagagtgatacatttgatataactgatgaacctacatcaacacatcattattcccaaagtccttagtttagattagtgttcattcttgatttttgtacattctattgttttggacaaatgtataatgacatatatctaccattgtagtattatacattttcgactgcccaatcctttgtgctttacctgttcatcccccatatcctggcaaccactgatatttttttatcgtctttatagttttgcctttttcagcatgtcatgtaggtggaatcatacagtatgtagccttttcagattggcttctttcacttagtaatgtgcatttaaagttcttccatgtcttttcagtctgggtagctaatttctttttagcactgaataatattccattgtatggaggtatcacagttcattcactcattcagtaagtgacagtttacttattcatctactaacgtcttggtgacttccaagttttggtaattatgaataaaggtgctatgaacatccatgtacaggtttttgtgtggacataaatgttcaactttttcagtatattctaaggagagtaattactaagttgttaagagtatgtttagttttgtaagaaactgccaaaactgtgttccaaagtgggtgtacaattttgcattttacagtaaaagcctcttctttcctttcaaagttctttgaaaagtgtttgattatgagtttgacttggcaaaaagaaagatttttttccatctagtagtcttagaagagcctgcaccctgattgagttgaatattggatattggctggcttcttttttttttttgtcccaaggtgtaatatatttatataatttattgattttctttgtcagagtactcagtgttaatcatatagcacaacttatagttatattaaatggttgttagtatattgagaggctttgtaacatttcctaaggaagaatctcacaagatatatttttaaggcctacttatagtgaaatacgtctgaaaaatgctcctttaatttaagagataatggcttagtgtttccccattatgtcagtttcctgatataattataaggccaaattgttctgtcattcactaggatgttttatagccaaagccaggcctgctgatgttaaatgcataacaatttttgcctttattatcagctgaacttttgtagtaagataatgggatatgctgatcttggttatttgggcagaatttgtccttccataaaataatgatatagatgatgccgtctagctaacgtgtgtttgtaaaggactgccacttagtgactaggttgggtaattttaggacctaagtgtatacctttgccccccatgacattctgaaatttgagcaatttcagtgtcttatataccatcttttcccactaactggactctcctgtcagaggctttctaattgcttcctggtgattctttgctttagaagaaaaatgtctatactgctccctttatatctcttaactgatttacatcccccagcctaaaaaatagaatattggtagagcttttgaaactttgtatgtctccattcacattcttctcttcctatcagaggtgaccaactttcctgaattttgttattcattccctttcttttttttatggctttatgcatatgtttatattcctaaataatatattagttttgccgattgacctatatataagtgaagtcatactacctgtattattttcaactttggttttgagattcattcatgttagtacattttattgtaaattattcattttcactattgaatttgtttgaatatagcatgttacttttacattccagtgttcataatgttggctttctagtttctttctattatagacaatattgccatgaatatttttttacttgttttctggtgttatacatacacaaaattttctctagggtaactggccgtaggaatgctgggtcataatgtacattttcagcttcactaggtaaatgatattttttccctcagtttatgttcccacagcaatatataaaaaatcttctgctctatatccctgccaacccttgacatgattagattttttttttttgtattttcttatctgcaaaggtattaaatgggggtcacgttgtagtcttaaagttaattttccttgttattgtaagattcatacgtttatttgccatttgtgtttactatagacacttgttcatttttatattaaattgtctttgttattgtgttgtgggagcctttatatattctggatactaaacttttcccaactatatatattgcagataccttctggattgtgacttgtctcttcactctttatggtttcacttggcttctttatatactcccacaagattttgtcaaattatttttattgggcagaatttccttccctttctcccttcccaatctaaaacttataaaactttgacatataagaaagataagaggagatgatctgattaggtggtagacctggagtactatatggctttctttgaggcagttagaaccttggggtttatccaggaatccatactggccacatactttgctagggcccttgggctgtgaagagacctgaagacatggaggagagaacatagtctattttgataatcactttagtttgaatggactggagtaggaaatgagggggaaggtgaatccaaaaattagacaagggccaagtaaggaagtcttgtgtttaatataaggaacttggattttatcctgtagaccaggcatcagtaagctatggcctatagaccaaatctggcctaccacctgtttttgcatgacctgcaagcaaagaatgattttttacattgttaaatgattgggaaattgaataaaaattatattttgtgatgtgtgaaaaataaaattcaagtctgtgtccatgataaggttttattgcaacagtcacacccatttctttgtaagtattgtctatggatgcttttgagctgcagtggcaagagctaaatagttgctacagacacagtagggcctgcagaggccaatatttttctctggccctttaagaaaatttaccaacccttgctgtagatgctagagggctaatgaagaatttaatcatagactaacacaatcatctttatattgtagtagctaacattggtaggtctctagaatattgctggaagatgggcaagactagagtcaagggaaatgattagactgtagcaatgtttcttaaattgcatattagttaatgtgctacagaagagagttttgtttttgagtctttagtttgacaaatactgtgttaaacaagtgctagcaggtgtctttactgctggagtgagttcaaacctttattgtgggacagtttactgtgaatgcctaagaggagaatgtagagggcaccatttgctaatggttttgaagaatatgctactctgagttataagaatgaacatttatttaagtcatctgtcttattttctgtcaggggatgggtcaacctgcattacacattgttaaggcagatatcttctgatatctgttgtggaacagatgcactaagatgagtgggagtgtttatatcactgcagatctratgtttgcaaaaatcttctgtatatttatctgatatgggaagtttggagcatgtaaatgataaataagaaaagaagattgattaacagtggaggtgctgaattgaagagaccatttgaaatcagtcgataagcgtatgggacttgaacagatgagcttaactgaaaggccagattttcttgcttatcccatctctatagcacagccttcggcaggctttcagactgttcctttggagccaaagactaaatagcttggaaaaatgtattgtctaattcttgttctggtacaaggttcttgttgtctgctgtatctttttctaaactcagaataccttttaaaatgcttttaaatcaaactcaggtgtaagtaattaagatatctctatttttaagcagatgaattcattaaagtacactaagtggaaaatctgccagtgtttgacagaaattaactgcaggtcaaattttgaatccaattttgttttataacaatgcctgttaataactgtatagttatatataacaataccaaatggtctacatttattaaactccttttattttggggatacaggtatatcaggtattctgaaaagaaataatataaattattaaatcagtataacaaaatgggtatttttcttttgatttctattaacattaatttttttctttgaacagatgatgaataaggtatttggaggtactgtgcacaaaaaaagtgtcagagaagatggagttttcaacattagtgtggataatacatgttcattattcaggtattacatttttagatgaataagaacaatagtaattaactaatttaaagttgatactattatttttaacaattggagattctataattcataaacaaaattaagggtatagtagtgaccacaagtgtaattgtcatatttgccttccagttgagtgtcaagacagtgtgggttggtggtgatgttaatagggaataaggaaggtatttaagaaatttgaaaacgcctgtgcagttgtggaaccctacttggaatcgtatattgtgataccaacatttgtattttcccttttcactctttgatctgtttttaaagattattatttttctttttcttttttttttttcgagacggagtctccctctgccacctgggctggagtgcagtggcaccatctcagctcactgcaacgtccgcctcctgggttcaagcgattcttctgcctcagcctcccgagtagctgggactacaggcatgaaccaccacgcccggctaatttttgtatttttagtagagacagggtgtcactatattggccagattagtctcaaactcctagacctcgtgatctgtccacctcggcctcccaaagtgctgggattacaggtgtgagccactgcaccctgccgaagattattatttttcaaaggaagattaataaaaaagccaaggttgctcaaaataattttttaaactgaagttactcattgtcaaaatgagtttgaaatccagtgcttgttcagcttcataatggagaggtgttgacacttacattcatccttatttcatgtgactcatcttgagaaacatttcaggaatcttgtatgtgatataccagaagaagctttaaacataaagatttggttaagatttgacatttttctgtctttctagttctaaaattctgggactctatcacaacctatactattcctaaacaacaatgtcaacaacaaaccccaaaatatctttttgacattaatgtactttatcttcttgctttatttttaatttacatttttattccttagtattatttattatttattttgtaatttaatttaattttttttttgagacggagtctcactctgtcgcacgcccaggctggagtgcagtggcaagatctcgactcactgcaacctccacctcccgggttcaagtgattctcccacctcagtctcccaagtaagtgggattacaggcaaaattttttgtgtttttagtagagacggagtttcaccatattggccaggctggtcttgaactcccgatctcaggtgatctgcctcggcctccgaaagtgctgggattacaggcatgagccaccgcgcctggccgttccttattattatttaatatcgagttcttagtcagattttccataacgtaaacagtatatttttatggttgatttgtttgaatcagggtccagagaaagtgtacacattacatttgattaatgttacttaagtctcttaagtaacacttacttaactaagtttcattaatttgtttggcactagaggtccacattggtactgggttgtaattgtttctaggactttcagataacagagttgggcagtacctagtcttttagaattgggaaacagaatcattagtgtatacttatttccagttaaaatgaaagattatagggtttttacctaactcttttgattttgtatctccctactcttaagctgaaaatgttgattactaattatttgttttaacctacagtatgcctgtatctatattgtacttacagttacaggataacagtttcagtactaagtcctattactacttacataagactaccgaatgaagtgttaaggtctttgaaatacctctgttcttaacataaatctcaacagatatataatgttgaaattattgttctgtaatctcttgaaattattcctgtgtgtctggttatactaccaacttcatatatttatttgttctagtttccttccaatttttatggattgccttttttaaggtctaaggttttttattggctttatttgtaatggacataatatttgaattctagcagtattccattgtcactttttttttttctgtttttctaatcatgtatggcaagcttgtgtttctaaaacaaaagaacccatgaatcatgtttttaattaagatatttgtgtgtttnnnnnnnnnnnnnnnnnnnntaggggccttcagaaggaagaagttgttttgcttacacatggagatagtgtagacaaagtagctgatggattcaaggttgtggcacgttctggaaacatagtagcaggtgaaaattctaaaaattttgcagagttcatttaaaaaactttatctgaagagtaagcatatgcttctgtatgaggtactctttgatttttcctttttcttctgatttttcttctcttttttttaaagataataatgaatgtaggattaactgttatgaagggaatttaataataggaggattatccagaagtctctcacttactggtttactggtttgctttgaaatacgttgaaaaatgttcatcctaatataagcttttcaaacataaaacactatacttttgtaactcaggaaaaatttgagaactcgctgtcttcatactatactatattcagagttacttgtcttttattcctttcttaggtgtacatagcccatagcacccaaataagtactcaagacatttccctgaaccagggttggcaaactgtgacttgtgggtcaaatctagtcttttgcctttttttaatgtccaggagctaagaatgatttttacattattaaagggttataataaaatacagggactgtgtatgttgcacagagcccraactatttactctctagtcctttgcagaaagtttgctgacccatgctcttaaaccattttgttctctaattttttgaggaaggggaattgactttctggctgtttggggttttgacttgcttacctgaataatgtaaatggtcactaatattcctggaagttagtaaaagaaaaaggtgggtttatcactaaagttctctttgagataccacacctaaataataagttgaaaaaaagatttgtcatggacatgctgaatttagtaatctgcctgctgttacttaacagacattagcataatgtatgctaatatgttagcataggaatgcccaagaatggttttatactaaaagttttttacttcataaaaaaagatcaacagtggtagataagcttgtgtatttttattcatccaacaaacattcgagtacctattatgtgtcatgcacagttctaggtgtcaaggatttagcaatgaataaaataggccaggtgcggtggctctyacctataattccagcaccttgggagactggaaagtggatagcttgaggccaggagttcaatccagcctgggcaccatagtgagaccccatctctacataaaaataattttaaaaaaattagccaggtgtggtgatgcacatttgcagtcctagctactcaggaggctgaggtgggagaatcatttggccctaagagatcatgactgcggtgagctgtggttgtgcccctacactccatcctgggcaacagagcaagaccctctctcctaagaagaaaacaaaacccaaaaccaatatagcaaaaatgcttgtttaacactggaaaaagggaaagtaaacaataaagaaatacagaatatgtcagaatcagatagtgtttacattgaaaaaatgggggaagagggtattctggaatatgtgtgattagggttgttgcaattttataggctattcagggaaggcattcctataagatgacattggacatgaagaaaataagtgctaacctttttggatatttggggaaagaggaaacagcagtacagagatcctgggtggggaccatatttgaggagcagcaggaatccatgtggttggagcagagtaagcatggtggggagagtgaaagaaggtgaaattagagaggtagttggatgccagaacacaggacctttgggccactgcaatactttggctttactcatagtgaggtggggttttaagtgaaggagagatgtgatctaatttaaggattaagctgtgatgaggagaaaagatacagggtgaaagagaagcaagaagacaagctaggaatttattgtagtaatcaggagagagacagcgttgtcaggatcaggatagtagtgatagatgcaggaggaagataaaggggagggtacctggagaatctcccaccagcctgcctactgggagaacagggtggggccacaggaagttctcaccctttgcaggagggaggagcctggcctttcctgttcctgtgtggtgacctcggattcaatctgtgagatgggggcctgttaacaggaagccttctcactttgctgagagtttttttccctttttctcaataaattccattcccccttacccttcaaagtgtctgcgtgcctaacttttcctggtcatgtgaaaagaacccggttttttctacagcagtagaagaggaagttgttaggaccagggtggcagagatagaagttgtcaggactagggtgatagaggtagacattgttaggagtgattggattccactgttttgaaggcagagacagaggatttgctgttagattgaatatggagtggggaagaaaaagtagaatcaagttttagctcccaagtttttttgcctgaggaaccaaaaggaagatgtttctatttacctgattggaaagacctcaggagtttgagtttgcatattaaattcaagatggtttattaaacatcaaaacaaaggtgctgagtaggcagttgtatatatgagcctggactttagaggagaaaactgggctggaggtataaatttgggggtttaccagcatacagacagaattttaaggtgatgagagtatgagatctcttagaatatttagaaaagagatttaagggctgaggactgagtaacttccatgtgtagaggtgggcaagatgaagaggaaccagcaaagagattcagaaggaatagacagtaaaataagtgaaccaagagagtggtatgctgagagccaaataaagtgtgaagtactgtggtatagtagaatgagtatgagtttgggagcctgtcaggcctgatttagttacttaattacctgagagttcatacaagtttcttgatatctcagagccataaaataggagtaacacatgcacatgtaaaatacctagcctaacatctattgccccataggtaatatttgccagaaacacatttgtcaagtagttgaatatatttttgtggttaatagtagtcaagaaagaaacagtatattstgacaagtctaatatatgagattcttttaatataagaacttggtagctgtacaatgcatttgaaagccatgtgcaactgagaaccaaaattgaattatcaatgcactagatagacaaggcaactgaagtaacttgggtggagaggtgagaatactgtgaaacaatctctatgtgggacttaatgtacgtcctatacctcattaattgctgtgtcaagaaagacctttataaagaaaggttatagcaatgtagtttttgtctttgttatgtatttcctattcctatagctaaaaatctactgagacataccagttttaacatttatagaggaagaaggctgggtgcagtggcgcacacctgtaatcccagcactttgggaggccgaggcaggaggattacttgagcccaggagttcaacaggcaacaagataaaaccccatctcttcaaaatatttaaaaattagctgagtgtggtggcatgcacnnnnnnnnnnnnnnnnnnnnctgaggtggaaggatcacttgagcccaggagtatcgaggactatagtgagctatgattacacctctgcactccagcctgggtgacagagcagtaaataccctgtctaaaaaataaaataaaataggccgggcgcagtggctcacgcctgtaatcccagcactttgggaggctgagatgggcggattacaaggtcaggagatcaagaccagcctggccaatatggtgaaaccctgtctctactaaaaatataaaagaaataagccgagcgtggtggcacgcacctgttgttccagctactcgggaggctgaggcagaagaatagtttggacatggaaggcagaggtgacaagtgagccaagatcgcaccgctgcactccagcctgggcaacagagcgagactccgtctcaaaacaaaacaaaacaaaaaacaaacaaacaaataaaattggctgggagcagtggctcatgcctgtaatcctagcactttgggaggctgaggcaggtggatcacttgaggccaggagtttgaggccaccaggccaacatagtgaaaccctatctctactagaaatacaaaaaatcagctgggcgtggtggcacacgcctgtaatgccagctacttgggagcctgaggcatgagaattgcttgaacccaggaggcagaggttgcagtgagccgagatcatgccactgcactccagcctgagcgacagagcaagactctgtctcaaaaaaaaaaaaaaaaaaaaaatgaaaccatagaggcagagattgtgagaaattaattgtggttattgcttgagtcttttcagcatgaaaaaattttaatttgtgactattttctctataaaggcatagcaaatgaatctaaaaagttatatggagcacagttccaccctgaagttggccttacagaaaatggaaaagtaatactgaagaatttcctttatgatatagctggatgcagtggaaccttcaccgtgcagaacagagaacttgagtgtattcgagagatcaaagagagagtaggcacrtcaaaagttttggtaagcaaattattatctggaagtctacaaatttatatcaataatattggaatccaggagttagagtcctcaacacagcccttaaatgttctacagttttagagtgcttttccagttaccatacatatctttggtataaatagcacttttagataaagatttaagccaatagtgtttattttctttttgcttgttttgctcaktttgatttttcattttaccccgtaggttttactcagtggtggagtagactcaacagtttgtacagctttgctaaatcgtgctttgaaccaagaacaagtcattgctgtgcacattgataatggctttatgagaaaacgagaaagccagtctgttgaagaggccctcaaaaagcttggaattcaggtcaaaggtattgaagaacctcagaaaagttaacttacatgttaggacttgtttaatcaaatctagtcttatggtttaaatgagcacaattacagttttctcagtatgctcaaggttgaaaatgttttttatttttacaattacctctggtgtaagagaggtctcagtataaatttttaaactattgattctgctaatttaatacatagattgataaattaacattttctagctactgttcagttctcttctagtcattcacttttaaaattatcttttcctggccaggcgcggtggctcacgcctataatcccagcacttagggagatcaaggtgggtggatcacctgaggtcaggagttttgagatcagcctggccaacatgatgaaaccccatctctactaaaaatacaaaaaattagccagtcttggtggtgggcgcctgtgatcccagctactcgagaggctgaggcaggagaatcacttgaacctgggaggtggaggctgcagtaagcagagatcatgccactgcactccagcctgggcaacaagagcgaaactccatctcaaaaaaaaaaaaaaaagaaattatcttttcccactctatttaatgatatttatgtacgaggctacccaagccctcctcaggtatgggtatacagattattttgcaaacagaaaagcttattgtgggagaggtaaagattctatactttttttttaaagggccactagtaaacttcttagtccttaataacatttacttttgtagataccttttatactttttaaaaacaaggtgcaattgatagttataatgaaatgaggtcagtagtttaatgataaaagttattgtacatattatggaattaattggaattgataccaaaaggctgaataaaatgaagacttgtaggtaagtatgatgtgaacatgagtctatttttttgaaacttctctaaaataacagtaaaagcataaaacagtgtaataccttaaggatgtgggatagaggagatgacagaagacagatggtttcaataaagtgttggaaagtggaaagcagatgggtaaaggtggattttctctgtttaagctaggggggtctctcccaacatcctgggaaggtccccaatggtatcttcacatggtgataggtttttgtgaaatttgcaagatattttgataatttgtagttgtttattttctttcaactctgacttgttttctgttaggtggtgctggaatagctgtgggcattttgaaatcaggctaagacaaagatgagctggggatgtgcttagtatgggtttagtggtatatatgtgatttgcaattatttctgtgtatagttaagtacttgttagccatcccagtataacttaagatttttagtatcttatttgttattctggttcttgaaggagtccttcaaattgtaaaacttggatctgtccctggtaactgacatagcagaatggaggaattcacaaccttggggtggggtgggaaggaagccaataaaaagcaagctgatttgtgctgtagacttctggggaggctcaggaatttgaagcattgggttctttttgggacattggtctctgggttagcctaaaacagggattagttaaaaatctgagaagcagatccttttccttagcacaggagcaaactgtgctctccttccccatcagaacactgtggatgtattctctagaggggctaaacgagaggttctgggcttgagcctactaataccaggcatagttgagggtggaggtragactctacattaagaacaggattaagtaaaattctctatgctgaatggtgattccctcttcctaccacttcctctgtttaactgccagaatgccaataggcaggagagtagatatgtcttctctgggtagttgaccaggtacaggaaagacctacaaattcactggcttttccacaatgaaatagccagctgccttgtcatcttacggtgaaggcctccagtagctaagttttattagcaaatagagatcttagtttttagtttcttgtcattaaataaaaagccaaggattgttaaatgtatgttcataaatattagttttacaagacactagggtgtgattccaacarctttgactccgtttaggagccggtgcttttgacttctttggggctaagcttcttgctgtggcttctgcttgttgctctggtgaagcactgaagagagggaaaacaatcagcataaattttttttttttttttgagacagagtcttgttctgttgcccagggcagaatgcagtggcacaacctcggctcactgcaacctctgcctcccaggtttaagcaattctcttgcctcagcctctgagtagctgggattgcagacatgtgccactacgccccgctaatttttgtgtttttagtagagatgtggttttgccattttggccaggctggtctcacactgctgacctcaagtgatccacccaacttggcctcccaaagtgctggtattacaggtgtgagccaccgygccggccctaatcagcataatttgtgatgtcatggccctagatctaaatgccaggagattctcacagaaacaaaatttaatgagtgcctgtatctgaattctgttactcaggatttattgatagttctttttcttttcttattttttttttggggatggagtctctctctgtcacccaggctggagtgcagtggcacaatctctgctcactgcaagctccgcctcccgggttcacaccattctcctgcctcggcttcccaagtagctgggactacaggcacccgtcaccacacccagctaattttttgtatttttagtagtgatgggatttcaccatgttagccaggatggtcttgatctcctgacctcgtgatccacctgtctcggcctcccaaagtgctgggattataggcatgagccaccgggcccggccaataattcttgaatattgatagtttattgaaatttgtaggcagatttaggggagatcaaaggactgctcttcagactgggaaagaaatagcttttctttctgtattttgacttgttatttttgattaaaaaacatgttataccaatttaaaacgcttctcccctttcctccagtgataaatgctgctcattctttctacaatggaacaacaaccctaccaatatcagatgaagatagaaccccacggaaaagaattagcaaaacgttaaatatgaccacaagtcctgaagagaaaagaaaaatcattggggatacttttgttaaggtacctttgtttttaatatcctcaacatgtactatttttgatgtgaatcttagtatttgtttttccttgtcactatatcaaataaccaaattagctaattttaatcctttttcttatgtggctgagagttttattgtatattgtcattatattgaccagtagaaactgttttatgtttttttgttgttgtttggttttttttttgtttttttgagacagagtcttgctgtgtcaccaggctgggctggagtgcagttgcacgatctcggctcgctgcaacctctgccttctgggttcaagtgattctcctgcctcagcctcctaagtagctgggactacaggggtgcaccatcatgcccagctaatttttgtacttttagtagagacgggggtttcaccatgttggccaggttggtccggatctcctgacctcatgatccgcccgcctcagcctcccgaacttctgggattacaggtgtgagccactatgcccagccaactgttttatgttttaataaacatgtttgcctacattgccaggctattattttaagaatagatgtctttaagagtagatgtattcagcttatcwtagactttaattcattgattatctcaatggctaatttcaagctcttgaatggaatgttcacatacctttgtttttgtttttttttttttttggaggcggagttttgttcttgtcactcaggctggagtacaatggagcgatcttggctcacggcaactttcacctgctgggttcaagcgattctcctgcctcagcctcccgagtagctgggattacaggcatgcaccaccatgcccagctaatttttttctttttttgagatggagtctcactctgccgcccaggctggagtgtagtggtgcaatcttggctcactgcaaactttgcctccagggttcaagcgattctcctgcctcaacttcctgagtagctgggattacaggcgtgtgccaccatgcccggctagtttttgtatttttagtagagacggggtttcaccatgttagtcaggctggtctcaaactcctgaccttgtgatctgcctgccttgcctcccaaagtgctgggattacaggcgtgagccaccacacctggccactaattttgtatatttagtagagatggtgtttcatcatgttggccaggctggtctcgaactcctggcctcaagtgatccaccccactcagcctcccaaagtgctgggattacaggcgtgagccactgtgtttggcctcatgtacctttttgaatcgtgttagaggacatgttcattaaggagtttattttggagattggtggattttattttctgatcagtatttctaaaggactctaagagatttagctgaaagtataaacttttgcttttaaaaaaagttatctcttacaaggctgttttactcctgttgattatagattgccaatgaagtaattggagaaatgaacttgaaaccagaggaggttttccttgcccaaggtactttacggcctgatctaattgaaagtgcatcccttgttgcaagtggcaaagctgaactcatcaaaacccatcacaatgacacagagctcatcagaaagttgagagaggaggtaaaagtttatgaaaactttttcataaagtagatacatggaaagtcttccattcttccctcctcttccctctaatattcacagaattgcataaccatcaccacatctaattttagaacattttccttaccctaaaaaggaaccttatacccattagcagtcactcctcgttctacctgttgttgtcattgtcatcctgcccccaccccccagctcctcctttcctcctttcttgccagccctaggcaattaccaaccactaatttattttctgtctctatagatttgcttattttgggcattttatataaatggaatggtacaatatgtggtcttttatgactggcttcttttacttacyrtaaygttttcaaggttcatccatgttgctgcatgtatcagaactttattcctatttattgccagataatattccatcttatgggtataatgcattgtatttatcctttgatcagctgatgggcttttgggttatttccactttttggctgttataagtaatgccgccatgaatactggtcataagtttttgtggatatgtgtttttatttcttttggtatatgcctgggagtagaattgctaggtcttaaggtttaacattttgatgaattgccaaactattatttaaaatgatgatacaattttacattcgcactagcaatctatgagattcaaatttttccacatcctcaccaagacttgttgttatctcttttcttattgtaaaaaacacataacataaagcttaccatcttaactctgatttttttttttttttgagacagagtctcactctattgcccaagctggagagcagtcatgcgacctcggctcactgcaacctctgcctcccggttcaagagattctgctgcctcagcctctcaagtagctgggattacaggcatgcgccacgaggcccggctaattttgtatttttagtagagatggggtttcactatgttggccaggctggtcttcaactcctgacctcaggtgatccgcctgcctctgcctcccaaagtgctgggattacaggtgtgagccactgcatccagcctcatcttaactatttttaagtatatagttcagtagtgttaggtgtattcacattgttgtaaaacagatcttcagaacttttcatcttgcaaaacaaactctatacccgttaaaaaacaactctcccttttttctggcccccaccctctggtaaccaccattctgctttctgtttctatgtttcactactttaaatacctcatataggtggaatcatacagtattgcctttttgtgacttgcttatttcacttagcataatgtccttaaggttcattcatgttgtagcatgtgacagaatttccttcttttttaagactgaaaaatgggccaggcacagtggctcatgcctagcgctttgggaggctgaggcgggtggatcacctggggtcgggagtttgagaccagcctggtcaacatgatgaaaccccgtctttactaagaatacaaaaattagccaggcgtgatggcgggcatctataatgccagctccttgggaggctgaggcaggagaatggcttgaaccctggaggcggaggttgcaatgagccaagactgccattgcactctagcctgggcaacaagagtgaaactctgtctcaaaaaaacaaacaaacaaacaaaacagactgagtaatgtactactatatgtatataacacattttgcctatccatttttgtttatcttttggatatatgcccagaattgggattgctggatcatatggtagttctctttttaatttttttgaggaacttattgtccatagcaattgcaccattttacaatctaaccaaaagtacataatgactccaatttttccaaatgcttacaatttgttattttctatttttttatggttgtgttatctgacttttaaaaattttagtcatctggctcagcacagtggctcatgcctataatcccagcactttgggaggctgaggcaggtggatcacttgaagccaggaatttgagaccagcctggccaacatggtgaaaccctgtatctactaaaaatacaaaaaaattagccaggtttggtggtgcatgcctgtagtcccagctactctggaggctgaggcaggagaattgcttgaacctgggaggcagaggttgcagtgagccaagattatgccactgcactcccgcctgagcgacagagcgagactctgtcttaaaaaaaagtaaataaaaatgttagtcatcctagtgtatatgaagtggtatatctcattttgatttgcatttccctaatagctaatgatgttgagcattttttcatgttcttgcttattggccatttgtgtatcttggagaaatgtctattcgtatcctttgctcctttttttaaaaaataattttaagttcgaggatataagtgtaggtttgttacataggtaaacttgtgtcataggggtttgttatacagattatttcatcacccaggtattaggcctagtacccattagctttgcttattttttaattgacttatttatttttttattattgagttgtaaatgttctttatatattctggttacaagtcttttatcagatatacgacttgcaaatgtcttctctagttctgtgagttgtcttcattttctcaatgataacatttggagaattataattttggaacactagtatattttctaattgctttgtattctaatgagaattagatcagagatgatggattggtttaccctgatttatttatatttwaaaagcttatgtttaaaatgtgcttcaaagagaaataatacccrtaagatattcgtctaattccttataggcacttaggarcaaatactttaaaagatgcatttttagtaataatctgttagtctaagaaaagtggtaacaggaaaagccaataatttattacgctttgttttccatgtcatcttggttactagtttatattggttggcttctttcctccctgtagggaaaagtaatagaacctctgaaagattttcataaagatgaagtgagaattttgggcagagaacttggacttccagaagagttagtttccaggcatccatttccaggtaaaaattagaactgaattttgtttgattcatctttagaccttcatgttgaagaaaaatcarttcagacaattctgaaataatctgtcatctcagggaatatgtaacatgagagaaaggaaaggatggttagggaataattgaaatcttttgagtatctactgtatttacttcattttattaaatactcattttccattgtatctgcatttaagtgttacattatccttgggagtctggcatctgatgttgccatcagatgagaaaaccaagacataaagatattttaataatattgccacacagtcctagtagtagagctaggatttgttatattatttgtaccataccgcagtgcgttccatggaagatgtgaggatttaaatttagctctttaaaatccttgtcctatgtctgacttgtttgaatggatgaaccacttattctgtgcagagaattcttggcacaatgtaactaattcctgaacaaataatacttcatttgctgtcatatagaaaaaaattagaggtgatacttgtttaaagttaggactgcaagtcttaacctgtttttgttactagttcttgagaggttgggcaagtctgtacatcaggttctagctcactgtaatagtgattaggggatgatttgggagaatgacctaattgaattgaaaagcataataatagccaacatttcttaagtactttctatgtgctaggcactctgctaaatacattttattgtcttatttaatcttcacagtggaaactactattatcctgttttacagatgaagaaacttagggacagcgactaatttgccaaaagttatgcagattgaaaggagtggagccagaatgatatccccaataatttttatctcagagtttatactcttaatgatcatattggctccataaacagctttacacatgtataacctatgtggtgattagcacttgttctcaaatcaagtaatcagattgagatctttagtccctaacctgcatgccggcgaagaatggtctgtggaccggtgtggtggctcatgcctgtaaccctgagtctactaaaaatagaaaaattagccaggtgtggtggcatgtgcctgtaattctagctactcgggaggctgaggcaggagaatcgcttgaacycgggaggcagaggttgcagtgagacaagattacaccacagcactccaacctgggcaacagagcatgactccatcttaaaaaaaaaaaaaaaagaaaaaaaaaaaagaaaagaatgatctgtgaatgtaatggagggaagccaagtgttctatgtccttggtcattatttcatctagactcacttgatgttttaaaaatctattttgtatgttgagttttctattatgtaagacttcattggcaaaaatggttttactgctttaaaaactatcttaagtatgctgtttattctaaaggtaaagaatggactagggaattaattggacatagctgaggttttgcctataactaggcatctcaagtgatgccttttctgttgtagtaaagcagcaggatccagttttccatagatctatgcacaccttgtgtttttatcaacttttaagtatttggtaaaatagaggttgggtacagtggctcatgcctgtaattccagcactttgggaggcctaggcaggcagatcacttgaggtcaggagttccagaccagcctggccaacgcggtgaaacccgatctctactaaaaatacaaaaaattagctgggcatggtggtgcatgcctgtactaggtacactggtggctgctaggggagggtaaggcaggagaatctcttgaacctgggaggtggaagttgcagtgagctgagatcgtgccactgccctccagcctgggtgacagaatgagagtctgtcaaaataaaatagaaataccagttcacattttttggtattaaaaactcacattatttattagattatgtgtatattttaacagtataataccattcctaaaattagattgatagttgaagctggatgataagtaaggtagttaattatactgtcctctttatgtatatgttggaaaattcccttattaaaaactttggatgagcacatatgttataaactaaaaatatttactggataattttgtgatacttaatacatggactgtaaaaataggataggccaagtgcagtcagtggctcatgcctgtaatttcagcatttccagaagccgagcttctggagttcaagaccagcctgaacagcatagtgaaacccctatctttactgaaaaaattagccaggcatggctgccggtgcttgtaatccaagctatttaggaggctgaggtgggaagactgcttgagctcaggaatttgaggctgcagtgagcaataattgcaccactgcactctagccttggtgacagagcaagactctatctcttaaaaaaagggagataggaatgatagggagagaattaaacatactgtcttatttgagcctcacaatggaaactatgatagtattaccctgttttatagatgaagaaacttagggacagagattaatatgccaaaaagttatgcagactaaaacgtatgcataatttaaatgttgcagcattctaaatgttacaacatttttagaatgttgaagcattctaaaaaatgctgagttgaatgggaaactaatagctacatttggatacttatgatgggcagatggattttaattttggaaaggttttatgttttgaaactagtggcatttttatattagatttttatattagaaatataacattaatgttaaatactattrttactcctacctttaggtcctggcctggcaatcagagtaatatgtgctgaagaaccttatatttgtaaggactttcctgaaaccaacaatattttgaaaatagtagctgatttttctgcaagtgttaaaaaggtaatatttgatacagctaatcattrcaagaaattgaacggattcttattatataccagcatttataatgaattttttagggttttattatttgaaaatttggtgtaatataacctttgaaatgactgtggagaaaatattccacagatattcttatatgcatatttttctttccagccaaacaagactggatatcctgagtctctaaaaatgtcagataaagtattttaaagcactcttttatgtgtatttcaagatagtaagggaaatcctttgagtcaggaatttattgggagcatcatttcaagaaaccaaagctgtctgctcctctgaggacagctactaatcctttgtggtctaggatttgggtttttacaatttcattcatgtacaggtgtctgagtatgagactgggtccaagaagggccagagattggatcagatatcttcacactatgcaaccctttagctccaaattgaagatgaatggaaaaattccccagtctactttattctacagatttggggttttaatttatgtaatgtgtgtggtctgaaaattgcaacgaaataattttaaagtggatctgggttggtagtgcttatgggagttaggcaaggaaaaatgcagattctctttagaatatcttcacctaggtcccaaaggattctcatagatagatttccaacaaatatgaggttataataaaaaatacaaatcacatatagaagtatggcaccatgaatgagaaaggaaaaaactgtcagaacaagaccctcaagactttactggaattaacaagcaatatgtaaagtaaatagaaataagctattcataataagaataatgtataagagactactaaaaataactgggcagatttgaaaataatctaagttctgggaatgaaaataataactgaaaaacagctgaaagagagaattaatgaactaaaagaaagttgtttagagattatccagaaattaggacaaatcatcataaagaaaatatgggtagaaaaggttaagatggaaggataaggcaagtgctaacatatgtccagaaggaaataatagaaaaaaatgtattaattcctccacactggtaaaagacatgatggctcagattcaggaaatgtaacacatctcaagcagaataaagggaaagaatttgacacctagtaagcacatcttagagaaattaaagactgccaaagacagagcagctgcggagaacagatcaattacctacccaggaaattatactgaaacagtaaaggcaagacttcaaaataccaagagaaaataattaactgtagtgaacagctaaactgtcttttaaaaacaagggcaaaataaagttatttcgagattaaatagaatttactaccaacagtcccttactgaagaaactaaaggcaatgattttcaaccctggctgtatgttagaatcatctggggaagcttttgaagtatactattcttgacatatagccctagaatttaattggtctgagatgggacctgggcattccaagtaatttgtgcagttaaggttgagaaccattgtttttttttttgtttgtttgttttttgagatggagttttgctcttgttgcccaggctggagtgcaatggcacgatcttggctcactgcaacctccgcctcccaggtttaagcgattctcctgcctcagcctcccgagtagctgggattacaggcatgtgccatcacgcttggctaattttgtatttttagttgagacggggtttctccatgttggtcaggctagtctcaaactcccgacctcaggtgatcacccgcctcggcctcccaaagtgctgggattacaggcgtgagccactgggcccggctgagaaccattgttttaaagaactgacttgaggagaagcagcaggatgccaggagaaagtcatgagatacaagaaggaatgctaagcaaggaaaatggtaaatgactaaaactgaaacaaacatggactgtataaaatgataaaaatgattataaaatcgagagtagaggtaaaaatgatatctacttgttcttgtttattagaaaatgtgtaacaatgtttagctgaagtaacatgtaagccacaaagggattgatttgagctaaggaattcaaagatgtctgtgttatttgccagaaggacagaagattgattatcttttaagtatccttgttaacacttaaggacaactactgcaagaatagaaatagaggatttaacttcaaaaccggtaaagaggaaataaatgagctgggagaaatcaccagttcaaaagacagcaagaaaggagtaagagtaaaaaatgggttaaatagataattacagaaaaagattgtagaatgaaattcaactatattgataacctataattaattaaaaggactataacattcctagttaagacatagacagtcaaactagattgaaaactaaaatctgcttagtatagaatagtagacatgaaaagtatagtctattcacaacaggcattactaatacctagggatagtaggagtgaaaattaaagaatggaaaaacatataccaggtaaataaaaaaaaagaaatggctaaagctatattaatttcagacaaaactgactttatggcaaaaagcattaagataatatttgactcagataaggtgcatcacttgctggtgacagggtactaaagcctgaatgtatgtaaatataatctgcatttcttatcctaagacttcttcatagtcctagccctcaggtgtgaatttctggcatagtgcatagcacacacaactcaaggagataccaaatacaatccactgctaaaaaccagtaaaatacataagatagtagtagataataaaagagtgaatacyttatttcttaaaactgaaaaaatgcctctttggtttttctcagccacataccctattacagagagtcaaagcctgcacaacagaagaggatcaggagaagctgatgcaaattaccagtctgcattcactgaatgccttcttgctgccaattaaaactgtaggtgtgcaggtgagttgtgtgaattcattcaccagtgatatacttttttttttttttcttttcttgagacggagtctcactgtgttgcccaggctggagcgcagtggcgtgatctcagctcattgcaacctccgcctcctgggttcaagcactctttctactaatcttgaaataaggattacttaggaaaatgaaatatgtgagtatatataccaagtttagagaaataaggtaattttttatagaatgtttagggagtgaatagttaatggaactaaatagtcaggctgagattttgtagttttggaacatctatgaactctaaccaaaggtaaatattgaaagcaaccctttcctatagggttggcatgcttacttctgccttgtagggcagggatcaagaggtcatttatcctaggtgtgaaatatactgtggttttagaagtctttaactgcaggaaggcctccagatgagtaagttacaccatttaggtgttgttctcagcttgtgtattccctgtactagggaacacattctactgatgttgtgtttattctgcctttctagttgtaaaagaacatgagaataatatagttctcaattataaaatgctacttgcaaaatgactaataactaataagatagtatgttaatttctcctcttttttctggagacagggtcttgccctgtcgcccaggctggagtgcagtgatgtgatcatggcgtactgtagccctgaattcctgggttcaagcgaccctactacctcagcttcccaagtagctgggactacaggcaagcaccatcatgcctggctaatttttaaatttttttgtagagatagggtctccctgtgttgctcaggctggctttgaaattctggcctcaagtgatccttcactttggcctcccaaagtgttaggattggaagcatgagacactgtacccggccttctttatatgatcctcaaatgagtttttggggagcaaaagtgtgggagggtagggaagagaaaggttattttcttctatttcaagtttgtggttaaatggagacactagaagaggtgtcagtagttcaactcgaaaatggtataagtgccagttattgggttaatgtgtttataatgtcctcttacagtaaaattatgtgtagaatatacatatgtaactaacctgcacattgtgcacatgtaccctaaaacttaaagtataataataaaaaaataaaaaataaaaaaaaagaaattctgtttcagagattattcttctaaaacctaataagcattttttctaaatatatgaatctgtcagtttaaattcccctttgctctgaattcatgcagttctgcctgtaaataaaacaagataaaaattgattgttgccaggcgcagtggttcatgcctgtaatcccagcactttgggaggctgaggcaggcggatcacctgaggttggaagttcaagascagcctgaccaacatgcagaaaccccatctctactaattagccgggtgtggtggtgcatgcctgtaatcccagctagtcgggaggctgaggcaggagaattgcttgaacccaggaggcggaggttgcggtgggccaagattgcgccattgcactccagcctgggcaacaagagtgaaactccttcttaaaaaaaaaaaaaaattgattgttatttttaaagtaaactaaaatattttatttcatgaaagtgatagagccagctattgggttaaggaactcttgccttctttttaaaggccaaatgttgtaagctgcttatgttgttttaaaatcactattgaaataaccttacttggagttactgatactttctttcagtggtttatggattatctcattcatacataaatttattttgaaatttgcaatgatacttacaggcagtattaccctaatatataaaaatagaattgtggacaggttatttaattcttaaaagtttctgagttttaagtagatttgttatagagaacttcaacgtctgtgtgctaactgctgctrcaaagggagttgaaatagttccccactcttctttttagagaagtgttacaaaaaatagatacttgagataatctgatgaatgagtgatttctttcttgaaaatgaaacttattcaggctctactacttttcccaccaaaataaaattttcttttgttattggataactgactttagtctcttaccctttgaagcttagacccttgcaagcccagataaaaatgatggttcatagttagtataacaatgcattttattttctaaataccaaagtaaaccgtatttgtaaaaaatgaaaatacattaaaaaaaattctttgtatttctactctccagttaagttttgtatgtgtctttccagaaacactttaaaaagaaaataaaagaggggatttggggtacacattgtcaacttttttcttttaactgaacatcatgaacttacctttctgtgcctttccaagtagatggttcttaactgttccctcatattctatgcataccatcatttatttaactattcttctaaccaatgggcatttaaactgttctgttttttattattataggcatcccatcagttatccatgtatttatgtaggatcattttatgtgcatgtgcattttacactttttttttttttttttttttttttgagatggagtcttgctctgtcacccaggctggagcacagtggcttgatctcagctcatggcaacctccacctaccaggttcaaacgattctcctgttgcagcctcctgtgtagctggggttacaggcacacgccgccatacctggataattttttgtattttagtagagacggggtttcaccacgttgcccaggttggtctcgaactcctgagctcaggcaatccacccgcctcggcctcccaaaagtgctaggattacaggcatgagctaccacgcccagcccattttacacttttatagatgctatcacattagcattcacatatgttgaattttcacattcttagtacctgccactttgggcattaggtacttctctaatctgttactttttaaaattgcttttcataaaaaaagcaaattacttggattaaacaggacacaggaaaagagaataaattatcagttttatttacttattttaaaattaactttttttttttattatactttaagttttagggtacatgtgcacattgtgcaggttagttacatatgtatacatgtgccatgctggtgcaccgcacccactaactcgtcatttagcattaggtatatctcccaatgctatccctcccccctccccccaccccaccacagtccccagagtgtgatattccccttcctgtgtccatgtgatctcattgttcaattcccacctatgagtgagaatatgcggtgtttggttttttgttcttgcgatagtttactgagaatgatgatttccaatttcatccatgtccttacaaaggacatgaactcatcattttttatggctgcatagtattccatggtgtatatgtgccacattttcttaatccagtctgtcattgttggacatttgggttggttccaagtctttgctattgtgaataatgccgcaataaacatatgtgtgcatgtgtctttatagcagcatgatttatagtcgtttgggtatatacccagtaatgggatggctgggtcaaatggtatttctagctctagatccctgaggaatcgccacactgatttccacaatggttgaactagtttacagtcccaccaacagtgtaaaagtgttcctatttctccacatcctctccagcacctgttgtttcctgactttttaatgattgccattctaactggtgtgagatgrtatctcatagtggttttgatttgcatttctctgatggccagtgatgatgagcattttttcatgtgttttttggctgcataaatgtcttcttttgagaagtattgatgggacatatctcaaaataataagagctatctatgacaaacccacagccaatatcatattgaatgggcaaaaactggaagcattccctttgaaaactggcacaagacagggatgccctctctcaccactcctattcaacatagtgttggaagttctggccagggcaattaggcaggagaaggaaataaagggtattcaattaggaaaagaggaagtcaagttgtccctgtttgcagacaacatgattgtatatctagaaaaccccactgtctcagcccaaaatctccttaagctgataagcaacttcagcaaagtctcaggatacaaaatcaatgtacaaaaatcacaagcattcttatacaccaacaacagacaaacagagagccaaatcatgagtgaactcccattcacaattgcttcaaagagaataaaatacctaggaatccaacttacaagggatgtgaaggacctcttcaaggagaactacaaaccactgctcaaggaaataaaagaggatacaaacaaatggaagaacattccatgctcatgggtaggaagaatcaatatcgtgaaaatggccatactgcccaaggtaatttacagattcagtgccatccccatcaagctaccaatgactttcttcacagaattggaaaaaactaaagttcatatggaaccaaaaaagagcccgcatcgccaagtcaatcctaagccaaaagaacaaagctggaggcatcacactacctgacttcaaactatactacaacgctacagtaaccaaaacagcatggtactggtaccaaaacagagatatagatcaatggaacagaacagagccctcagaaataacgccacatacctacaactatctgatctttgacaaacctgagaaaaacaagcaatggggaaaggattccctatttaataaacggtgctgggaaaactggctagccatatgtagaaagctgaaactggatcccttccttacaccttatacaaaaatcaattcaagatggattaaagatttaaacgttagacctaaaaccataaaaaccctagaagaaaacctaggcattaccattcaggacataggcatgggcaaggacttcatgtccaaaacaccaaaagcaatggcaacaaaagccaaaattgacaaatgggatctaattaaactaaagagcttctgcacagcaaaagaaactaccatcagagtgaacaggcaacctacaaaatggaagaaaattttcgcaacctacttatctgacaaagggctaatatccagaatctacagtgaactcaarcaaatttacaagaacaaaacaaacaaccccataaaattaacttttaagctgatacttaaacacgttgataagtaaatgtttatgaattgtttttgtctcccacttaagaattctttatccactcaaaaaacacrggcagatcttgtctgccaaattataatttttcataattttattttatttttttgagatggggtcttactctgttgcccaggctagagtacagtggcatgatcactgctcacgatagcctcgacctcgttgggctcaggtgatcctcctatctcagcttcctgagtagcagggactacaggtgcatgccaccacactgcccagctaatttttgtatattttgtagagacagggtgttgccatgttgtccaggctggtctcaaacttctgggctcaactgacccacccacctcggcctcccaaagtgctaggattataggtgtgagcttctgtacctggccttgtctgccaaattaaatatgctggttatccacagttgtgcaggtaatgggaatgttgaatactttttttttttttgagacagagtttcactctgtcacccaggctggagtgcagtgatacgatctctcagctcactgcaacctccacctcccaggatcaagcagttctcctgcctcagcctcccgagtagctgggactacaggttcatgccaccatgcctggctaatttttgtatttttagtagagatggggtttcatcatgttggccaggctggtcttgaactcatgacctcaggtgatctgcccacctcggcctcccaaagtgctgggattacaggcatgaaccactgtgcccagcctaaattcttgatattaccatgatactttatgtatgtcttagctgattcaggtaggatttaatatgggattttaatttggaatttatttataccattaaagaagcatttagtatatactttcattcaaaatttccaaaaatccattaataatgtcaccatgcataagatatttttcaatgcatcttttcttttttttttwaaaaaaaaaaaaagctttgtcaagttaaactggtgtatcttttgactattaaaaattattgattatctttttattttcagggtgactgtcgttcctacagttacgtgtgtggaatctccagtaaagatgaacctgactgggaatcacttatttttctggctaggcttatacctcgcatgtgtcacaacgttaacaggtgtgtttcacaggagctagggtgggggcttgtgtaatggaaggatgtatttcttaagggctttcaattaatggaagaccaaaaggctcaaatgtagatataggtaggtcatgtagataagagtaaatggctgtgtttgtaattcaaatatgcacataggttgcagttaagtagatatttaatattatcttgtgttttgactcttcatcacaatgtagtcatctgttaaaaattatttaaaggagaaagatttttattttagtgtaaaatattaaaggcagctgtaaaacatcttctaaattagtggtttatattagctgttggttttatggtaacatgttttattccagaaggattgaaaaaagtatgtccaggttacagaattacaaataaagtaacacacacacacacacacacacacacacacacacacacccctacaaaacaaacaacccccactccaaacaaaaatggagacttggttaatttagtagtaaccccaaggaaaaaaatcaaagaaaagaaataggcatgtgccagatagcattaaaatagttacatttaaatatataatttacatttagattaatttccctttaatttgcatattaacttcttacattggatatatcaacagctgatttataatctatttctaatcctcaatttcatcgtaccatatatagttcaaaaattcacttattttgtactagattgctaattaaatgttcttacttcacagttattctctctgttcagttttcttcatgggtgttaggcagtyaacaaccaaaaagaattacttgaggtttcattttactcaaattgctgcagaaatcagaagcttaccttttaatgttaagctagcagagtctgtatagttcgagataaggagttacagggaagccatgtttttaccgatgggaacatgctcattcaaaggcttactcaaatgaactgaaaaccgtcaaatacagaagcatctttaaaatgctgaaaaatagaattattactatcttcaataatgggggccaggcatggtggctcacgcctgtaatcccaccactttgagaggccaaggcgagtggatcacttgagcccaggagtttgagaccagcctgggcaacatggtgaaactccatctctacaaaaaatacaaaaattagccaggcatggtggtgtgtgcctgtagtcccagctactcsggaggctgaggcagaagaatggtgtgaacccgggagrcagagcttgcagtgagctgagattgcaccactgcactcaagcctgggcgacagagcgagacttcatctcaaaaaaaggaaaaagaaaaaaaaaagaatcttggtgaactttagatttatttgctggggtctttttgatgaattggagtttaaaaatattcttccctgtttgccggtttttttcctaatttggataagggaatctttgtacagggagggactgttccagttttactgtcatatatagtgtggrtaaatacctgtcccagtacactctagtgattacttttgtttgtaagaaatgagaaggtgaaaagagcaggttcatggcattctcttaactttctcctgtaaagatcttttatgaactttaggaactgtattgtttagaaaaattataacttactgtctatacgtgggacaaaaaccttgcttctgttgtagtatgtttggaaggagacaataaagtagttggtgataccggtggttttgtgctaatayggttttctattgtgtattttacctaagtacatattaagaaaagaagaaaaaacattaaactttaccatgatagtttccggggagatttattttctttgctaaaaacaggactaacgaaaagtgaatagggagaactagctaagtggcactcatatctctaccctgattccctcttgttttctgggtgaagattgtgaaacagatcccttcaaaccagtggccagctacacttcaagttgttaaaattgtctgattctaatttcctcaagttatgttccaaactgtactctcattaactcaagatatttgtggtgtatcttcatgtctttcaaacagacatttatataaaacactaatgaatcatttttttggaaggaagtagtaggatactaagtcctatttcaatggcctttttaatgaagtgcaaatgagaatctctctagaatgattgtttctcaagtagagaaaaaaaratgagtttactaattttgggaaattcactgtagtttcctcttggagatttccagtgcatgttagcatagtatattaatagtttctgaagtcttgtcataaagacacctatttttaaattttaattgtgtatttgtttcctaggactrcccataacaaatcaccacaaactaggaggcttaaaacaacagacatttattctctcacagttyaggaggccagaagtctgaattcagtgttggcagggtcatattctctctgaagactctaggggaggatccttccttgcttcttcctactatcgagtggtggcagcatagtccagtctgtctttgtgttcacatgaccctcattcccctgtgggtatctgtgtatccaaatttcccagcacttggaaggataccrgtcattggattagagcccatcctaatccagtattacttcattttaacttgattacatttgcaaagaccctttttctccccagagattctgggtgggcatgaagttttggggatactcttcgacccagtacattaagtgaaaagagagttgtaataatcacttatatctttgcacattctgagatacagaatattccagagaacacactttgaggaaaacacgtagaacacagaccttcctataatcttatatcttgtcctatccatctggggagttgaagtgggcaggagaagggcctgaaactaagtgggaaatggaaagaatgttactgttctaagtgccttgcttctcatactaaaatgtaatttctacatttgaaatgtaattgctgtattatttttacctctttgtttccagagttgtttatatatttggcccaccagttaaagaacctcctacagatgttactcccactttcttgacaacaggggtgctcagtactttacgccaagctgattttgaggcccataacattctcagggagtctggtaagttgctcatgtttttgattactaccctctgaaactagtttttggaagcttgatattaagagtaggaggatgtggcttttgctttttagatgcttttgtttttattatttaaatctttgaatgttctatgatgttgcttttttttcttgagacggagtctgtcttgctctgtcgcccaggctggagtgcagtggcacaatcttggttcacttcagcctctgcctcctgttacaagtgattctcctgcctcagcctcccgagtagctgggattacaggcacccgccaccacacctggctagttttttgtatttttagtagagatagggttttgccattttggccagctgatctcgaactcctaacctcatgtgatcaggtcaggagtcaggtcaggccagccttggcctcccagagtgttgggattacaggcgtgagccactgcacctggcctataatgttgcttctaaataaaatatattcccctttgtggccatttgtggacatgcacagagcagcagaaaatttgaatttccagacttagatgttcccagctgagtttgaacaaggtgacgctatgccttcttgttttcagctctcataatgtgaacaagtctttttcatggtctccttgatgctatatcttttgcatttttatgtcttttgttggtgattttgctgtttaaaatggatctcaactatagtgttgaagtgctgtctgggttcctaagcacaggaatgctgtgatgtaccttacagagaaaatctgtgtgttagataaacttcattcaggcatgagttaaagagctactgattgtcagttcagtgttaatgaatctataataaatattaaatacagtgtcttaaatcagaaacacataaaacaaggttatatattaatyagttgatgaaaatattacaaccagaggcttgcaggaacctaaccctccatttcccctgggagaaatggttcagtattcgctaattcgttgtttgcagtgtagaatataactatactgcaaattataatagagaataatgagactggactgtttctgtttacagcacatcagtgaaacatcactgatgtgatcaaattctgttttttgcatttgtgattaagtccatttaaaatgctctgcgagtagctgaaatcaatgcatgatgacagtcttaactaygctgtgtgtgtatatgtgatttcagatattgcctgggaggatttaattgaactgagttagagtgcttttctatggtgtggtgattggttctacatatacctttctctagggtatgctgggaaaatcagccagatgccggtgattttgacaccattacattttgatcgggacccacttcaaaagcagccttcatgccagagatctgtggttattcgaacctttattactagtgacttcatgactggtatacctgcaacacctggcaatgagatccctgtagaggtaatttatatatttttttctaatgcacgttctcagtacctcttacattttataatatggtgaatggaataggctatgccagtgctgtatttcttatgttggttttctgttcataagataggctttttttttaaaattttcacatatttgattaatacactggggcagaaaaaggctttaaattatatatgctctccaattgtgtgattactgtataaaaagtaattgattataattttatctaatcctgccaatttctactttacaaacagtattccccaaataaaaaagaaaactctaggagtgaagaagagtttgttagaaataaggatgcaatttgatagctttatggccagacacccaagaattgcctaaatgttctccctactaccaattccaactcaatttttgatccttctttgtcttcaccagaacattccaaaggagctayttgcataatagcaagtgaaaatcaaagtgagactctattagttgggccactgcctccagtgcactaacacgaggctgtcgtgatagctaggtagatgggttggttcggaacgtggcttagagtcatttttctcttaggctcaaatttgtcaaatttgacaagtgagcaggctatcctctcctgtatacttgataatgattattacagtgtactctgtgccaccttggtggcccttagagttgtatgtttaagctgcagataatttgcagagcattggctgaaacacataaaatcacatgcttggatgccacagcaatgtcaaatcgctatatgttcttaagcacttgtggctcagtcacaaacacaacttgcagactagcacctgtttgtggatcacactttgagtagtactgagtttaagtcactaatattttaaaccttaataacttamacctatccctgcagaggggaataggttcattatataagattaatcagaaaccatcccatatacatggaggacaatagygaaaatagtcaaattttaatttcaaattacaaatgtaagccctctaggactgctggacatgcagtggatgctgacttttctctataattttttttaataggtggtattaaagatggtcactgagattaagaagattcctggtatttctcgaattatgtatgacttaacatcaaagcccccaggaactactgagtgggagtaataaacttcttgttctattaaagtaccgtgtgcagtttaaattgattagaaatcattcccattattgacatgcagtactgtgaaaagagttactggagcagctacatcacatctgagttctccacagcaaaaatctacggcttaagagctgagttggggataaccaaaagggactgaagagtttgtacgggtaaataatcaaagcaccattgcctacactcagacagattgatactgcttttgcctttgcctcacttattctttatgtataaattcactgttgatgtctctgtgaatatgtatgaaggtgggtgaatttgggggtaattatgggcttctgtctccttaccagtttctaagaactgttagaaacgcccattatttaccagtgttacttactacttatatatactttttggagaatcagttttcttataagtaatcttatttctccaaagggtgaaaaagagatgaacatatcagataaaggtataggtgggctattccagccacttttgaaggacactgagggtataaaatgtaagctaccataagatggaaaagcaccaggaatttgttgatgtacttttgaattttatttcacagccttgggaggaagaaactatgagtggtctcagatgtctatgaatggtcttaaaatgttttcaaaccatgttccacatagatgccatgttattcaatgtcagcttgtttattagtaaggagctttatcctcctagccttatattaccagccccccacagccttgcatagaaagtttctgttatctccttagaagaaactggctcaatgacgtttctggtgtagtgcagatagaggtcaagaggagcattttcatctcttcttttgctggtcagagaaacggttctgagatcacagaagctatgatgcatacctacagcttacaaaagggagaggaaaaatgtttatatcatctagtaaacagttgtaaaatgagcttttaaatctaatctatagcacatattattcattgctcagacacctgtgaacagtcttgatacatgcaagatgtttgccaaactttgtaatcctttctactagctataagagaggatttaagaactggtgtaggacttgttgccatcaccaccagtttctaacagatcttttataacattcacataagtactgtagacagtagtagacttaaactctccgtttctctcagtattttagctaagaatgttaccatatttttctcttaacaattccatctcaggttgctgctgcttgtctagtttaaaaggtcagatctattaatcaggaatgaaattttatttgggattcagtgttagacaaacaacaaaatgatgcgtggcagaagtcatctttttattctggctggtccagggaacaagaaaactgctgctggaccagcaagggaagagtttctgtctgtcttaacagaaatctgtccccaagacaaaggggtacttgactcctacaaaacttaaagggtacattctctatctgatgaggaggtactcattatggccttctggaaagaggctatgttagtgatctggtctttacagatttagagtcatgttatttgaaagctagaatagacaacctataaaatgcttaccaacatgtgtcagtacacgtttatgtttatatgaaaaaaaatttctagccacagtgtcttatgattttgtattgaagcaaacagtaggaattttggaaaaatagagagtaagaatgtgtgttctatggaacactgctccactgagaaggtccatgtaaaaaggattaggtggtcatataagtttggggaacataagctcacttgtcctttcctggagattcatggtatataatattcaaagctctgagaaattctgaagttaaaaacaattgttaaattctgcttaaattagtgttttcctgatatttgttttttgaacaccttttatataatcccttctaatatatacttagtatatacttaatataatattgggaaaattgttactccaaagcacatcttgacatgacatagtttcttaaaaatccaaattttctggaactcagaaatttcctaatatttagcacactgtcttcttttgcacagcactttttgctttgtgccatatagcattactctgtaccttcacagtatttcatctgagccactgaggaaagttaaaggttgcacttccattttacagttaagaaaacaagctcaccttaggcatggttacttaattaatttcagaattaaatttcaggtttccttagtccagattgtcctgatgtgtattctgacacctaaaattatataaacatttatgggatgcttattttactaagactagaatggtggctacctggctaataacattcatcattggttattctgggcatatcatgactttattcccgttgcttaccatctacctgggacacatctctctttgattaaatatattctttttctttgtactttttaggtagacagagaatgtagatcattgaaagcattatttattcctaagattggcaggcacagaatcatttttaagaaccaaatacccagtcctgccttaaaggccacatctatgatcatcagctctgttagaaataacagcctggcataattcctaaatacaagtctgtagatatatccaggagatagggttacactgttttctaaccttttttaaatcccttaatcttgaggtaaactgcatgcatttagtcaaacaagcatcataaaatttgtttcctcactgtttgggcttaacctcctgatagcctgttttactgaataacttgaccctaacctgtagagaataagagcattcaaattaggaaggcaggactatccatctttagtgcttttcctgccgttaaacaacaatgtgaacttggtcaagtcatttctgttctttatctgtgacatgaggtaactgtattaaattttcagcatcaaatccagctataaatttgtattttgtaaacaagagaaagtaaagcaggagacagaatggagaagctggatagtgttttttttttttttttttaaggttcttttatcatcagatatgacacaaagggaaacatcaaaatgcaccgtaaagttaaatcctagttacctttttttgaagctgttggcaaggtttgaccacttggggcatcttctgctgtgagatgacacttgaaaaacacccatcaaagttttcctggtaggaatctctctttactgcgtgtttttttgaaaagctgacagagaatatgctttggctttgacactaatgaagtcacccatcatcaattacatacagctaattgttgggagctagagctagaatccaagctttctgattctctgcatggaagaggaaatgctctagggcccttcagggcaaatcttaaaaggaagttcttggccgggcgcggtggctcatgcctgtaatcccagcactttgggaggccgaggtgggtggatcacgagatcaggagatcgagaccatcttggctaacacggtgaaaccccatctctactaaaaatacaacaaattagctgggcgcggtggcgggtgcctgtagtcccagctactcgggaggctgaggcaggagaatggcctgaacccaggaggcggagcttgcagtgagctgagatagtgccactgcactccggcctggtgaaagagcgagactcagtctcaaaaaaaaaaaaaaaaggaagttcttagtgtgtaattgaccatcagggataaatgggcttcaaaagtgttaattgtctccttacttacagtgagtttctagagatagccctgtctttcagaaattctctgacatctgcttgcgcaatgttataaccactttcccacactactcccctccagaaatctcattgatatgtggcgaggacacgccttagctatcaccccaatggatgcttctttcattgacccaaatccagaatgtaatggggaactgaatacaagttggatgtctccacccttggaaagcacatcttttgttcttactgaagtagtttaacaccaccagatgatcaagggatcagggtatctttctggtatctttttaatcactgaaggactttgacagcagtaatggtggcattgttgactcttaaatttctgaacgtttcacttaatggcaagtgaagagatatagaatcccccaaagagtgtcaagatgctaacttccaaccctatttttatgtactgaagaggcctcagtgtctcactgaactctaacctttttgtcagtgttcctcaacactggatgcgtattattacataacctgaggagttaaaaaatacaataaccagatgtccaattaaataaaattagaatctggaggaggtagaactcaagcatttacagttttgttttgttttttttttaagacagagtctcgctctgtccccaagtgcagtggcacaatctcggctcactgcaagctccgcttcgtgggttcacgccattctcctgcctcagtctcccgagtagctgggactacaggcgcccgccactacgcccggctaatttttttgtactttttagtagagacagggtttcactgtgttatacaggatggtctcgatctcccgacctcatgatccgcccgcctcggcctctcagagtgctgggattacaggcgtgagccaccacgcccggcaagcatttacagttttaaatctcccagtcagaataaattcttattgagggccatacctagcctgtcttcatcaaactcataggtgaatctttgtcaaacctataggagagagatgcaggccatagagatggtcttgctgaaggtcttatagctaaattagttcagatccaggaaccagattctggaactgattgcacctatattatgttgtgtgtcagacactcccaggacctgtttggtaataattaggacagctgacatacttgttgctaattttgagatctgggcaacaactgtgtaggctgttctttcaacctctttcttcttacttctttacttttccttcagagaggagaaagccacccctgtgctatagccaccgctccaattctgactctaggtaggtcatgaaacagactgagctattattgcatcaacacataaatcctgtcatttgggtattattctttagagaactagagattacctagctgcaacctaagtttcctgaattagaatcatttgagcagcaccatcttaattggctcattaacatatttgtgaccaggcacagtggcgcatgcctgtaatcccagcactttgggaggccgaggcgggcggatctcttgaggtcaggagtttgagaccagcgtggccaacatggtgaaaccccatttctactaaaaatgtaaaaattagctgggcttggtggcgcgcgcctgtaatcccagctactcggaaggctgaggtgtgagaatcacttaaacccgggagatggaggttgcagtgagcagagattgcgccactgcactccagcctaggtgacaagaatgagactccgtcttaaaacaaaaacaacatatttgttcacttttgaaccctgtggtgtcttttaactttgttaagggcccttggttagcaaaattatgaaagtttaggaaatttggctattgagtatattaagtacaactacaaaatcctctgagttctccaggaagcctaaaccttgagcagtatcttattcaagtggagtatatatcttcaagaatacagatttttaaggtaagtagtttttcgtctttgcatctcctaagaccattgttaacaaccttgatattaaacgaagaagtgaatgtaaacctccttttgaacatattttttataaagaaatattttgttaattggagtaagtagtattgttatgaaatcactgtgtaattgttaattgtaaactgcaatgtctattttgtgttgtaacaatgttgccataaaatagctttgctaaatgtgaaatgactttaatcccttttgtcttcaatatacttcataaaggaggaaatgatgatttacacaatttgtcatgaagcttccgtgtttatgagaaattccaagaagtaagagccaagaggacagatattatcagaatatgggacataagaaattgcatatagtgtcaagggtttctatataacaacttaatttatttcccttgcatatatagtaggggttaacattttgctcaatgttaacgggggacataatggacataaaacattggatagctttttatttaaatgagctaaaggtgtgcgtatacacatgcacttataaaattaaagtcatatatgtatatacacacagacttatgtgacttattgcatattcatttacgtttgaccaaatcttttgtcaatttctcaagaacaaattaacctttatttaatacataaatcaggtccttttaagtgtttggaactatgttatcagagttgattaaacccatcaaagtaaatgtactagtgagtcatcaatatgaagattagaagaagtaatcactttgagaaactgaattccatagttactttcaggcagtcatattactgtggtttgtttcccttcaagtcagtgcccttgcctggccttctgttatctgagaagagtgtatttgagacaactat

SEQ ID NO: 94082 - DNA, 46285 bp, Homo sapiens
ttatctgttatcagtggctcattcctggaagcagagtatgcatgtgtgtgtgtgtgctgaatgagctctcatctctaaataagtctgaaaaaatccctcaagaatgttctacaaaatccttggagatataccagcacacatagctttcctcaatcacccagtctgtaccactcattttagcccctgttcatatacttccttgtaccatttttcagtgtgtatttcttgtaccctcagtaaaactaagctactgtcactgaaaccatgctttatatttctcttgtataattacccaaatacaaggctgagtgtcctttaattgttaaacaagtattggttcaattaaacggaagtatttcatagaacttccaaattagggccgggcatggtagctcatgactgtaatcccaacactttgggaggctgaagcaggtggatcacttgagctcagatgtctgagaccagcctgggcaacgctgtgagactccatctctacaaaaaataaaaaataactagccaggtgtggtagtgcacacctgtggtcccagctactcaggaggctgaagtaggactgcatgagcccaggaggtcaaggctgcagtgagatgtgatcatgccactgaattccagcctgggtgacacagcaagaccctctcaagaaaaaaagaaacacaaaattaaaatacaattttcattaaaaggaattatcatttcaaagttatgattagtctcagctgggcgtagtggctcacgcctgtaatcccagcactttgggaggccgaggaaaagtggatcacctgcagtcagaagtttgagaccagcctgaccaacatggtgaaactccgtctctactagaaaaacaaaaattagctgggtatggtggcacacacctgtagtcccagctactcaggaggctgagaggagaatcgcttgaacccgggaggtggaggcttcagtgagccaagagcacaccactgcactccagcctgggtgagacagagcaagactccatctcaacaacaacaacaaaagttattagtctcaactactacacaattacccttttgaaaagttttttacgaataaaaagttatattactatatttacttattttattttattttattttttgagatggagtctcactgttgttggcctgggctggagtgcaatggcgcgatctcggctcactgcaacctctgcctcctgggctccagcaattctcttgactcagtctcctgagtagctgagattacagctgcccgctaccatgcctggctaattttttgtttgtttttttttttgtatttttagtagagacagtgtttcaccatgttggccaggctggtcttgaactcctgacctcaggtgatccaccagcctcccaaagtgttgggattacaggtgtgagccaccgcactcggcccatatttaaatagtattatatttaaaatagcacaggttgagcatcccttacccaaaatgcttgggatcaaaagtgtttttgaatttcagattttctcaaatttgggaatatttgtatcacactggtcaagcatccttaatccaaaaatctgaaatccaaaatgctccagtgaacatttccttccagcatcatgtcagtgctcaaaaagattcacgttatggggcatttcagacttcagatttaacctgtaacttctatttcaatatgttagactaggacaccatttatatcttgcacaaaactccacaaattaaacatgtagtcctagcatggacaacacagcaagaccccatctttcaaaaaaaaaaaaggaattagcctggcatgatggtagtcgtagccactccagaggctgaggcaggaggagtgcttgagcccaggagtttgaggctgcagtgagctatgatcacaccactgcactttagtctgagcaagagtgagaccctctctaattaataaataaataaatacataaactaaacatgtagcattatttgtccttaaagctcaaataatgtccagagcaagttcatataccacacaatttatttatttatttttagaaatgttcatagtagctttattcataatagccaaaaattgaaaacaactcagtgggtgaatgataaataaactgtggtacatccacaccatgtaatagtactcagcaatgaaaagaaacaaattattgatacatgcaacaacttggatgttaaagccaatccaaaaaggtcacatataaaatttcatacatttaacatttttaaaatgacaaagttaaaggaatgaaaacagatgagtggctgacagagatcagggaaagggaagagggtgggagggacataaatgtgactataaaaaggcaacacaagaattccttgtggtgatggaactgtatcttgactgtagtgaatacatgactctacaccagacaccacacaatttaaatagcagctattctaaagcatcctagctttaaatgcatattgaattacctatttcaaagggaattttaatcaatcctacttagacagaatgtttccttcaaatttgttacttggtacaataattgctaacacttattgagcattcatcatgtttcaggtactcttctaagccctttataaatattttctcatttaatcttcaaacaaccccatgaagtagatcatgctcccagctaacaaataggaaatcagacaagttaagtaacttgccaaagtcaacaagttagagtggaagagtcaggatttgaatccagacagtctaactctgcaatgagtgcacttagctacttctttcacgttgccttttaaacagggatcaattatgaggcaacataagccctgctgaatttgactccttaaaagagaaatgctatgaatcccaaaaagattttaaagtctaggtgactttaaaaagtctagcaataaatgtaggtgagaaaaagactatcagcactaagagggatggttttgaaaaaacatgtcaattgtgtatttaatgttaacgtaaaatagcccaatccacgaattaaagattagcaaatgatttatacttattttaccttctcatctcacactcaagaatgtgtaatttttgcccagcacaataatccagaggttataaatataccttgactcaatatattactgtcccaatactcttccttccaatcggaagcaaagaggtcctcttacttgtatctcccctggacaccatctcctttgtgtacttcagccttttttttttttttttttttttttgagacagggtctcactctgttgtccaggctggagtgcagtggcctgatatcactgcagcctccacctgctgggctcaggcgatcctcccacctcagcctctcgagtagctaggactacaagcgtgcaccaccacaaccaggctgtacttcacatctctatcatctttaatcactcctatacaggatccttttctttcactgccaagcatattctagtatttctaacattaaaaatttgtgtttaaatccaattcgtctcattccttctgagaccaatctcctggaaacgtcgtctacacctattgcctccagttactaataaatattttactagaaatcttcagcaatctctttcttccatctatcactacaaagaaactgtactttcgaagatcattgtttttgccaaaaccatggccaaatactttgttcatcaagtttgttcatccttactcctctaaactttctgggaccttgtttcctctgacattccattttttaggggcttttctcctccttactttttatagttccaatttatttactgattctttttttttcctcatgttccaatagtaggtggccccagattctgaaaatcattcattctacataggaaaataatcattctatatgactcctaaatctctgtcttcagaccattacagctgcaacccagtcctgcatttccaacctccgtcaaactcattaagttcaaaactaatcatcgcttcacatcttattcaatctttctttgccaactactgtactctgttttgctcagtaataattccattcttccttttcattttctttccccactaaaaaaactttcatcatcttttactcttccttcaacatcacctttacatctaaaaagttaactttgttaactttatcatcaaattctcacatatttcttttttgaagacagagtctcactctgtctcccaggctggagtgcagtggtgcaatcttggctcactgcaacctccacctcccaggttcaagtgattctcctgcctcagcctccccagtagctgggactacaggtatgcaccaacacgcctggctaatttttgtattttttggtagagatggggtttctccatgttggccaggctggtcttgaactcctgacctcaggtgatccgcctgccttggcctcccaaagtgctggattacaggcataagccaccacacctggcctctgacatatttcttaaaaagatatacacttgtcctcttagatgtgggcttcactttcattctcaattatagctacttatcttgttcccaatcttagcccctttccctaatccatcatcagtctttcattgtcaccacttttatcattaccttgcttgagatcccataacagttcccacacatctatatgaagtcaaatcagaattcctgtctggctttcaaggcactactgtatttgatcttattatctgatcctatccaggttcattttctactacttcagttcttccccaagatccatcgacattagcctttccaaaatccaacattctgcatacacttcctctaaggttttgtatacaacattggggggtggggggatgggagtgaagaaagttccagtagacaattctttaagaggttaaatgacagccctatacccaaacatgcaccccctactctagacagatgatcactctactgttctccctgcctttttattcaccttatcgccaattaaaaacacttctctactcccgtttgtctcagtaaatcttatccattttccatgtgccatctcctcagaagttttcctgagcttggcagggctagttctcttgacaattccacttgcagttgtggttcacagcacacaagtaaagctttgttgtttctcttgtgattagtccgtgaaggggctctgacttgatcacttttctacattgccaccaatacctaaatccaaccgccccaatgccaatacttagccagtgttaagcacgtagtgtttaaacacacctcaacacgcaagtattgtaagataatgaccacacaacagggcaaatacaaagttaaagcaggtccgggaccaatacaaagcatctttaccaataaaatgccgtgatgacgctgtcacccattccggattcacgaatcattcttcaaaagtccggctccaaaactatgtggagactgaaatcccctgaagaaaaaaaaaaaaaaccgccaaaatgacagctaagacagaggccagactaacccctggccctcccaaattccctctcgctccacaagtgggttcacaagagacacaaacgcacccaggaagacctccgctccctcagacgcggggcgggccctgcgacttcactctgggagggacatttccgctcacccagctctgcgaccctcgctcctgcggagtcagcttctgctcgcggagggggaagggcaaaaggacagtgcgtcccaacccgtccctctccagctgagcctgtcagagaccagcccagctctgaaatcaagccgttgagaaaagggaattcggccctccgccgcctcttcagtttaaaatcgtttcccgactcgctctgcggccccacgcaggaagcctccttggcgcctcgccgattccgtatcagtgaagcaactaaaattgccattttaactgagggcaaggccgagccacttaaccactatcgtcaacctttccaatcgtgctcggttgctcctcagttttcctaccggtgcgaagctttctctcaaatttccgcccgtagtaggcatggcggcggcacctcaccactgattcgttgaattccttcccggtaatcttgggcactagcgggcggagttgaagggcgcttggaccccagcggcgatctgtgtttgggttcgcgctctgggagaattttggctttgctcgccttcctctttcagaagactcgaaatcggccagcaggtctgcgagatttgaaacgcgactgttactccttgttttccggttctggccgcgggagcctctcgagaagcgtggaaagaggagaagggcgtataccttgtgaccgcctctggttgtcttgggctcgcgcctggcgccgctacgtggagtcgctctctcgtcgtcacttttggctgccgacttgttgagtagaagtgcagactgatgctttaagactcagggagaggtctttcccttatctccaccccagcaagcaccccagagaccttggagatttgtcttgtttctagacacgtgtactccaatgttgtgcggaggaggccttaaatattcgagaagagagtgggaactcctggaattttaagggatttctgtgtatttccaaaactgacttttaactaccggcagcgtgggatttcgtgattgtttttcgccatcgtgtggctccaacatgtacttcccttcttggttaagtcagctgtacaggggtttatccagacccatcagaaggaccacccaaccgatctggggttctctctacagaagtctgttgcagagttcacagaggagaattccaggtgaaaatagcgaagagatctatcctatgaacagtacttcagcctgttatctacggccggagagcttttattccatttttcattttttcccccattattattattattattattattattattatttgagacggagtctcgctctgctgcccaggctagagtgaagtggcgcgatctccgctcactgcaagctccgcctcccgggttcacgccattctcctgcctcagcctcccgagtagctgggactacaggcgcccgcgaccacgcccggctaatttttctgtatttttggtagagccggggtttcactgtgttagccaggatggtctcgatctcctgacctcgtgatccacccgcctccgcctcccatagtgctgggattacaggcgtgagccaccgcgcccggcttttcccctgttcttaactggatagccttatgtgtagaagcgaaattcactctcattatattcattatacggcagttttttttccctgagtttttagaaagaccacaaaaaggtaaccacgtaatatatagaatactctgcttttggttgatgccttaaaaaaatccttcttcggccgggcgcggtggctcacgtcgttaatcccagcactttgggaggtcgaggagggcggatcacgaggtcaggagatcgagaccatcctggctaacacggtgaaaccccgtctctactaaaaataaaaaaaaaattagccgggcgtggtggcgggcgcctgtagtccccgctgctggggaggccgaggcaggagaatggcgtgaacctcggaggcggagcttgcagtgagccgagatcgcgccactgcactccagcctgggcgacagagcgagactccatctcaaaaaaaaaaaaaaatcatttttcacagaattataatagtgttttctagtgtacaagtggctgttaaacactagattcatactaaagctaaatagttcctacaccgtccatttctgcagtttctaaaatcctatttcatttgaggaagaaatgtgcaatattaagaattgggtaattaggattttaggtcaatgcaaatgctagaagatcaaaaaaattttgatttcctaacacaagacagaaatttacattcagttattcacttggcttttgacacatttgcaggtaaatttaatagtgaatgaattaaattacatactctgacttattttattttataaatttcccctgtagccctgacatacctaagatatattttgagaattttcatttttaagcaacctgcaagtgatgtatttttaatcttgccttttaaagtttctttttttttttttttttaaagaattcagtagctttgttgtccggaccaacacatgtggagagttgcgttcgtctcacttaggccaagaagtcaccttgtgtggatggattcagtaccgaaggtaaattgagaaagacagtctaagaatgcatggtggtggttttcccagggcaattccaaacctttactaatttacaaccagtccgaagaataaaacgttttgcaactcctgcaggattaagaacttactgaattttcaactttgttttagttttgaaagacccaagtgtcattctcagtagacattttgaaagacccaaatgtcattctcagtaggtacatctcagtaacatctgttgaagggtrtaacaacgaagcttgatccaccagtggactgaaatgatactgggcttactaagactgaagagttcctataaccagtaattaaaaatgggccagcctcctataaaccagctgttaaactccaatagcatgggggaaaagctcatcttattccatgtaggtagagaagaagcctagaaacataaacagtgattccttaagatcagagcccattttttgttgttgttcatctctctattccagaacatgcctgaatagaacattaattcacatggaagagattcaaaatacataggttatatgaccttcttaaagaatatgtcccagcctggcgtgtaagcctgtaatcccagcactttgggaggccgaggcgggcggatcacgaggttaggagttcgagaccagcccagccaatatgatgaaaccccgtctctactaaaaatacaaaaaaagttcgccaggcggggtgatgctcgtctgtaattctagctactcaggaggctgaggaaggagaattgcttgaacccagaaggcagaggttgcagtgagctgagattgcgccactgcactccactctgggcaacagaacgagactccgtctcaggaaaaaaaaaaaagtttgtcccaagtaggtggatatttttcccataagtttagtgactgtttcctgaacccaaatctgaagagggtttctgtacctgttcctgatgctgaggatagtatgagaaatagaggttggatgttaaaatgttggcatttctgggaccttttgatgattcatagaggtattaaattagtagttggaactcttccagaaaatgttagattgtatctttttttagaaaaagactatattgctatatttcaaaaatgatccatcagatgtttctattatgctaaaatactatctttggattttactatatgcaaagtttccaaatttaataaaattttcttaaaaggacttaagccaatgaaatttcttttaattgttcatctataataatttttcattaataagccatctgtataagattaatataccaggtaagtagacaataaaaattgaaactgaaataaaaaacaatcttttttttggcaatgagctacatagataacaattgcatgaatgtaactaatgaaggtacataattatcataaaaaacatgaaaaattataattatcataaaaaagaaacatgaaaaattgcatggatttttgtttgctttttattttgtatgcttcaactttggacttagagattttatcttaaaatgtttcttttccccccccccattaatcaggcaaaacacattcttggtcctaagagatttcgatgggcttgttcaagttatcattccccaggatgaggtaatagaaaatttcctgttattatctaaaagcttctttgatgctattgctggggtaagctaagtagttagatgaatatgttagaggttttaaattcagaagtttattgttaatgaaaactgaaaaatataagcaatgttaagacatagcaaaaagaccagtgacccagtagaattaggaacccaggatacgaacaaaaaatttagaggaaaaaaatatataaatggcttgtagacataatgaaagtatgcccagcctcactcataggtagagaaatgtgaattgaaactgcatgtaattgtcatttttaacacattagattgacaacacactgtgtttgggaaagcaggtgctcaatacctggagggagtacaaattggcactagctgaagggagagcaatttggcaatatcaaaactataaatgcatatatcctttgagccattaatttcacttctggtaaattatcttatatctagacttatacagatataaaatgacatatgtacaaggatattcatttcaggattctttttaacggaaaaaaattgggaaccacccagatgtcctccaataagagactggcttaaaaaataatgtatattcttacaatacaatactctactcagccgtacaaaaaagaatgaagaagttctattctaatagggaaaaaaaaatccaaggaatactgttaagtgaagaaccctgtattcttgagtatacaaaagagcagctgttaaactccagcactctaagtgctgtcatctgtataaaaactgggggaaggatgcagaatatacattcagtgtgtgtgtgtgtgtgtgtgtgtgtatttgcttgtatatatgttaggaaatgtctctggaaggatacctaagtatctggtaacattaggtgctgctgggggaaggaactgagggcgttgaaaacaaggataggagggaagctttttactatatctttttgtaccccttgaatttgaagccatgtgacggtattactgctcaaaaaagtatttaatttaattaccattgaaattagataaaatatgacagagtgatattctgaaaaaaaaatttttttaattaaaaaattcaaggccaggcatggtggctcacacctgtaatcccagcactctgggaggccgaggccagcagattgagtacaggagtttgagaccagcctgggcaacagtgaaacctcgtctctactaaaatacaaaaaattggccaggtgcggtggctcactcctgtaatcccagcacttttgggaggctgaggcaggtggatctcgaggtcaggagtttaagaccagcctgaccaacatggtgaaaccccgtctctactaaaaatacaaaaatttagccgggtgtggtggcgggctcctgtaaccccaactactcaggaggctgaggcaaaagaatcacttgaacccagaggcagaggttgcagtgggccgagatcacgccactgtactccagcctaggcaacagagcaagactctatctcaaaaaaataataataatacaaaaaattagctgggtgtggtggcatgtgcctgtagtcccagctacttgggaggctgagttgggagaatcacctgagcccaggaggttcaggctgaagtgagccaaaattgcaccactgcactccagagtgcacaccagagtgataccctgtgtcaaaaaaaaaaattaaaattaaagaattagataaaataaagaacttccatcatacttactgggcaaagttggtttctattgcaatttttactaacgcttgtatgcctaagaaaaatattatttattcagctcttaagttttgaaataaataaagagcaatgaattatcttttagggatcaacatccagagatgagtatagctaaccctggagaactcctttgactctgacccattattgctatgggatttaactgcccctaagactaaccctggagacaattgcttttcaagtatgtgggacttgtttgcactaataatagtcattcttacccttattttcctttaaggaaagtttttttaaagctcttaactaatagttttacttgctgtattatatagagtcaaaatggggatgcagtttttactaaatttggtaataaagtcattaaggagcagccccagcctttatggtaattaagctgtgactattaacgttttttaaaccatctacttataattactgaagattcctgtaagttcatttgtttctcagarctcttttcccccttgttctgtagtcggcagcctctgtgaagaagattttatgtgaagcccctgtggaatctgtggtgcaagtgtctggtacagtcatttcccgtcctgcaggacaagagaatccagtaggtagtttcgaagatatctgtgtaatttttgcttgtwtgcatttgcaccatctstgtacacattctggcaacacatgactggacattaggcactaaagttgaataaattctacaaatgaactgacagatttcaaaatcttgactataaacaaacacatctatgtaaatatgcatgctaagtctcactctgtcaccaggctggagtacggtggcgtgatcttggctcactgcaacctctgcctcctgggttcaagtgattctcctgcctcagcctcccgagtagctgggactacaggtgcatgccaccacgcccagctaatttttatatttttagcagagagagggtttcaccatgttggccaggatggtcaccatctcttgacctcatgatctgcccatctcagcctcccaaagtgccrggattacaggcgtgagccaccgtgcctggccctttttttttttttttcaggaygggtcttgcagtattacccaggctggtcttgaactcctgggcttaagtgatcctcctgtctcagcctcccaagtatcagactgcaaggatatgccatgacatttgttgatatctgaacacatcagccacatatgcataagaatgtcaaaatcatgcacagacatgtatgttttatactatacactataaggactttgcacattttacatatgtaaataaatgcatagattctacaaatgtgtattttgtgtatatcctgatgagtaatttttaaaacccttccttctcactctccaagaaaatgccaacaggtgagattgaaatcaaagttaaaacagctgagcttctgaatgcctgcaagaagctgccctttgaaattaagaacttcgtgaaggtaccaacctctgttattaataaaatagagtatctagaaaatgttgatgactagtcaagtattttcagagttttttaaagaaaagtttaacttctacaaaattaagcattttattgtagacacatcatgaagtgttctcttagttctacaacttcttggcacactgtcctgaaataatgacagttcagtaaactgttgcagtccctaaatacctagactgttttttcagacagattaaaatgtgattctctctttaaaacttgaggtgttatattattcaagtttttcgttgctattgtttaacatttgaaaggaaatttatgtctagcttagaaatggccagatgggacaggggatcctgtatctattaagtgataaaatgtgtgcttagagcaacgcttgacctcccaagcatataaatataaataggattaccataatttagaatgttctttgccaaagtttaagggcttgatggagctgtacactcatatgattttcagctttgtcacagtttatagacttatatattcctaatttttaaactgatctattaacagatttttaattagtcttaattaattagtcttacatttaagttcatggccaattagtcttacatttaagttctcaatacttacgtttaagttcatggccaattggtcttacatttaagttctcaatacttaattatctaattagaaagagcaatgtaattatagagttgaccttattttgaaaaagaaaatatatagttttccccagatgagcattcaaaaagagaagttatagacatttcctaagttttcagcacaaagagggatgcagagatttgtagccttgaaaataagcaaactaggctgggcatggtggctcacacctgtaatcccagcactttgggaggccaaggcagacagatcacaaggtcaggagttcgagaccagcctggccaatgtggtgaaaccccgtctctactaaaaatacaaaaattagccaggcgtggtggcaggcacttgtagtcccagccgctcgggaggctgaggcaggagaatcgcttgaacccgggaggcagaggttgcagtgagccgagatcatgccactgcactccagcctgggtgacacagcaagactccatctcaaaaaaaaaaaaaaaaaagagagagaaaataagcaaactatttctactagtacagccatggagattccatccactgtccctttgcattctttacacttgtagtcagcgtcccattcaggtgaatcttctactctgatgtatctttttttaggagatggggtcttgctatattgcccaggctggcctcaaactcctgtgctcaagtgatcctcccacctcagcatcccaagtagctgggattataggcacatgccaccatgcccagatacagcataatggtgctgtgtatttttctaagagacctttgaaatctttaaatttttttcaagattcaactatgggcttaaattaatggataaatgtttagtaaagtaggcaaatttcagtcagtgaagagtgatattattaataatgaatagtaaaaaaatgtaaaatctgcactgatgacaaacttagaagttgtaggaattaacagcatacagtgggctacttaatgatagaaactaaagacagagctaaaatttttgaaaattcaaactctttctaaagataatacctttctaatattgaaaaatatttaaatataaaaatctttcaatttcttyagaaaacagaggctcttcggttgcagtatcgctacttagacttgcgtagtttccaaatgcagtataacctgcgactgaggtcccagatggtcatgaraatgcgggaatatctctgtaatctgcatggtaagagaaatgcctggatgctctttggagctttgtagcatctcttctattttattcagcagttttattgtatcctttccttagcatgaggtcaagatgttgccagaagtctggaattcactcaatgtgtaatgtagtttttgaagaaaagttaacattattttaaagatgataaagatgatagtcgctrttacattgattaatgtattatagtatttcccatcatcatcaaaggcaggacagccctttggctttttctataagatttcttttcttttttttttttgagacggagttttgctctggctagaatgcagtggcattaccacaactcactgcagcctcaaccttttaggcttaaccgatcctcccaccacaccttcccaagtagctaggaccacagacatgcaccaccacacccagccaatttttaaaaattttttgtagagacagggtctcattatgttgcccaggctggtctcaaacttctgggtttaagcaatcctcccacctaaccatcccaaagtgctgggattacaggcatgaaccacgatacccagccagttttcttaattctttatcatgtgcatacatcacttattgggagctcaaaaatgtcatgtgaattaaactagacatctcattcagtcctggactttttctgctatatttgtgttatttctacactaacagaacatttaaaaaatcagaatagttcagtagacaagaatccattaaatatttagaattattttatgtgaacagtatgctttatgaacagaatagtatttatgaaaatcttcagcttccttcttagatttgtagaaaccagcaccagtaggcttggtagcttatttcagctaaaattcttaattaaagggaagcctcagatttgttgtactatattgtggacatcatatatgacaaatttcacattcctatctactaagtgataatgtttctctctttttagggtttgtggatatagaaacccccacattgtttaagaggaccccaggggtatgtayattccttcaatcagtctattaataatgtcctattagttataaagctagactactttgcttttatattcacttggtccacttttatttactgcctcaggatggtcatattaactaggtttttytgaagaattgagaaaattatttgggtattttgagtcagaatcattttattccacataaattttctttcctttgagtttttttgtttttttttttttttttttttttttggtttgttttgggtttttttttttgttttttttttttttttgagacagtctcactccatcacccaggctggagtgcagtggcatgatctcagctaattgcaacctctgcctactggatccaagcgattctcatggctcagcctcctgagtagctgggattacaggcatgcaccaccatgcccggctaacttttgtatttactttagtagagacggagtttcaccgttttggccaggctggtctcgaacacctgacctgaaatgatccgcacaccttggcctcccaaagtgctgggattacaggtgtgagccaccttactcagtctcatttgagttttatagatgtaatcattaataaattggtattttttgtttttgtttttgtttttttagacagtctcgttctgtcacctgaatccgcctactggattcaagtgattcttctgcctcagcctcccaagtagctgggactacaggtgcgcaccaccacacctggctaatttttgtatttttttagtagagacggggtttcgcatgttggcccagctggtctcgaaatcctgacctcaggtgatccacccgcctcagcctcccaaagtgctgggattacaggcgtgagccaccgcgcccagccaatgaattggttctttaagaacaaatctattggccgggcgcggtggctcacacatgtagtcttagtactttgggaggctgaagcaaggaggatgacttgatcccaggagttcaagaccagcttgggcaacaagaccgtatctcttgtcttaaagaccctaaagaaaaaaaaatggaaaagaaaaaaaattattttaaagaacaaatctcttatatattaaaaattgacatttttcggccaggcacagtggctcacacctgtaatctcagcactctgggaggccaaggtgggcagatcacctgaggtcaggagttagagaccagcctgaccaaccatggccaacatggtgaaaccttgtctctactaaaagtacaaaaattaggccaggcacggtggttcacgcctgtaatcccagtactttgggaggccgaagcagatggatcacctgaggtcaggagtttaagacccgcctgaccaatatggtgaaaccccgtctctactaaaaatacaaaaaaaattagctgggcatggtggcaggcacctgtagtcccagctactcaggaggctgagacaggagaattgcttgaacccaggaggcagaggttgtaatgagccaagatcacgccattgcactccagcctgggcaacagagcaagactccgtctcaaaaaaaaaaaatattagccaggtgcagtggcgggaacccataatcccagctacttgagaggctgaggcaggagaaccgcttgaatccagaaggcagagtttgcagtgagtccagattgtaccattgcactccaacctgggtgacagaccaagactctgtctcaaaaagaaattttttttaataaataaaaatggacatttctggccgggcgcagtggctcacacctgtaatcccagcactttgggaggccaaggcgggcagatcacgaggtcaggagttcaagaccagcctggccaacatggcgaaaccccgtctctactaaaaatacaaaaattagcggggcatggtggtggcaggcacctgtaatcccagctactcgggaggctgaggcaggagaatcacttcaacctgggaggaggaggttgcagtgagccgagattgtgccatcgcactccagcctgggtgacaagagcaagattctgtctcaaaaaaaaaaaaaagacatttctaaacattaatagttactcgatttatacagtctatgaaattataaaactacagtttaatttggaaatgcaattaagaattacttggataggaaatgatacacaaaattcattcatctagtaacaaaattggaaattcaattccgcaagcataaacttaacacctaccgtatacaatggtgtttaaagtctactatgtccaagtctttttagggactcaaagataagcaggaaattgtctctgtcattgtaggaactttgttctttagtcattcattgataaactgaagtaacaacttctactagttagttatactttgggtttgtttttgttttttaataatctgtcttctctctctttctctctctttgaaagggkgccaaagagtttttagtaccatccagggaacctggaaagttttattctctccctcagagtcctcaacagtttaagcaacttctgatggttggcggtttagacaggtgagctttttttatgctagcagttgtcagaaaaggaaaagagaaaaacaaagggaaaaaaggaaacacaaaatcctctctgttctcaagagaaggatagaaaatttatgagagtttggagaatacttataaaatgccctcataatttatagtcatcctttattaaaggtttattgggtggccactatgtacaaagctctatggtagtagatgtgagaggggatttaaaaaaaaaaaaaaaagaataggttctactctcaaggtgttaaggctagtaagccagaataggataatgaataaaaccaactgtgatataaaccaaatgtaaatgtattgagatttgcaagttaggtgttaagagctttaaaattatactttttgaggaaatatagaaaactttgtgagctagatcgttgaggacagagctacatttcagcaggtgaagatgagagttggaatggcatagcacagaaagtctcaagtgtatccatggcacagtaaagatttcactttggccaaagcaaaagagtatatatgaagaagcatgggctaaaaaaaatgttttaataaaaagagctggcatggactgatttgcatgctagtctaaatacatgaatatccagaggtgccagtgtttattttgaaaacaatatatagaatagttaacttctcataggtcagctgtatgtctaattcgattaaagcatcataaaaaataaaagtatttcttacttttttttttttgagacagagtctttgctctgtcacccaagctggagtgcaatggcgcaatctcggctcactgcaacctccgcctccctggttgaagtgattctcctgcccttgcctcccgagtagctgggattacaggcgcacgccacccacgcccagctaattttcgtatttttagtagagacagggtttcaccatgttggccaggctggtcttgaacgcctgacctcatgatctgccygccttggcctcccaaagtgctgggattataggtatgagccgccatgcccggcccttcttacgttttttaagtatcattgttttatagcttgcattgctttaaacttttggggaaaagtgtgtatgtcttcctagaatcataactcaattaatgctatttctcaattgtagatattttcaggttgcccgatgttatcgagatgaaggttcaagaccagacagacagcctgagtttactcaggtacaaagttatattcacttgtttcttaaaattcaggcttactattttgaaatagtattttcaagaccagtgcagtattaatactttacttctcattacattttatccatcagatatttaattaaactcacctgcagttgagaaactaattattcttttttttttattcatttcatgtgtccttttttaaatttttttctttccttggatagcacaggggccacactgtcattcaaattttagtatgtgtgctgccaaaacgagcatgtgtccttttcataaagaatgtggtcagcaactaaggaatgccagaagttcctaaagtgttctaatgttcatgataaagtccttaaaacaaatctcttatatattatgaataattttatatattgatattttaatctaatatgtggacttaccaaagctgttacgatttgctttctgtatgatagcattttattttactttatattattttatttattttattttttgagacagagtctcgctctgtctcccaggctggagtgcagtggcgcggtctcagctcattgctgcctctgcctctcaggttcaagcaattcagctgcctcagcctccgaagtagttgggactacagatgcgtgccaccatgcccagctgattttttgtgtttttattagagatggggtttgaccatgttggccaggatggtctggatctcctgacctcgtgatccacccgcctcggcctcccaaagtgctaggtttacaggcgtgagccaccacgcctggccaatagcattttaatcatgtgttgaagtgaaaaaattatgagctttggagttggacagacctgggatcagatgtagcttcgctgcttactaattgcacatacgcaaataagtaacttagttctctgagccttcatgaaatggttgtgggaactaagcaagttaatgtatgtaaggccattagcacagtgtctgacataaaagagatgtacaataatatttataccctctgcatgtattatgtgcaaaattctatagtaacttgaaagcagaaaaatatataaatgtgtatatattgtggctaaattagtttccatatggtactttggtttcagattgacatagagatgtcatttgtagaccagactgggatccagagtttaattgagggtttgctccagtattcctggcccaatgacaaagatcctgtggttgttccttttcctactatgacttttgctgaggtgctggccacctatggaactgataaacctgacactcgctttggaatgaaggtacttatcttcacttttctaggactctgtccccaaataatcctgcagtctttttaaaccactttgaaattgacaagtgttacacactgttagatgatatttttgttgttaccttgttaccttcgttgttacagagctagagcaagagagaataatagcatgttagcaatacagtgctttctatctttcatgttccaagatccatttccaagagcgagattcttgctataaagtttttattacttgcaagttattgattatatggatatgaatggtaacttgaaagaaaaaataactattctttccttttcagttttttttttaatccaaggagttactaagtttccttggtccataaaaagctcaaacatatgacaatgtttattcaaattattactatctgtaagtatttaaagcaggggtagaatttatatagaacagtttcattaccaggcctctacttgtttgctcttaaagagcaatatcccttgatccctgtaatgctagtgacatttctatatctcagttctcagtgcacattctttagaaattggtcctgcctggtctgtgaatagtcagtggtcaattcttagaatgaaaaaaatacaatacacaaaaagtcataactaccaacttacagctgccaactcaactacttcttgtttcttcgtttgtaatatggaatagtggttctttttttgtatttttttgagacgtagtctcgccctgttgcccaggctggagtgcagtggtaagatcttggctcactgcaacttcggcctcctgggttcaagcgattctcctgcctcagcctcccgagtagctgggaytacaggcgcataccaccacaccggctaatttttgtatttttagtagagatggaattttgccatgttggccaggctgacctcctgacctcaggtgatctgcccacctcagcctcccaaagttctgagataataggcatgagcctctgcgccgagcctggaatcttaatctggttcttaagtcagactgcttgtgttaaattctggctctgccacttactagctatgccatcttgggcaagttccttatttctgtgtcttggtttcatctatgaaatagggataataaagagtgctaacctcatatgaaatgaatgagtatatgtaaaacactggtcatattgcttaacccatggtaaacactctttgaatgtattctataaatgttaaattatcaagatctattctcttctttaaaatcttgtttgtaaaatgttttcagataaaaattacttcatatttagttatctctttttgttacccattttccagattatagatatcagtgatgtgtttagaaacacagagattggatttcttcaagatgcacttagtaagccccatggaactgtgaaagccatatgtatccctgaaggagcagtaagtgaagtacagttctatgtttctctagaatgtatgctttggaagtaactttgtccaatactgtcatatttaaacttcagaaagaacaattctttttaaataaaaatagggatttttgctgggcatggtggctcacacctgtaatcctagcactttgggaggccgaggcgtgtggatcacttgaggtcaggagttcaagaccagcctggctaacatggtgaaaccccatctctactaaaaaatacaaaaaattagtcaggcgtggtggcatgtgcctgtaatcccaactacttgggaggctggggcaggagaatcgcttgaacctgggaggcagaggttgcagtgagctgagatcataccattgcactccagcctgggcaataagagcaaaactgtgtttgaaaaaaaaaaaagtaggtatttttatacagaatctaaagtatttctaaaaccataagtagagaacaataaaattttatgaatgtgagtttacattccagatccggggtgtttttcttttttcttttttttccccccttttaaacaatgctatcagccaggcatagtagctcatacctataatgccaacactgtgggaggtcaaggcaggagaattgcttaagctcaggagttcgagaccagcctggggaacatagacctcatctctacaaaaattacctggcgtggtggctcacacctgtagtcccagctattctggaggttgaggtccaaggatcacttgaggcaaagtgttcaaggctgcagtaagccatgattgtgccacggcattctaacctggataacatagcaagaccgtgtctcaaaaataaatacataaataaatgatgctatgaagtactcctgtacttcattgtggataatatgtgagcataaaataatacgtagtattctgtctgcagcctcagttgtctgtctatctcttagccctgtatcagcaccagcatggccattgcatgttgattctttatcttctgagagttctcatctcagttgcactaataacagggaaataaaaggagatggagctaaaaaagcaaaaaggaaggggaagaagtgggagtagaagagagagagagaatggttgggctgagcaagtgctgactctaaagcaacggtacacgtctcttttctgtaggtagtacatctgctttaaaaaataatttcataagaagtattccagttatattttaaataagattatgattttgaaagtctatactcatttggatacataagcattatattcagaatggagtaagaactcaggaactcagtctcattactttctttttttttttttttttttttttttttttttttagagtgagtcttgctctgtcgcccaggctggagtgcagtggcgcgatcttggcttactgcaacctccgcctcccaggttcgagcgattttcctgccttagcctcctgagtagctgggactacaggcgtatgccaccatgcccagctaagttttttttgtatttttagtagagatggagtttcaccatgttagccaggatggtctcaaactcctgacctcaggtgatccacccgcctcggcctcccaaagtgctgggattacaggcgtaagccaccatgcctggcccctcattactttttatttacttcatatattcagtaaaaagtaatttattgtcatgcggggcacggtagcccacgcctgtaatcccagcactttgggaggccaaggcgggtggattacttgcggtcaggagtttgagaccagcctggccaacatggcgaaaccctgtctctactaaaaatttaaaaattagctgggcattgtggtgggtgcctgtaatctcagctacctgggagactgaggcaggagaatcacttgagcccagtaggcagaggttgcagtgagcatgagatcataccactgcactccagcctgagcaacagagcaacactccatcttaaaaaaaaaaaaaaaaaaagtaatttattgtccatactctagtccagacataagaaatatgttcaggtaagctcagtatgatattttgcctatcattatttacaccatttcaagtttgttctttctcaagtagatataagaactgcaggagtgtggatcatgttttcatctttttataccttccgtacctagttaaatgccacattaatatagttaatgatatgtggcatatgggagaaataagatggttaaagtatgatttcacaaatcacatggtttattgccatacaaagaaaattttttcttaggttcacaatgcttaaaagagagagagaataagggccaagcgtggtggctcatgcctgtaatcctagcactttgggaggctgaggcgggcggatcacgaggtcaggagttcaagaccagcctggccaatatggtgaaaccacgtctgtactaaaaatgtaaaaaattagccaggtgtggttgtgcgcacctgtagtcccagctactcgggaggctgaggcagaagaatcgcttgaaccccggaggcggaggttgccgtgatctgagattgcctcactgcactccagcctgggcaacagagtgagactccctctcaaaaaaaaagaaagaataacatgaacaatcctcacagggaaaacactcagtagctgaggtgcattaatcacatagcgagtgagttccaaaattattaaagtccacttgctctattaggatggaagtagtcctctggggaaggtaaagtctaattaaagtttgaggtgtactcttatatgagctgttcttgggagaagctggtttgaccaccacagtacacactgtatctaaggtccctcgatgctagagggcagtgccagtgtgggtgggtgaggcttcagagattagctccaagactaacagggtatcacccatctcttggctgtaggagragcagttgacagagtatagccagtcacagcatgtgctatcaaagtgtctgtcgaactcttaagtttatatgtatttttgaagtccagtagttgaggtcagtaattcacacatgggagttatgataaggtttgaggtaacattcctggggggaagagggagttcactcraagttctcacataggggatctgataaaacatcatgctctcgaaaggagggggaatacaccccaaaacatcaaaccatgttaagtgtttggatcatttcaaagttatgtaacatgataaccataatgtctcacttgaaagacactgagataatttcaaaagaaagattttaagaaacctcaaataatcaaattctgaatccttttattgatctgaaagttttctttcacaattcagttgtagacattcatgttgaacatttatcctgcatattagatatagagggtctcctgtggaatacattcacagctatttccaataagagctgcatgcccagcgtggtggctcacacctgtaatcccagcactttgggaggccgaggctggccaatcacatgaggtcaggagttcaagaccagcctggccaatatggtgaaaccccatccctactaaaaatacaaaaattagccaggtgtggtggtgggcacctgtaatcccagctacttgggaggctgaagcaggagaatcacttgaacctgggaggtggaggttttagtgagctgagatcacgccactgtactccagcctgggtgacagagctagactccatcgcaaaaaaaaaaaaaaaaaaaaaaaaaaaaaaaaaaaaaaatctgcataactggaaaaaataagcactgtaacaagctttaaaaatgtgtcatttggtagcagaaattggatttttttttttttttttttttttttttttttttgagacagaatctcactttgttacccaggctggagtacagtggcacaatctcggctcactgtagcctctgcctcctggtttcatgtgattctcctgcctcaacctcccgagtagctgggatttcaggcacctgccaccataccagactaatttttgtatttttagtagagacggggtttcaccatgttggtcgggctggttttgaactcccaactttcaagcagtccacccgcctcagcctcccaaagtgctgggattacaggcatgagccaccgcgcccagcccagacattgaatttttattaaatcttactattgtaatagaaagacacaaaatatatttgtcatttgatcgcataaccatgtttatgaagctaagtgtcatactgacaagtttactttgatttttctttcatcagaaatacttaaaaaggaaagacattgaatccattagaaactttgcagctgaccattttaatcaggtaaggagttaattagagcagtttttttccttatacagattcaatatttttaactattattaactaaactatcattatcattagttttgagcatcttgttatttcagatcattcttctgcttttatttactttttattttatttatatatttattttgaagatgtagtcttattctgtcgcccaggctagagtgcagtgttgccataacagctcactgctgccttgatttcttaggctcaagcaatgctcctgcctctttctctcaagtagctaggactacaggctcaggccaccatgctgcccagttgcacccctagtcccagctacttaggaggctgaggtgggagaatcacctgagcctgggggtcgaggctacagtgagctgagatcgcaccaccgcactccagcctaggcatcagagcaagattccatctcgaaaaaaaattgggctgggcacggtggctcacacctgtaatcccagcactttaggaggccaaggcaggcggatcacttgaggtcaggagtttgagaccaatctggccaatatggcgaaaccccatctctactaaaaataaaaaaaattggccgggcgcgttggctcacgcctgtaatcccagcactttgggagggcaagacaggcggatcacgaagtcaggagattgagaccatcctggctaacatggtgaaaccccgtctctactaaaaatacaaaaaaattagctgggcgtggtggcgcgggcctgtagtcccagctactctggaggctgaggcaggagaatggcgtgaacgcaggaggcggagcttgcagtgagccgagattgtgccactgcactccagcctggacgacagagcaagactctgtctcaaaaaaaaaaaaaaatgcaaaaatgtgccgggtgtgttggtgctcacttgtaatcccagctactttgagaggctgatgcaggagaatcgcttgaacacaggaggtggaggttgcagtgagctgagatcacgccactgcactactgcctgggccacagagcaagactcagtctctaaataaataaatattagctgggcatagtggcacatgtctgtagtcccagctgcttgggagactgaggcaggagaatcacaagcccaggagttcaaggctgcagtgagctatgattatgccactgcattcttgcctgggtgacagagtgagaccctgtctctaaaaaaaataaaggatccagccaggcacggaagcgcatacctgtaatcccagcactttgggagcccaaggtgggagtatcactggagcccagaagtttgagaccagcctgggcaacatagtgagacctcgtctctacaaaaaacagaaaaaaaattagctgggcatggtggcacacacctgtcatcccaactacttgagaggctgaggtgggaggatcacttgagcccaggagatcgaggctgcagtgagctgtgttcaccccaccgcactccagcctgggtgacacagtgagaccctgtctcaaaaaaaaaggaaagaatcttaggtatgataacaggaataaaatgaaaccatataggagtaattaaattatgctataatcaaaggaattaatattaaagttcctatttaaaatcttgttttctaagacttaatagaggaaaaatgctcttataatgatatgtaagaaaaggaggctataggactatatttatactgattataaccatgtaaaaacactatatttgtatattgaaaatggactacctacctctactaccactatttcccaagcctcatacctcaagcacaacgaacaataagtagatttttatataagaaaaaaagatcaggttagtggttcccaaaatgggttgagacaaaatcagaaaagtcagggcaatataacaagcttttcataaagttaaacaaatttaaagaactatcctttttttctctgtcggcggtggggatggcggggggatgaaatatgtcttttctttataaaattaaaaattggcaaccctttatcttccaattttgtttatttttattttattagtatataaaatctgcatctaagaaccataggaccaggaaataagcctgaaggttaactttggcagctttcagttgatgggactattattacattttcttctttcattcttctctytcttctcctgttttctttttctttcctaatttcctgaacttttatataagaaatgggtattactactactattttttatgagtgttttaacttgatttggcttctaattgctttcagaagatcttatgtgtttttagcaacatatggcatacacatggttcaaaaaataaagaaccattaatgatgaaatgcaataatcatttgctctagcctgccccatccatcctagtattctgccagagtatctctgtttttggaaatatctctacatactttttttttctttttacttaattcatttaaaccttgttaacttcctgtcatgagagatgaggctcacatatacagacctcacctagttactctgtaccttctgcacagctgtctttctgaacctttttttttttttttttttttttttgagacgggagtctcactctgtcgcccaggctggagtgcagtggtgccatctcggctcactgcaagctccgcctcccaggttcacgccgttcttctgcctcagcctcctgactagctgggactacaggcgcccgcgaccacgcccggctaatttttttgtatttttactagagatggggtttcgctgtgttagccaggatggtctccatctcctgacctcgtgatccgcccacctcggcctcccaaagtggtgggattacaggcgtgagccaccgtgcccggcccttttcttcattcttttctgagttgaagccacccatcctggatcccaggttttcctctttcttttttgtgttggagtatgtaatcaagtaacttcctaagaaagcatgtgagagatcaacttactgagttcttacaaaatgtctttatgtttaaaacctcacacttgatcaataataatttggcttagtacaaaattttgaattgacagccatatcatcttagaagagtgctgtccaataaaactttctgtaatgatggaaacgttttatgtctgcattgttcggtgtagttgttgctagccaatgtcgctagtgaacacttgaaataggatagtacaactaaagggctgaactttttactttatttcattttaattaatttaaatgtaaatagcaacagtgcattgctagacagcacagctttagaacatttaaggcattgctttactttcttctcccatctgttgttactgatgagaagtctgatgctttgatgcttgtgtgaatttattccattatagcagagctggttttttctcattggaagctttttgccttctgattctttatgttctgaaatttcagagtttgtttgccttttgatcatttttcatttaatgtgttacacacttgaagagccctttcaatacgaaggtttatgtctttttatgtgtagaaaattattttattatctaatgattttgacctcatcattttttctagtctctctttggaatttctactagttgtatgtcaaaccaatttaacctcttttcttttgcatgtcatttttcaccattttctttgtcttgttctattttcctggggatttcttcaactcttctgttgaatttttttttatttcccagtagcttttttcactgcatcttattctggttttattcataaaatatatttttgagtacctttgaggattcaagttctcttttggtccataacttatgttttctctggggctaattttttgggtttatcttggtcttttttttttttttaatgctgcagagtttcttcaatgtacagtgattgttggttatctgtacatattcaagaaaggggcattttaaaagctggttggggccgggtgcagtgactcacgcctgtaatcccagcactttgggaggccaaggcgggcagatcgcttgaagtcaggagtttgagaccagcctggccaacatagtgaaaccccgtctctactaaaaatacaaaaattagccaggcatgttgacacacatctgtaatcccagcgactagggaggctgaggcaggagaattgcttgaacccgagaggcagactgcagtgagccaagatcaggccactgcactccagcatgggtgacagagcgagactccatctcaaaaaaaaaaaaaaaaagctggttggaagctcaagagagaggctttgtaaatggttaggtttagtttagcatgagcagcaaggctgctctaggcactcaaggcttaagagtcctgagcctctccagaattctgcagggtaaaatcagttccttcttgtgctgaggctgcctccattgttctttatgccagaccttcctgcaccttgcttctttaatcattcctactcagttcacttgcagtctgccaaaaattcgcagaaatctctcatctgctgatattattctccattcttcatcccctccccctttttttcattatgttgaaatgacttttttttttttttttttttgagtctcactctgtcacccaggctggagtgcaatggcccagtctcagctcactgcatcctctaccttccaggctcaaatgattctcatgcctcagcctcctgagtagctaggattacaggtgcacagaactggcacagctactttttgtatttttagtagagatggggtttcaccatgttggccaagctggtgttgaactcctgaggtgatccacccacctcagcctcccaaagtgctgggattacaggtataagccaccgtgccaagcctactttataaaattcccttagtatcattttgaatgggttcatggagataatagagacaatctcttttaaattctcttctattgggaaccggaaatctttgtattataagaagataaattaatcccactgttcaaaaaaaaaaaaaaacgtgaataagtctttttcttttacacaggaaatcttacctgtattccttaacgccaatagaaactggaattctccagttgctaatttcataatggagtcacaaagactggaattaatcagactaatggagacccaagaggaagatgtggtcctactaactgctggagagcacaataaagcagtaagaaaaattacttccaagcatcagtgctgttgatgctgaacaatgccttactctcctatgtatatagtatacgtttgaactgtagactgttaattcataaaatggagctgctctgcataaatcttttttttttttttttaagagacggagttttgctctgttgcccaggttggagtgcagtggtgcaatcttggctcactgcaacctccgcctcccgggttctagagattctcctgcctcagcctcctgagtagctgggattacaggcgcacgctgccatacccgactaatttttgtattttagtagagacagggtttcaccatgttgcccagactggtctcaaactcctcagcttaggcagtccacccgccgcagcctcctgaagtgctaggattacaggcgtgagccaccgtgcccagcctgcataaatcttatagtgctttataatgcactgtataaaaacttaagggttggccgggcatggtggctaacgcctgtaatcccagcactttgggaggccgaggtgggtggatcgcctgaggtcaggagtttgagaccagcctgttcaacgtggtgaaacatcatctctactaaaaatacaaaaattagctgggtgtggtggcgggctaatttttgtattttgtagtcccagttcctcgggaggctgaggcaggagaatcacttcaacctgggagggggaggttgcagtgagccgagattgtgccactgcactccagcctggctgacagagccagactccgtctcaaaaaaaaaaaaaaaagggttttttttcatagctaccagcctccattggcattacttaaatagattagacctgaccctaattagaaaagccacttagattaaggggtagtgaaattagtcatataaccatgaaaaaatattttcagtgtcaagatttcacaaatgaagaaaattaggagtctcaaatttttatacatcatgcattcgtaaattgtggagggacggatcagaccactggcgagctggagggctggcagacacccctggaccaacttggtcaaagtgggaccctttttcctcaagaacagcagctgtaggtgatgagtgccatcatgcactggctgagtcatgattcttcaggggatatggaagactgaattagctttagggatctttgtaaaatatagaaaagtatagtacaaagtcaaatatgaatattaaaaatgtactgtaaagatcaagcatgatataaatttattttttcactttagtatatagttttttcaaaatgatagtgtgtctaactagtacttcatcaagttctttcttctaatctatattttcatttgtcattgtttcttccacagaaaaagtttcagagttcagcttcaaagctaaatgtaatcccccgtctcyccttcccctacaatagtaaaatgaagaaagctatttatttccaaattttattatgaatgcatttcttaaaaaagaacatgggattttgttcctaactaatttggctattaaaccttctcttggtatgaactaaacatgctggtgtttcattctcaggaagttataggtctgattcctacaaggccttccttgaaagagagctagaaaccagactttcgaggaataacattaacattctgaaaatgtcacaatgaaggtccgttatgtagacgtaaatgtaagatagaatgggctgcaaaataataccctatcatgtctctaggcatatgtcactgttctaaccagctgtcctttctcagggaagtcctgcataccataggtagcacttattaagcacttagtatttgccaagcccgttctaagcactttgtatacattaactcatttaatcctcatgccaaccctatgaaagaagttctgatactgttgctattttaaaaataagaaaagtgagtcacagagcttaaaattttgctcacagtcacacagctaggaagtggaggagccggatttctaacccatgaagttgggttccaaaattcacactcttatttttttttattttttatttttttttgagatggtctcactctgttgcccaggctggagtacagtggtgygatctcagctcactgcaacctctgcctcctcccgggttcaagcgattttcctgcctcagcctcccgagtagctaggattacaagtgcatgccaccacgcccggctaatttttgtatttttagtagtgacggggtttcaccatgttggtcaggctgatctagaacccctgaccttgtgatccgcccgcctcggcctcccaaagtgctgggattacaggtgtgagccactgcacccctccgcactcttaaatggacctctaatctgcattacctatagtgatagccagccttcactgaacattaacagtgtgccaggcacttaccaaatcctcaccacaacccttcaagagaagtgaggaaataatcagaacgactaccactcacatactttgtcaggtcctgcaccttatgtatattatcttaagcttcacagcagtcttttggagttgatatttttatcccaattttacaatgaaaaagggtacagagaagttcgtaattagccacactgagattcagrcccaggtctatgaagtgctgatccctgtgttcttaatcaccgagttatcagtactcacccagttggttgagtgtgatgattgttctcaaccttgttgcaattagacttatcctcagatctttgtgtcctgagaagcaaagggcatcctatctgttaattggctaatcctttcctagagaatggcctggcttcggaatccaggctgtgtcatttcctgcctgctctgtcaagaagttaactcaatgtttacgtcttctgtttgcagtgctctttgttaggaaaattacgactggaatgtgctgaccttctagaaacaagaggagtggtgctccgtgaccccactctgttctctttcctttgggtggtagatttcccactcttcctgcccaaggaggaaaatcccagagagctggaatcggcccaccacccatttactgctccccaccccagtgacatacatctcctgtacactgagcccaaaaaggtaccgtatctatacttccaaatcaaaaggaaatgtgtatataaaggcaaagaacttcagacttcaaggtctgatgaaagataggacccagttctggaagccccagaagaaattgtggagtttgagttagtagtaatacattgtctttaaaaatctacagggtcttcaacccgtagaacagaaaaccagacattttctctaacataaagtatctgtgaatcttctaggcccgtagccaacactatgacttggttttaaatggcaatgaaataggaggtggttcaattcgaattcacaatgcagagctgcagcgttatatcctggcaaccttactaaaggtaacaaacatcatctgctatcctgggcttatttttttaccagaatatttttcagttttgtgttgttgttgttgtttgcttgtttgttttgtttttgagacattctgtcacccaggcaggtgtctactggtgcattcatagctcactgcaatctcagtctcctgtgcttaagccatcctcccacctcagcctcccaagtagctgtgactacaggcacatgccaccatgcccggcaaatttttttatttttttgaagagataagatttccctatgttgctcacactgctctcaaactcctgccctcaagcactcctcctgcctcggcctcccaaagtgctgggattataggcatgaaccactgcatctgacttaaatcagcctattttattaaacatttgttatgattggaggattcacaagatacaaaatagcatcagctatctctctacctttaatgtaggacttggaaaagtaaataataatattaaaagtaaataataatattaaatgcttaaatagtatctggcacatagcactattaaacagtactatttaaatactaattaatagtgcatattaaatacccttattataatagtgcagataaatatccttattctgcccactctaaagatgagatttactgaggcaacttacttaacttgccaaagtgacagtacaaaagtaagcagagtcaggatttgaatccaggtgaggtggctcttaagcccatgctcctaaccactaccctgcttaaaaaaaccatgcagcttgaaaaaataaaaatcaaatcaaatgaaaaccatgcagtctgaagtgactaaaaatgttgataatgttagagaaagagagagaagtttgaaaagattttatatcacttattagatactactttagctatatttaaggcagggatatattttagtgatagtggagtaatcaggattttttaaaagtaaaagaagagtctgtacaggtgcagacctaagaatttgaagtttgttggtgatgctgtagaaggcttgggtaggtttcagaaaggaaaaggtctgagagagtctggtcctaaaagatcgttttgtgggattaactgacaagtgtgaggtaggatggaaggagaactcagaccatgagatgactcctttagctttaagcyttcagagtccttaaagtttaagggcattgtgaaatctgttaacttttttttttttttttgagacagagtcttgctctgtcgcccaggctggagtgcagtggctcaatcttggctcactgcaacctccgccgcctgggttcaagcaattcttctgcctcagcctcctgagtagctgggattacacgtgcgcactaacacacccggctattttgtatttttagtagagacagagtttcaccatgttggccgggctggtctcgaactcctgacctcaagagatccacccgccttggcctcccaaagtcctgggattacaggcgtgagccaccgcacccagccgaaatctgttaacttttctcctgccaattcaaagcctccaatcacccattgggttttgtgtgtttgtttgtttgtttgattttaaaaagatggagtctcactctgtcacccaggctagagtgcaatggcatgatcataacttagggcagcctcaaactcctgggatcaagcgatcctcctgcccagcccagcttccagtcagcagttttcagcctttttcattcctctcattgtcaaacttttcaagagtcactaagaatacattacttttttytttttctcgctttgtcacccagactggagtgcagtggcgtgatcttggttcactgcaacctccgcctcccaggttgaagtgattctcctgccttagcctcccgagtggctgggaccacaggcacacaccatcacgcccagcatttttttttttttttgtatttttagtagatacagcattttgccatgttggccaggctagtcttgaacccccaatctcaggtgatctgcctgcatcggcctcccaaagtgctgggattacaggtgtgagccaccacacctggcctagaatacattacttctgttgcttccctaaatagtggttctcagccctgctgcaccttacaatcaaatcacctggaaagcattaaaaaaaacactggtgccttggctacacatcagaccaactgaataaaagagttctaagcataaggctttggcctctgtttgtttgaagcttcccacttgatcctgatttgtagcctggttggagaaccatttccaaacacactttcaacatttctacatgtactgccccacaaaagttactcacaagatcactaaatccagtggcctgttcttggcccttaagttctccttcctcccggcagcatttgacaatgttgcccacttagtaatgctctcttcccttggtctctgtgacaggagagtttcctgctttttatccccacctcctcatttggtctcactctgtttgcattgtgaatacagtaaaagctgcatttactgaacaccaggcatttttgtacatgttataatcatctatgacttgtctttttcccttactaacctgcaaatcacttaaggwaattttttctttacacttttccaatraacttttattattggttaagtcagktttagctgttttaaaactcaactttgtttcccctttatcatctaagcctagatggtggcacttagtggaccttcaaaatatatttaaactgaattatcttttgaatttcaggaggatgtgaaaatgctctcccatctgctccaggctttagattatggggcaccccctcatggaggaattgccttaggtaaacaacttttcctttkataagataaactgaattccaytgcactgtctcaaattcaggttctcagtttgtgttggtagaggtggaaggatgagtccaagagttccatgagaatgtaagtttctgttgaaatttcagtaatatattttttaaatatatcttaacagttataaagatataacttaactgataatttgcatttgaaagatcattaatagcttaaaactgcagatcttaagtcaatattgttcaaatccccatggcctcacatacgcactcattggagtctggaaagcactgctccataatgttcagcttgtatgaaaacaggaagatgccagtgtccttctgattgccatggttactcactttgcttgttttgtcaaagcaaggaagagtaagaaattctaggaagctcacctagattgtaggccccaacaacagggacttccttctgtgtttatggagttccctgccaagcaccaaatacactgttgaatctgttttagggcctttagtaagcctttactaggaacactaatcgctgtgacaatccaagtagcatgtgaacattagtcctgaatacttttccagaatgagatagaaaagaacctctcaaacaaacaaaagttctctaaaaaggtagggaacgatggttggctacagtttgttaaagattcttatttaaaagttttctacaacttttatagaaaaactaagttatttccaacattagattacatttctcatctgttatctttgtattttactcacagggttagacagactgatatgccttgtcactggatctccaagcatcagagatgtcatagccttcccaaagtccttccggggacatgacctcatgagcaataccccagattctgtccctcctgaggaactgaagccctatcatatccgagtctccaagccaacagactccaaagcagaaagagctcattgaatcatgcataccatgcagaaagttgagcttttaggttttgtcctctttgcttccccaaggctaaagtcagatctagagttctgccacaggtctaacaatcaagtctttagatggaaggaatccaggcaacattcttcaccacaacgaagaaacagataaaagatacccaattttgacttgatttcatgcatcatttggattttttttggttaggactttttttgaagttcctttttacttaggtgtgaaagatggttctttgttgaaataatatagtggtttagtgttttcaaatcatgtttctcatacccagatagtagattattcacttaggacagaggtaatcaaattatgtgtgaaatgtaggaaaatgcttgcccctgtaaactagtgagttgatggagcatttgcttcatcatcctcatcaagagaatcatataaattaagctttataatgacatttcaaccatcaacataatatagtgaggagtagcataatattttttaataatgcagaaaacatcactgaaatgagagtcacaaatttttcttcagtgtttcagcctgagtaagttacataaacctcgcttagcctcccttcctgctaatgtgtaaaatacatacttgccctggctacctcaccgggctgttattgctggaatcagaggagataacatatatggaagataaagtgaataaaagtactttgaaaaactawaaagcattccacaaatatgagatgatggtattatccatccataaataggtagatatatctctattttatagtttcagattaaacaaaactgatatcaatagtaaaagtcattttacttatcaattttctgtttttttttttagttttaaagatattattggccgggagtggtggctcacacctgtaatcccagcactttgggagattgaggtgggtggatcacttgaggtcaggagttcaacaccagcctggccaacatagtgaaaccgtctctactaaaaacacaaaaattagccaggcatggtggcgcatgcctgtaatcgcagccactcgggaggctgaggcatgaggtttgcttgaacctgggagatggaggttgcagtgagccaagatggtgccattacactccagcctgggtgacagagcaagactccatctcaaaaaaaaaaagacaacaaagatattattaatcactgaacactattttctctcaattataagtaattgaaaattctaatcaaccttagattaacctcaaatgtgcgaaaaagtgaacaccaaaactcattgtgattttaagttctaatcatacacataaaagttttaataaactaataattataaaatgaggccgggtacagtggctcacgcctataatcccagcactttgggaggctgaggcagacagatcacaaggtcaagagactgagaccatcctggccaacatggtgaaaccccatctctactaaaaatacaaaaattagctgggtgtggtggcacatacctgtagtcccagctactcaggaggctgaggcaggagaatcacttgaacccaggaggtggagattgcagtgagccgaggttacaccactgcactccagcctggcaacagaacaagactccatttcaaaaaaagacaaaatgagaacaaggtcttgatcagtgattttgaaattgttttcttctactcagtcttcacttctgccttgaaattcttttgatttataccttttttttttttgagacagagtctcgctcttttgcccaggttagagtgcagtggcaccatcttggctcactgcaacctccacctcctgggttcaagtgattctcctgcctcagcctcctatttaattaattaataattgatttaatgatttagtttaaaatgttaaattcattttaaaataacccattacatgttaacacaaatagcatgtttttattttattttattttgagacagagtctcactctgttgcccaggctggagtgcaatggtgcgatcttggctcacttcatcctccacctcccgggttcaggcagttttcctgcctcagcctcctgagtagttgggaccacaggtgccctccaccacacctggttaatttttgtatttttagtagagacgaggttttgccatgttgaccaggctggtctcaagctcctggcctcaggtgatccgcctgcctcagcctcccaaagttctgggattacaaaggcgtgagccaccacactcagccatgtttttattttaaaaataattattttcaaaaaaaaaatagaagagtaacattgttttatatttctgcaaatattttttatttctggcttaatagaagacactagattctgatatctgcttctgtatcctatctgttgttatatgctgttttggttgaagtctgtgaagaaaatctgaccccactcatatataaagttggaaaagggaggagtattttaatagctttgtctgataattatggatactctctttgataccacaccaaaatatgacaagtagtagagttccttaaaggctagttgcaatgtggattctgaaatcgtattgatgagcttttctaaagtccattggtgtaccttgtatttaaatagaacttttacctatgtgtgatatttgtaacaccagtccagtgattgatcatttggaaaatattggttcactgagttatgcaaatcttccaaatgttgacacattttgatatacaatatctaaaacaaaataccattaattaatattaccaccaatcccattacaaaagtctaagtctgaggaagctataagggcacagaagtgtatacaagccttccaaaattttaggtttcatttggaagcttgagttttatcattggcaacaaatgccatcagttttttccaagctgacttgttcttttttgagcaaatctctgccaaaattacccctaaaatatgaataatcaatttgtcaggttttttcaaactaaaaatgttctgtgaaaacaagcagctagttcagcttgtatctcaaacaattgtaactactttttctagggaaaaaaaaatctagacatccatactttatggcagatgtgcttcatgcatacttcccattttgtcacacagaatatcaaaataacgtgtactcaaggtcaagatttactaacaactaaaattccaaaactgctaaacaacagaatgctgaataaggtgatccaatttttaatattttatttgagacaacatctcaccctgtcacccaggctggaatccagtggtgtgacacagctcactgcatcctcaacctcctgggctcaagcgatcgtcccacctcagtctcatgagtggttgggactacaggcatgcaccatcatgcccggctcactttttttttctttttttttttaattgtagacacagggtctcactatgttgcccaggccggtcttgaactcctggactcaagcaatccccccaccttggtttcccaaagtgttgggattacaggcatgagctactacatacaactgaaatcttttaatatgcttgtcaaaaagttttctgattcagcaaatggcacttatatataaaagagagaacaagaagctggatgcggtggctcacgcctgtaatcccagcactttgggaggctaggtgggcagatcacgaggtcaggagttcgagaccagcctggccaacgtggtgaaaccccctctctactaaaaatacaaaaatagccaggcatggtggcccacgcctgtaatcccagctacttggaaggctgaggcaggagaatcgcttgaacctgggaggtggaggttgcagtgagccaagattgcgccgctacattccagcctgggcaacacgagcgaaactccgtctcaaaaaaaaaaaaaaaaagaatagaacttggctggatgcagtggctcacacctgtaatcccagcactttgggagggcagggcagttggatcacttgaggccaggagttcaagactagcctggctgacatggtgaaactccatctctactaaaaatacagaaaaaaaaattagctgggagtggtggcacacacctgtcatcccagctactcaggtagttgaggcacaacaatcacttgagcctaggaggcccaggctggagtgaggtggcacgatcttggttcactgcaacctccacctccagggttcagagtagctgggactacaggcccacactaccacacccggctaattttcgctttttttcagtagagaccgggttttgccatgttggccaggctggtctcgaagcctgagccataacctggcgaaaagatactttgaaatgtaacatcgtttttcacttcaaaatcaaggtattttaccaacttgtctttggtacctccccaaaaactgatctactacatttgcagtttcattcatttttccaacattaaggaataaacttgaagcgcttacattcttgtgggggaagtaagaacaaaacacataataggtcatggtggtcacatgaaaagtaaagggtaaccgattggggtaggtggtggtagttttgtgtgtgtgtttttttttgagaccaagtctcgccgttgcccaggctggagtgcggtggcatgatctcagttcactgcaacctccacttcctaggttcaagcaattctcctgcctcagcctcctgagtagctgggattacaggtgcacgccacacctggctaacttttgtatttttagtagagatgggggtttcactatgttggtcaggctggtctcaaactcctgaccgtgtgatccacccgcctcrgcctcccaaagtggtgggattacaggcatgaaccaccacgcccagccttcttttttcctttgagaaagtctcaccctggcacccaggctggagtgcagtggcaggatcacgggtcactgcaacctcagcctcccaggttcagttcccctgcctcagcctcccgaatagctgggactacaatagcccaccactacacccggctagatttttgtatttttagtagagatggggtttcaccatattggccaggttggtcttgaaatcctgacctcaggtaatctgcccacctcagcacccagccaggtggtggtagttgttttacagcctgtgtgagacattcgggtgagccccaggaaatgaaagaatgtgcttatttgggggagggggaggccttttttcttagacaaaattgggcattcccaacttacacgcatttagtgcataagctgacatttcaatgagattgtgaaatgacaatgggaagggccctgaaaaaaacatcaagcataaaaggcctgggaggccgggcactgcggctcaggcctgtgaaatcccagcactttgggaggatggggtttcgtctctactaaaaataccaaaatgagttggttgtgatggtaggtgcctatagtcctagctacaagaggctgaagagaatcgcttgaacccgggaggtagaggttgcagtgagcagcggttgagatcatgccattgcactccagcctgggcaacaggattcagtctcaaaaaaaggaaaattcagagagtaactgaagttttatcattaatgggactaaagtgctttagcccagaaacagatttgtaaaaccattactgctaacaaagacatcattataagcacagctgtactgacactgaaattaaaatttgacccatcttggaattttggccccttggtcctgtttccctgggacagattgccttaaaccagttgtgccctttatacccacttttggcatccctaaacacttagtgcttgccaaaaacctatcaccatggctatggattgtagattttcccaattccattaatgcctatcactagttgggcatttctatagtattttctataacttattttcccagcctcagactcaacatgactttctccaagtagctccatcaatactttaagctcaaaaccaattagcacaggggcctatgaaacctgacaatttgctcatatggagaattaggaaatattgcactttaatgcataagacaccttgtaaaatacccataaaattttaactggctgcagtgttaatgaagcaaataccatggagttataatagcttttgaatgtgatttatgcttacagctaatgaacagatgaaaagcactgtccttttttaagtaaacactacacactccagatggattgcaaaaatttattaaaattggagacactgttttaatcttcttgtgccatgagactccatcaggcagtctacaaagaccactgggaggctgaggatcacttgagcccagaagtttgaggctgtagtaagcttcaaaggccactgcactctagcttgggtgaggcaagaccctgtctcaaaaaataagacaagacttttagccacatttacagacttcaattaaaatgctacatgggaatgcagaatatcagatattttattgtcatcaagtaatcagtgagagagttcaagttggattgagatcatcatgtattctgcaattataatagtcccaacatttccaatcctcacctttcaagcagtaagctgcatgcttgcttgttgtggtcattaaaaaccctgaaagcgaagccaacatattaatcagggcaaaatacaaatgtgtgatgcttgttagtagagtaacctcagaatcaaaatggaacggttttacagtgatatcattatatttcatttggcagaatcattacatcattggttacactgaaaatcatcacatgtaccaaaagctgactcacctagtttaggataacaggtctgcctgtttgaagatgaaaaataatacccatttaaaatttgccctactcaatttccttctcagtcacattttaacttttaaacagctaatcactcccatctacagattaaggtgtatatgccaccaaaaccttttgccaccttaaaaatttccttcaaagtttaaactaacctgcatttcttcaatcatgaattctgagtcctgaaattaagggacaatacacagtaagacaacttgcatacaattaggagtaatccaaaatctccaaacattatagaatggctatattccccttttcggggcataaactagaatgttaccgccagatacatcagataggagcgaaagacttaatattgc

SEQ ID NO: 94083 - DNA, 453737 bp, Homo sapiens
  misc_feature (1)...(453737): n = A,T,C or G
tactaggtgaaaaggaagtttatggctatcagacaaacgcctatttagataccaggcgctctgccttgagggactggtgcttcaaatacgcacgtgtgtggcctccaacccttccacttttctcccagaaaagtggacttagaagtccccttctaagtccttctaagacttagaagtctctcaaaaaaggggactgagaagtccccttaactaatcctgaccttaacctatatactgatggaagttcatttgtggagaatgggatacgaagggcaggttacgccagttagtgaagtaaccatacttgaaagcaagcctcttcccccagggaccagtgcccagttagcggaactagtggcacttacccgagccttagaactgggaaagggataaagaataaatgtgtatacagatagcaagtatgctcatctaatcctacatgcccatgctgcaatacggaaagagagggagttcctaacctctgggggaacccccatcaaataccacgaggaaattatagagttattgcacgcagcggaaaaacccaaggaggtggcagtcttacactgacaaagccatcaaaatgggaaggagaggggagaacagcagcataagcggctggcagaggtagggaaagaccagcaagaatgaaagagagaaagaaagtcagaaagagagacagagagacagaaacagagagacaaagagaaggagtcagagagaaagagggacagacacagaaagtcagagtcagaaagagaggaagagacaaagaagtcaacgagaaagagagatggaagtagtaaagaaaaaacagtgtatcccattcctttaaaagccagggtaaagttctttctacccagacaaggcatattcttcttatgtggaacatcgacctatatctgcctccccactaactggacaagcatctgcaccttagtctaagtcccaacattaacactgccccaggaaattagaccttatcagtacccctcaaagctcaagtcagtcagcgcagagccatacaactaatacccctacttatagggttaggaatggctactgctacaggaaccagaatagccggtttatctacttcattatcctactaccacacactctcaaaggatttctcagacattctgcaagaaataatgaaatctattcttactttataatcccaaatagactctttggcagcagtgactctccaaaaccgccaaggcctagtcctcctcactgctgaaaaaggaggactctgcaccttcttaggggaagagtgttgtttttacactaaccagtcggggatagtatgaggtgccgcctagtatttacaggaaaaggcttctgaaatcagatgcctttcaaattcttataccaacctctggagttgggcaacatggcttctcccctttctaggtcctgtggcagccatcttgctgttactcgcctttgggccctgtatttttaaccttcctgtcaaatttgtttcctctagaatcgaggccatcaagctacagatggtcttacaaatggacccccaaatcagttcaactaacaacttctaccgaggacccctggactgacccgctggcagtttccctggcctagagacctcccctctggaggacactacaactgcagggccccatcatcgcccctatacagcaggaagtagctagagcggtcattggccaaattcccaacagcagttggggtgtcctgtttagaggggggattgagaggtgacagcctgctggcagtcctcacagccctcgctcgctctcagcacctcctctgcctgggctcccactttggcggcacttgaggagcccttcagcccaccactgaaacatcttcaaataaggaagaggaacaggctatgacctaatgcttgcttggactagtataagcatgccagggcaaatatttatgctaaattgtgggagctaggaacataaagtacattgatttattaaagctagcagatatttaagaatgttagcacaggtctttgaataaattttgcttctaagagaagttactatttattcctaattagatggggaggaaagtctttgaagaagaacctctactttaccttcttttttttttttttgagacagagtctccctcagtcacccaggctggggtgcagcagcgcgatctcggctcactgcaagctccgcctcccgggttcacgccattctcctgcctcagcctcccgagtagctgggattacaggtgcccgccatcatgcctggctaatttttttgtatttttagtagagatggggtttcaccgtgttagccaggatggcctcgatctcctgacctcgtgatccgcccatctcggcctcccaaagtgctgggattacaggcgtgagccactgcgcccggactaatttttgtatttttagtagagacagggtttccccatgttggccaggctggtctcaaactcctgccctaaggtgatctgctcacctgggactctcaaagtgctggggtgagaggtgtgagccaccgtgcctggccattcttgatattgttaatgtatgtttttattctgaaaaaggttttttgttgtttatttatttatttttgagacagagtctcactctgttgcccaggctggagtgcactggtacaatcttggttcactgcaacctccgcctcctggcttgaagattttcctgcctcagcttcctgagtagctgggatcacaggcacgtgccaccatgtttggctaattttcgtattttttgtagagctggggtttcaccatgtcggccaggctggtctcaaactcctgacatcaggtgatctgcccacctcggccttataaactgctgtgattataggcataagctactgtgtctggcctaattgtcctctactaatactgtattaggctgggaagactaactgctctagcaatcctcaaatctcaatggtgtaagaaaataaaaactttattttttgctcatgtcacagttcggtgcaggatagtgagaaggatctgctctcctttgctactggagacccaggctgcttctgtgtagtgcctagaaaagtctcagcagctgagaggtgaaaaggtgtggaggattgcatggaaggttttataagccaagcccaggggctgttgaatttcatgtcctctcatattttattggccagaaatcaggtatagtaccacatcgaactggaaaggaggccaggatatgctgcccaataggatgctccgagcagtgcactcagaagaatgaacaggtttggagacagtccaagtctgctgtgtcctcaacttccttgggggtattttccttacaatctataacttttttttttttttttttgagatggagtcttggtctgtcgcccaggctggagtgcaatggtgcagtctcagctcactgaaacctctgcctcccgggttcaagtgattctcctgcctcagcctaccgagtagctgggattacaggggcctaccaccatgcctggctaatgtttgtatttttagtagagatggggcttcaccatgttggccatgctggtctcgaagtgctgacctcgtgatctgtccgcctcggcctcccaaagtgctgggattataggcgtgagccactgctcccggccacaatctacaacttcaaatggaaaaggcaaagataaatattagtcctctatcagtaaggacacacatgtagctgctgtaacaaaggcaaaacaaaaaaacacaatgcaataacttaaacaagatacagtatttttcttgcttgcataaaaatctgaacaaagcactccagggttgacgtggcggctccacagaatcaggcactaaaggctcctggtatattgttttgtctccccgatcacctaacttccttcttatcatctgagatgacaactttacctccactgtagtgtccacattctggcaaactggaaagaggagaagggcaagtggaaagcaagcctttccctttaaaggtataacccaaaagttgtctatgtcacttgtgcttatgtcccattggccaaaacttagtaaccaaatcttggtaagcacccttgctgcagtgggagttgggaaatgtagatctttgtttaggtaagaaagaagagggcatggagggcacagtccttacattccagaccttagtcatggcgctacacctcgttgtaagggaggctagctattgcagcctttcgctgggtggccatgtacccagctagatctcaggggcactcttactaaagtaatgcatggagaatggatagcatgagaagcagtttctgctacaagtgcctttcataaaaagaactcctataagaaaaacaaacagggcctaaggaaaactaatccaaagggtaaaacatggggaaaagacaaaaaacaaaagaaaaaagaaaagcaagtttcccaggtagaaaatgaatgaagactgaggtacataagtgagaagtcctgtaaaattgataatccttttcattttgtcacaaaagtccctacttacattctaaaattccattaaatgtcacctttctgatatccccattttatttctctctctttgggcatttaccatgctgtagtgtactctaggccattcctagctttgtaactctctcaaggtgactctgcaggagatgcaaagtagttaagaggagaacccccaatactgatgtgtttataggtgaggtggtctgatgtcttagatttgctttaaaatattcctgcacaaaataaaaaggggaatagatgaaacaagattgacaaaatgttgattcattgacgcggtgtaatgggtatctgggtgatcatagtacaattttatctcttttgtatatattttaaaatttccataatatagcaaaacatgagcccagtccctcaaggcagccagatttgggttcaaaccctagtttgaccttttactcgctgagtgactttaccctgctacagcttcagtttctccaaatggaaataatatatactccattaaggttcttgtaaactctcaagtaagagggaatctgaggctctagcacacggcccggcccttaatagttgtactaatttttattttatttttcgaaacggagtttgctctgtcacccaggctggagtgtagtggcatgatccggctcactgcaacctccacctccagggttcaagcaattctcctgcctcagcctcctcccgagtaactgggattacaggagtgcgccaccacgcccagctaatttttgtattttttagtagagacggggtttcggcatgttgtccaggctggtctccaactcctgacctcaggttatcctcccgcctcggcctcccagagtgctgggattacaggcgtgagccactgcgcctggccagtagttgtactaacaagggtttctgcttgcgagcaacaaagactgactctagttgtggctaatttctttcacacacacatattaagtgccagaggtaggacttgagctcggatctctgatttccagacctagaactttttatgtgttattacagtcgttaaaaaccttacctggatttgtgctttgcaatttacgctttcgaacatgcaggaatgtagtttgggcatttgtctggaacttcggattctcgggactccagggtggccaaggcgcggaggtgactcaatgacattgaccggcctggatgcacgtgggttgctgagccgatgctgggaaggtacggggtttgcccggtgcaggccgccggaactcacgcacgcccctgtctctctcactcctggggtcggctctggccggtggcctccagctcagctagcggccggacgcgcagcccgccgactagccctccaggtcctagcgcgactcccggatcccggatccggcggatctggccgaccactcaccctcccctttccgcaagttagggggcggggcatcgggtttctggctcgtgatttgccggagctcctgcgctccccttctccaccccctccggctgtgtgagaggtcagcagaggggcggtctgcggggacaacaatggcggggttctgggtcgggacagcaccgctggtcgctgccggacggcgtgggcggtggccgccgcagcagctgatgctgagcgcggcgctgcggaccctgaaggtgaggagcaacggggcctcgcgggtccgggcttcactgggcttctagccgtgccgcctctgggcggctggcgccgggagagcgctggctgggtccggctgcccccgcgccccggttccgcatcagctacaccgcttgctttcytccctcccggagttcgcgtggcagcgggctcaggaggcatccctcgttgcagctgttcctcgcggggatcctgcggagcagagaggcctagggcagaggcagttgggtgcccgcacgccctccgaggcrgctgatggctttgggcaggcatattgctcgaggtctgcttccagggccccgcggcattggctttgtcttaagctttccagggtgtctttttaggtgtccttatagtttccgtgttctgttgcctctttccagcatttttgaagggacactgtgaactgttgcttaagtagtgttagggttgtgagtttgtcttatcttttaaagtattataccatgtcaggactgccaatagattttacgtttcatttgaaagcctgttttaattgtatgacaccccagtctactgtgtaccaaatgcatcccgtgaacttactttccttttcggtatagtggtgagcctgattttggcactgttctaaacacatttcatgactgttctgtatacctaggctgtcatgatggcagattgacaaacaggttggagtgcttgtgtgtgcttctgagctctgtctccagtcaatgtcgagtctgtcgttaattctggggcacagaccacctaacctactttataaggtttgttgaggcacttgaacacattctttaaaatgaaggtcccctgaaaaccatctgtcagctggttcagtgtgcttgttaaacttccttttaaaaaataattattaaaacattgccacataacttgatttatagtcatttaattttagacgttgaagacactttagagacgacctgccccatcctactctttaaagaggagggaaccgagccccaggtgggcagtatgagagctggagcttatcgacatggaagtgagtggcacctatgtttgttttgtgtccaattcagcgtgcggactttcactgttttctgtgttcccatacagtttagtgttctttaatctttatcattctgttcatctgtgttggccacttcaattgcagctgtaagacttatgcatttacataggaggcaagttagtatggtgtaaagtgtgggctttggggtcaggcgcatgaggctttgtatattggacaggtctcttccttgggcgtcagcttcgtccttgtagctatttttttcaacaaatatttactgaatatctcctgtcttccacttctggggaatgaatatggtttctgctttcttagaaattttactctagtagggagactgtaacaagtgtaaaatggtattaggggagatgcccgggtgctataagaaaataaaatagagggatttgaccaagccaagattttgaattctgtgttctagatactgttctgttgctttgcttgaactaatttattcaatctcacaacagtcgtatgtcccccatttacagaagatgaaagtgaggcactgagtgttaatgtgacttgctcgaagctatagtgccaataagtggcaaacaggatttagaactccagaacctgtgctcttaatcatactatgctatctacggtaagggagtgttttcctttggaactgaaaattgagacaagttttgaaggatgaagtgaccttttctaacaaacagaggagatgaatgttataggtgagagagcagtgtatgcaaaggtcctgtggccagagggaatgacaggttagaaraactgaaaaaagcctacagaggctctgatgcagagagtagatggtgttggggaagctggcaggagtcagaccatctggctcttatagatcacattatgaggtttggtgtttgtcttagagcagtgggaagacattgatgttggaggtgggagggatgacactgacattttagattggagaggctgagaggaaggctgttactgtacttactgttgtacacttgttatacacttactgtgtaatacatacgctttgatgattcttacctggttttttccttttaatgtgttggcagagactgcatcttgtctatttctgtgttcttagtacaatgtttgacacaataggtgctgaatgtgtaacaatagagtagcattatgtttgtgccggtaaagaattcctccttggggtgggaagcatctctgaagttcactatcactctaggggaacttgagctgctgcttagcttctctctgcgcttctcttctatgaacttgaaatatgctctactgagtctgtttgaagctgaatcttttgaagattttaacccctcccatccctccctccacctctgcaaaccttttggttggttgaaaagcagccagctaactctagggtctagtctagagaattctgaccattcttttagccagtcaacagagtttatttatttttagggtatatgtagagttcaccttttagtcttatttgttttgtgtatcagctttttaagcacattctgttttaatgcctagttttttcttctgcgtaaatgttttcagtggctctaggatgttggttttatggtaattgctatagttattattgaactcttatatgccttgcatgatttttctttgcttttctttttttttgagatggggtctcgctctgttgccaggctggagtgcagtggcgcgatctcagctcactgtaacctccacctcctgggttcaagtgattcccttgcctcagcctcccaagtggctgggactacaggcgcacgccaccaccaccggctaatttttttttgtattttagtagagatggggtttcaccatgttggccacctcgatcttctgacctcttgatccactgccttggcctcccaaagtgcttggaattacaggcatgagccaccgagcccaatggtgtgatttttcatatatcttttatccttataacaactaggtaaaaaatcccaattttacagtagaggaaacaaagctcagggcagttaagtagttgcttaaaagcacaattggctgaagtagaatttgaaccttagataatatgattctgaaggctttcttttctttcttccttttttttttttgagatggggtctggctctgttggccaggctggagtgcagtggcatgatcttggcctactgcagcctctgcctcctgggctcaagccatcctcccatctcagcctcccaagtaggtgggaccacaggcacgtacgaccacacctggctattttttaattttaatttttattttttgtagagatggggttttgctatgttgcccaggctggtctcaaactcctgaactcaagcaatccacccacctcagcttgcttttctaattacaaattgtctcatttgaatcatggtctcattgtgtgatgcattcatgaaatttgaatgtttaagccctgtgttacttgacatccattattttcttttgtaatcagtaaatatggaaaagaatgtttaggcttatatgaatgctttagaattgcctggaggttaatgtttccaacatgctgataaatttctgacaaatcatttgggaaaagaaatttctgagattattacagaaactagtttctggtgtaaaaaaatgtttatagacatttatatatttatacatctaccatttggattttattctgttcctgagaggttcagaacagaggtaaaaactgctctagtccttttctaagaggaaaagatgtgacatttttgatgaagagtgagggaaaaggatttgtttaaatgattccaaactttaaaaaatgtaggtgggagaacaaggatgaaaaaggaatttgggaagaaacacttttttggtggggctggaaacatagtgtttcattgtaggtatctggagttagatgcccgcaggagccatgctgaggtgctgggtatcagtggctggcttttgggccagggatacgaggctagagttagagttagaactgtgagccctgacggatatagtgagtcagttaatatttaattgaataaatgcttcgttttataaccctaaattaggatttggaagaaggaagaagagacaagaggagttagaggtatggtttgagaggagccaatgtagtgtagtgttaccaaacctaggaaagaaatttcaagaagtagttagcattcattcattcatttgtctagagatctagctctttactcagaaagtgtttgtggagcattttctaagttccaggtactatggcacgtacagaggagagaaaaagaaattaaaacatattccctaactatgtcccaggtgcagagaggctaaggaataaaagattgatgaggccaggtgtggtagctcacgcctgcaatctcaaccctttgggaggccaaagtgggaggatttcttgagctcaggagtttgagaccagcctaggcaacatartgataccacccccacccccggctatctctacaaaataaaataaaataaaataaaaattagctgggtgtggtggcacgtgcctgtggttctaggtacttgggaggctgaggagggaggatcacttgagcccaggaggtcaaggctgcagtgagctgtgatcacaccaatgtactacagcctgggtgacacagcaagaccctgtctcaaaaaaaagtctgggcacgatggctcatgcctgtaatcccagcactttgggaggccgaggcaggcagatcacctgaggtcgggagttcaagaccagcctgaccaacatggagaaatcccgtctctactaaaaatacaaaattagccgggcatggtggcgcatgcctgtaatctcagctacttgggaggctgaggcaggagaatcacttgaacccaggaggtggaggttgcagtgagccgagattgcaccactgcactccagcctgggcaacaagagcgaaaatctgtctcaaaaaaaaaaaaaaaaaaaaaagattggtgaaagaatttgaaaagatctttgatctttaatgagaataattttagtagcatggtaaagtgttatatacaaaaaatactgcttttgacaacactcttgaatagttgaagcaaaattatattttttgaaagataagcatattgcataactttcaaaaattagtttctttattttaaatgcctattgacattttcgttagaaaaaaccccacaaactgatgggatcaacctaataagatcaaaataaaagtgaatttaaagaatgttggaagatacagttttgtgatttcattcacaaaacctaatacagcatccatgtggcatactctctttggtattgtttgtttgtttttgagatagagtctcatgttgtccaggctggagttcagtggtgtgatctccgctcacggcaacctccgcctccggggttcaagtgattctcctgcctcagcctcctgagtagctgggattacaggcatgtgccaccatgcccagctaatttttatatttttagtagagacggggtttcaccatgtcggcctggctggtcttgaactcttgacctcaattgatccgcctgcctcggcctcccaaagtgctgggattacagatgtgagccaccgtgcctgccctctctttggtattatttattcaagaaacctttggtttcctagagctgctgtacaaatgaccatggacctggtggcttaaaacaacaaattcattctcccacagtactaaaggcctgaagtctgaaatcaaggcatgagcagggccatgcttcgcctgaaggctctaggggagaatcctttcttgcctctttgagcttctggtggctgcattcattccttggcttgtggctgcatcactccagtctctgcctctgtcttcacatggctgccttctcctcctccttcttgtgcgtctttccctctcattcttttataaagacacttttcattggatttagggccatgacaagatctaggatgatttcatctcaagatccttcactttgttgtattggcaaagacactttatcacaggttccaggacrtggacacatcattttaggggctatcgttcaattcacctacacgtagtatgtgtcagacactacttagagctgggaatataattgtgactgtttctgctcccattgtggttacatttgagtaaggagactgtgctcgtataaatagaaaagttcagagagtgagaagtgctctcgaaggaaaaagataggttaatgggatagagagtggtagtggtgctgagttggggatgttacctaatgagaccatgggggacatttctgagcatgtggcatttggacaggaaactgagccagccagccatgtgactatatgggggcctagcattgcagaccaaggagtgccagggcaaaagctctgaggggagattgcatttggcataattaagggatgaatgtggctgctgtggttggagtgaactgaatgagggggtgatcttaggagatgagggaggaggagtgggtaggcgggacagagtcatcaggggcttgtatttggaatttagtaatgagagtccagttggaggcatttaagcacattgaatttatgtttggaaaagacgtttgtgactagtacgtagcgaatgtcttagtaggggtgggagtaggattggggactggggtgggaagagtggaaacagagagacccatcaggaagctgttgtagaagaccaagctagagatgatggtaacttgtgctagggcactggagttgctgagaactggtcagacttggaatgtattttggagctagagccagtatcttgctgtggggtttgaaggcagatacagatgtacctcatatcttggctttattgaccctgcagatactgctttttttttgttgtttttacagattgagggtttgtggcaaccctgctttgagcaactgtattggtgtcatctttccaatagcacatacttacttggtgtctctgtgaaacattttgataattttttcattattactatgtctgttatggtgatctgtgatcagtgatcttcgatattcttattgtaaatattttggggtgccgtgaaccacgcccatataagttggagaaacataattgataaatgtgtgagttttgacttctccaagcagttattcccctatgtctctccctctcctcaggcttccctaattctctgagatacaacaatattgaaattaggccaattaataatcttctaagcgttctagtgaaaggaagagtcacacatctctcactttgaatcaaaaactagaaatcattaagcttagtgaggaaggcctgtcaaaagccaagatagactgaaagttgggcctcttgtgccaaattgtaaatgcaaaggaaaagttctggaaggaaattagaagtgctactccagtgagcgcacaactgattaaaaaaagtgaaacagctttattgctgatatggcgaaagctttagtggtttggatagaagatcaaaccagccacaacatttccttaagccatagcctaatccagcgcaaggtcctcgcttcagttctgcgaaggctgagagaggtgaggatgctgcagaagaaaacttggaagcagaggttggttcatggggtttaagaaaagaagtgaggccgggcgcagtggttcacacctgtaatcccagtactttgggaggccgaggcgagtggatcacaaggtcaagagattgagaccattctggctaacatggtgaaggatcagatgattgttagcatttttgagcaataactgttttgaacaataattaattggacctgaacctacagtatctgtaaggtatgtataaacagggaaaggaaggaattaagagtgacttttgaagggtagacacacaaggtcgctattgtgtgattttgtgtttatatgcagtctccagaatagactgatccatgaagacagaaagtagattagtggttgcccagggcctggaggagaggggatgggagtgactgcgaatagttaagggttgtctttttggggtgataaaaaatgtcctggaatcagtagccatcatggttccatgccttgtggatatactaaaaaccacggagttgtatacttttttaaaagggtgaattttatggtatgtgaattacatctcaattaaaaaataaaagaatggtccgggtgcagtggctcacacctgtaatcccagcactttgggaggccgaggcaggtggatcacctgaggtcgggagttcgagaccagcctgaccaacatgaagaaaccccatctctactaaaaatacaaaattagccaggcatggtggcacatgcctgtaatcccagctactcgggaggctgagacgggagaattgcttgaacctgggaggcagaggttgcagtgagccaagatggcaccactgcactccagcctggcgacagagtgagactccgtctcaaaaaacaaacaaacacaaatcttcgaatacttatgttaacaaagtaaagcaaagaggccaaggtgggaggatcgcttgaggccagcagttcaagaccagcctggggaaaatagtgagaaccccccagccgcccagtctctacaaaaaataaaaaaattagtggggcatggtgacatgcatccatagtcccagctattcaggaggctgaggtgggaggattgcttgaatgcaggagttcaaggctgcagtgagctatgatcctatcactacacttcagtctgggcaacatagtgagatcctgtctcaaaaaaaaaaagtacartgaagctaggtgtggtggcagggatgtgtagtctcagctacttaggaggctgaggtgggaagatcatttaagcctaggagttagaggctgccatgggctataattgtgcctgtgagtagtcactgcagtccagcctgggcaaacatagtgagacccccatctcttaaaaaaacaaaaaaagtaaaataaggtgaaattaatatattttacttaatatattcaaatattcaaagtattatttgaatatgtaaatgtaaaaattcactaatgaggtcttttacattttctgggtactaagttttcaaaatccagtgtgtagtttactcttagagcacatctgaatgtggctcgtggctgccatattggatggaacagctctagggcacagattgtgctactaatcaagtcccaccttgaggtgctgggactggccttttgaatgcagtgttagtcagcccttggccaggcagggtcgggggagctctcaggcttgatggagagctgtatagttgaggaacatggtcgagatgagggtgcaggtgtgagccgttagttgtcaacacagcagttagagaggatctgagtggccactgacaacatctgctacagcgggatggggaagaatggcctggcggaagagtcaagggtgggatgatggagctctagagttgacatgtatagtttcctggtgcttgagcttagtacagaggcagagcccagagaatcttgagtcttgaacatctctctcaaatattaggtgttcaacttggcttttggcagacactgaagattggaatggtctctaagatcctgaagactaaatagtctatttgaaagaaaagctgtgcttccaggaaaaagccagacctaattaagtgtcttcagagaagggcatgggctctgttacaatgcaygatgaaataccgtgtcataatacatggataagaccttcacctggaattttagagatgaagcaagatgaagtaaactaatgtttactttgaccttggtgagatcattttatagctccattaacccagttttgaggatagtttcttctttgaagcagaatgcattctgataatgaatttatctcataatgagttatttagtattattcatctgaatgctactgcgggtatgttaacaacagtagttttggttttggcagaaatagtgttcagattgttctttaagatatttgccagtggatttaccagttttaactgccacgtgaggccacatcttgcttatgaaagtaggtgctatctaatcttttttttttttttttttttgagatggagtcttgctctgtcacccagactggagtgcagtggcgtgatctcggctcactacaacctctgcctcccgggttcacgccattctcccgcctcagtctcccgagtagctgggactacaggcgcctgccaccacacccggctaattttttgtatttttcgtagagacagggtttcactgtgttagccaggatggtctcaatctcctgwccttgtgatccacctgcctcggcctctcaaagtgctgggwttacaggcgtgagccactgtgcccagctggtgctatctaatcttaagaaaggatttttttccrgccactgcaaacaggatttgtttccctgtttgcagtggctggaaggcatgcatccagtttgtctaaaagcctaccatttcccccgctttttgtgtaagttattgtgtgctgatgataatatatgcaagactgtgctagccatgttagacattctcatttaatcctcatagcagcattatgacctagataagtactattattatccccagtgtacaaatgaagaaactttctatatatctaggaaatgtcagagccaagatttgaatccaggtcagaatctgagtctagaccagaactcttattgactatattattctctaatggtaattcccaagtggttctggtataattttaagaaagaaggtgacagttacatatttggatttagttttcatgtaaaaccttacattttttggcactttactgtttataaaaactcatttgatccttttaataactccctaggaaatcagggaggtgtcatcacctacattttgtagatggaaacgggggcccagagaaatgattagctcaatgactcacagctgagagttgacccaagtcttgtgactctgagggtcaatgccacttcctatgtgccaagccattttcaggcatttcttttctatgtgtggaaaatacaggaaatcattattcctgtgggagagaaccagtggcaatatgttactggggagtcattttgcacacgctgacctctctcattttggctgtgattggctagcctttataaacagaattgattaaagttctttctcagaacctttgttgctaggaaataccttacaaagaattttggactgggcgtgtagccagtttgttacatgcttaacaaaaacaacaaacgttaaaattctgtgtagaggkccaaattagcagacttctacaaacgttttccttcatttagaaaataaactttatgttgtggctttacacaaatggtctgagtgttgacctgattcttcatttttgaccttccatgaatgtctcccaggaggaaacaggaacagagcctttatggggctcattccaaaccagttcagacttgtcgtgggaatggttcacattggtagttgttctgttatagttgtgtttgcttgtacgagttctacttcttctttttttttttttgttgagacagtgtttcgctctttttgcccaggctggagtgcaacggtacaaacttggctcactgcaacctcggctcactgcaacctccgcctcccgggttcaagcgattctcctgcctcagccatccgagtagctgggattacgggcatgcaccaccatgcccagctaattttgtatttttagtagagatggggtttctccatgttggtcaggctggtctcgaactcccaacctcaagtgatctgcccgcctcagcctcccaaagtgttgggattacaggcatgagccaccgtgcccggcccgagttctacttctagttactgggtaaccgggaggcatctatgctttttacagctttaggccacattattacaagttcacatgtgtgcaagctctgtggaacaacatcatatctttgagtagatattagtgtttatctgggaattgccactgtttttcttatctagaaataaaaaatttcagaaagctcttgaccaatctgtggttaaatcttataaccattacagcctcagcctgtgacctttgaaaagttaaagtccttgggactcaactttgtcataaaattggggataatactcttgtaactcacagttatgcttgaaggaatatatgagagatagtcttgatctttaatagggacacagtaataatttcccgttcacagttccttcttgttcttggtcttttacttggtaaaggttttattttataaactatatstttttgtatcttttacctccacttttatacagagattacattttttaaattaattaaataattaattaattttttctgaggagtttcgctcttgttgcccaggctggagtgcaatggcaggatctaggctcacagcaacctccacctcctgggttcaagcaattctacctcagcctcctgagtagctgggactacaggtgtgtgccaccatgccccgctaatttttttgtgtgtgtttttagtagagacgggatttcgccattttggccagtctggtcgcaaamtcctgacctcaggtgatccacctgccttgacctcccaaagtgctaggattacaggcatgagccatggtgcccgactctttaaaaaatagttgtacaaatttttcagttcatttaaaaatgttgctataagaacattttgtttcttatttgagtcgttatcatcttagaaagttctaagaggtggtacctgttggttgccttttgctggtttttttcctccatttttttccttctagctttaacagtgactactgggaagttctctctctgtctctgtctgtctctctgtatctctctatctcttttctttttctcctttcttttctctcttttcagtggggtcttgctctgttgcctaggctggagtacagtggtgtgatcttggctcactgccacctcaaactctggggctcaagtaatactcccacctctgcctcctgagtagctgggattccaggctgtaccaccgtgcctggcttagtcacttttcttaatgtttttaagcattaagatacgctttcttcacaaacagttcaatgaatgagaaatatccttgattactgatattgctttttcatatttatcagccaaaccacttctgtaccagaaaatgtgaaataagaaatcatgctgaagacatcagcaaatataaaaagaatattttattatgttctggccactgttaaatttgaagctccttgagaccaagactctcgttttgtgtttttaaaagttctgtgtggtctgtgacatttctgaccctgctctatccttttgaatgatcagaaaggctttcttcaaatttgcttggcccctcgacaattcttgttttgcttttctggagatcgttktgatgcttttggtttctcttacataccaaggggctgtgtctgtagatatgatttcccttttgtaattatatttatggtatattgcctagaactacatttattgatcagacacrttcgctagaacctaactggaagaaatatcctgaaaaaatgttctaaagcccatcaagtatttgcaatttattttgctttcctttttttgtagcatgttctgtactattcaagacagtgcttaatggtgtcccgtaatcttggttcagtgggatatgatcctaatgaaaaagtaagtatttaaaagatattctcaacaactaaattaaacttatcatggttttactttctcgtctccacactgtgttcagtggacagatgagattttgttaaggctgtgtggtcattgatcactctagcattgtgtgtttctataggtgctcagtctttaggtattctgtttttcattgtgggccacagtctgaatctttttaattttgtatttatatctttagcaaaaattgaatgcatttacaatgtgtttcctttgtttccagcagaataactaagaaaacatttgttcttaaagactgggcatttgagagatttaattaaactattgagtttttctttcatttacttaatacttttttttttttttgagatggagtcatgctctatcacccaggctggagtgcagtggtgtgatctaggctcactgcaacctacgcctctggggttcaaacaattctcccacctcagcctcctgagtagctgggattacaggcgcccaccactgcacctggctaacatttatatttttagtagagatggggtttcaccatgttggccaggatggtctcgaactcctgacctcaggtgatccacctgcctcagcctcccaaagtgctgggatttcaggcatgagccaccgtgcacctggcctcatttacttaatatttatattatttatttatttatttgtgagatggagtcttgctcttttgcccaggctggagtacagtggtgtgatcttagctcactgcaacctccgcctcccggcttcaagagattctcctgtctcagcctcctgagtagctgggattacaggtgcgccccaccacgcccgtctaatttttgtgtttgtagtagagacagggtttcaccrtgttggccaggctggtctcaaactcctgacctcaggtcatccgcctgcctcgagctcccaaagtgctgggattacaggcgtgagccactgtgcccggcctatatgattcatttagattgaaggtaattttgtgtattataaatttcaggacaaggggtttctaattaaaatgctattacaataatgtttgagccttgtagggactagaagaagtgattggaaataaaatatggtttcatgccttcatgkcaatgaaggcatcgaagtgggcgggagttttggttaagaagggattgttcaaggtgagtgtcatcaaaatacaactgacaggaatgattatttgagaatgacatgtctgaggtatcttctgaatcatgtgctgaagtgcgcaatactgctttccagattcttttgaatctggaggcctggaggaagaaagagtctacatatcttcagttcagtagaaatacaatgtgaaacacagttgcagggtgatatggtttggctctgtccccatccaaatctcatctcgacctgtaatccccatgtgttgagggagggaggtgattggatcatgggggcagtttcttccatgtttttctcatgayagtgagttggttctcacaggatcttaagatcttacaagtgtttggaagttcctcctttgcactactctcccctgctgccytgtgaagaagggtcctgctttccttctgccatgattgtaagtttcctgaagtctccccagccatgcggaactgggagtcaattaaacctttgtttataaattacctagtcttgggtagtatcttcatagcaatgtaaaaaccaattaatacacagggcaaatgtgattttcaattttcctttttattttttatttttgagatggagtcttgctctgtcacccaggctgtagtgcagtggtgtgatcttggctcactgcaacctccacctcccaggttcaagcaattctcttgcctcagcctcccgagtagctgggattacaggtgtacgtcaccatgcccggctaatttttgtatttttagtagagacagggtttcaccatgttgggcaggctggtctcgaactcctgacctcaaatgtcttcctgcctcagcctcccaaagtgttgggattacaggcatgagccactgcacttggccaattttcaattttctaatagccacattaaaaaaaagtaaacaggcaaaattaataatatctcaatatctaaaatgttatttaagtacataatcagtataaaaagtattaacaagacaccttagattcttttttttgggccctaagtcttctaaatccagtgtatattttatacctctggcatatctcagtttgattagccacatttgaagagcccaataacctcatgtggccagtggctactatattggatagtgcaggtctattgaattagttatgataaactccctgttatgaaagctgtagtttaatttaaaatcttcatcataggtgatatgctttggggttcatgtatccatgtgttgcattccaatctcgaagtaatcagctatcctaagtggctacactcttaagagtaattaactaacatttgttgaagaggacacattatagaggggtggaatactacaaacggttcagccatctttctccttatacactggtagccttcctcattagcgtaataactgttagaagtgggctatcagccaggtgtgatggcccacgcctgtaatcccagcactttgggagtttgaggccagtggattgcttgaggtcaggaacttgagaccagcctggcgaaaccctgtctctaccaaaaaaaaaaaaaaaaaaaaaacaccccacaaaaattagctgggtgtggtggcgtgcaccagtagttccagctacacaggaagctaagttgggaggatcacttgagcccaggaggtcagggcttcagtgagccatgattgcaccactgtactccagactgctaggctaaagggcaagatcctgtctcaaaaaaaaaaaaaaaaaaaaaaaaaaaaaaaargaaaagaaaaggaaaaaaagaaacgggctgtcattgaggaagtttgtggtattcgtcaatatatgttattggctattgctttagggaaattctgtgcctttgtactattagaatgtaataatgtagttggcctttaattctttacctttaaggataatactcgggcccgatccctaaatgaatagttctgtgttcagccacttgtctggtggattcttgatggcttagtctgacagtatggttagccaaagcagaatattgtttttttttgcctatggtgagcctttcttgcagtcttttggagccttacaaagtacaggaagttaagattccactgaacttatcaagcaggttttatgattctttttatgtcttaataaatgtttgtatgtgtggacagagtttggtctggtacttgctttcattataacctcatagtgaagttacagaaatagctaactgacctcccacattggtgaccactggtaattactaaaaataaataaatgtatgtaactgtctgggtttagcacatttatttatttatttttgagacagagtctcgctctgtcacccaggctggagtgcagtggcatgatcttggctcactgcaacctccaccttccgagttcaagcgattctcctgcctcagcctcccgagtagctgggattacaggcacacaccaccacatccggctaatttttttttgtatttttagtagagatggagtttcaccatgttggccaggctggtctcgaactcctgacctcaggtgatccacctgtctccacctcccaaagtgctggcattgtaggcatgagcgaccgtgcctggcccaggtttagcacatttaaagagatacgagggataaaggtgtagaagtggaatctccttggaattcacttagcatgtttcgtcataaatcctgaaatcaattctgctccctgctatctttgccatctcctttgctgtgcccttgcctaaggtgactgtggagaaactgtgtttccctcagtgagtgatgaatattctttggcacctattcatagtacaggtacatgttcagactaagttggtcgcttcacccttcacttgagggctgcacttaatcagacctttctccttcccggattcctgctgtccttgtaaccattcattaaatactgacctggtttgtttatacctactgtcccaagtgcaagtagacttggtctttggtgtaatacatatttgttaaataaattgattctcgtttgaatctgttattaactcatttcttattccacattttatcagtgacttacatcatgtgcaaattatccgggtgaaatttaatcattactgaaaacgttattttttttaacttgagttttaacaagctaacttgttgtcttatgtatgttcatgagaataaggaagatttaacttatggtagcttgcttggatcaagaccattaagtttcagttggccttaagttagtgtgagccagtacagtactgtgttgttcctgtcacactgatgtgagctggctgggctcagtggcttacgcctacagtccctgcgctctgggaggccgagacacgggattccttgagaccgagagttccatatcaacctgggtaacagagcaaaaccccgtctcttaagaaaaaaaaaagtgatcttaggtgttattaataacatagtgwttagagcttgcattgttatactctgattacattatatcatgatatttctgacatgaatacctggatgtgaactctctgactttgccactagtgaactttgtaagtgatttaaggcaagtgatttggcctcatcaagccttagttttcttatttgtaaaacggagatattatcagaactgacttcgtgggattattatgctaaatattgtcatcatagccattacctgatagatgagataatgcacagaagrgattcatcacagtgcctgctgtatacaaaacgtgtcctaagtgtcggctgcttaatgtccttaactgaattttgcacatttggaaagcaagactcaaagcccatggatagtgagtagctgggtgtaaactcatgcctgtccttttccagagctggtggacttacccattgtgctgtatcctttctcagaagagttgggcaagtgacccagtgtccagagttctgccgtcattccaacaagtacccagtgcagggccagctcagtcctcttggtctctgaatggagtgtggtgctagctatggagttagagcctgggagagagcatctaaacctagggaagggaaaggaagaaggagggatagagagagaatgggttaagagaaaaataacaacagcaaaaaagatccttaggaaatcttttacttcagatgacattattagtacagttatagagcagctactgccaaagttcttcattatctcttctggtacctgaattctcatctatcttcaaggatccaggatcctaatttatagttgttttttcctgagtgtcttcagggtgccttatgagtgactctccacatataggatcaagtcccagttccttgaatggcatatgagtccttccatcatctggacttttttttatcctagctttatttgctacaactctcctaagcataccatgcgcttcagtcatattgagaattccttgtagttgcttagtgctaccctcttcttccagtgtcacggcctttacacatgctgttcatgtgctcccttctctgtgtgtagcatcctgcacaaagccttattagagcatttaacacartttgttgtgtttgtgccatattttactttgaagttgccaaatgcacttgatatttacctgtaattgttgatgcagaggggcagttttaaggttgggtttaattgatttgtatgcatattcttttataggcatagcctacctggaagaatatataggagaccagtaacagtggttgccttttgggcagggacttgggtgtctcttcagtgtatccccttttgtactttaaaaattctgaattatatgcatctatgatttatttagaagaaaattttatgtatggaagattaattgatatgattagttttattgggttttatgcgctaattggtaatacattaatagcccttaacagagaagatgtgtcaggtgcaggtatttgttttgttatagcttttccccagttagacagataggggcacactcctaaattcataacagtctggcatgtagcccaaaggggtgaagaacagtagccatagctaatgctgaatgagtatatattacatgctagacattattctaaacactttaagagtgttaattcaaatcattctcacaacctcttgtggcaggtgctgtttttacccttattttacataccaggaaatgagaggcaagaagggtgacttgttcatagcaggacacacaggaggagaacatagaatgttgggagttcagcctgggtggcttggctgcagactgactcgtaatgaccattctgctgcctgaacagaaattagaatggggattcttgcttaattcttccattgttatcatgatttgttgtattcgctgtaacaattgcttaatatgtaatttctaggagtggtgtttgtggtgattatcagatgtggtctgtttcacagttaatattaacatcatattttaaaacccatttaagaaagtgtaaacattgtgttctcaggatatgcttactgtttaagaggggtttaccatgaccatttaaatacagaaaagtagatgattatgcattctcagacctgagatgtgagcaaggctctgagtggcttcgagttttatcacattagaagtttacctatttttaaggcaggggcttggctcgggttggaggagttaagacatatatgatgtaaaggttaaaccaagacctagcaagcttttttcacttctgagattctggactttttcctgtatgttaaaatactgctctaggccgggtgtggtggctcaggcttgtaatcccagcactttgggaggccgaggcaggcggatcacctgaagtcaggagttcgaggccggcctgaccaacatggggaaaccccatctctactaaaaatacaaagaaattagccgggcttggtggtgcgcacctgtaatcccagctattargaggctgaggcaggagaatatgttgaacctgggagacggaggttactgtgagctgagatcgtaccactgcactccagcctgggcgacagagtgagactccatctcaaaaaacaaacaaacaaacaaactgctctaggttatataagagtactttttaaaaggtcatttataactctaactcttcttttagaaatataactgacactttttttctgtagttccgttgaacttaaaaataattcacaaatacagaaattaccgtgtgctaatgtgtattacatccaaattacttggaatggtgtgttttgaaaaacgattagcttgtacaattttagagtaggaagaaaaccttactaaatagctttccatttgagtgctaccagtttatgtggaaatcaaggcctacagagattgatttacttaaagttaaataggtcattagtggcaaagctggacttgggtttaggtctctagataaacacaggatacacaacttctctactgtttggtctcagctgcttcaaaatttggtggttattcaaacttaacattggattcaaatggtgtaatctgcttagtctgggcatttttggatatatgcacaattaggtacctattctgagttactgaaaatatgccctgtcccaacagagatagcagataaattatacttacttagtatcagacttccctttgaaaacaactcatgacacttagaatttcccagaatttagaaaataaattgtcaagtaattttggccaaagtgttttttttgtttatttatttatttattttttgagacggaatcttgctctgtcacccaggctggagtgcagtggcacgattttagctcactgcaacctccgcctcacaggttcaagtgattcctgcctcagcctcccaagtagctgggattacttgggattaccagcacttgggattacgggcatgcaccatcacgccggctaatttttgtatttaaattatttatttatttatttagagacggagactcgctttgtcaccagacaggagtgcagtggcgtgatctcagctcactgcagtctccgcctcccgggttcaagccattctcctgcctcagcctcccgagtagctgagattagaggcgcgtaccactagacccagctccttttttttttttttttttttttttttggatttttagtagagacagggtttcaccatattggtcaggatggtctcgatctcctgacctcgtgatccacccaccttggcctcccaaagtgctggattacaggcgtgagccaccgtgcccagcctttttgtatttttagtagagatggggttttaccgtgttggtcaggctggtctcgagctcctgacctcgtgatccacctgccttggcctcccaaagtgctgggattacaggcgtgagccactgcacccgggcttgaccaaagtcttttagtgtctgaaatatcatttgaagattttcttttggctacagaatatgtagatacccccaytgtgaatacattaacctactatgctttaacaaagtaattatagaacccgatcatatcagatgaattttgtagttccctggttgtaaacggttatactatttaataacctattttaatattaccctaagtatttatagtacatttaatattactgtaagtaatatagtatttaatgttactctaggaagtaatgtttattagggttatattcagtgttgatgttggaaaaacttggtgttttttggtcttaaaccatcggtttaaaagtaacaatttctaatgaatgtgttttttctctcttcagacttttgataaaattcttgttgctaatagaggagaaattgcatgtygggtgagtagaattttygtcttattttccattttactctgaaattatttattaaacccctttaagtgtgaatcactattaatagacattaatatattttaaaataggttattagaacttgcaagaagatgggcattaagacagttgccatccacagtgatgttgatgctagttctgtaagtatatttttgctttgtttaaatcaggacttaattttgggtcaagcagaaaaagtgagacatacaggctttttttcttggcctgcacaagatacattcaagtttaaaaactgtttacttgttcactgttgtgttaagcaaaacgacagtatcacagtatcttctatatgtgccgtaagtattttcttttcatagctttaaaaacttagacagaaaaattgccaggctgattgctggtcaccaagtagatttaagcaaagcatgagaaaatttgagtcaaagattaatgaaatgtttacacagtgctcccttatgagagcactttcccccagcatagcttcagtatcactaagggaatgctacaattgtttaacctttcctaaatgcttcaacgtgttcagctgaaagtttgacaaaaatgaaaggtaggctaatgctaattggatacaaacaaaagaaggtttagcataaagcagatatacttttatttggtacttttaacacagcaggcctttttttttttttttttgggacagagtcttgctttgttgtccaggctggagtgcagtggtgtgatctcacctcactacaacctctgcctcctgggttcaagcgattctcccgcctcagcctccggagtagctgggattacaagcacctgccatcatgcctggctgatttttgtatttttgtagagacagggtttcaccaagttggccaggctggtgttgaactcctgaccttaggtgatctgcctgccccggcctcccaaagtgctgggattacaggcttgagccaccacacccggcccacagcagggattttttttagtagtaatgttatgaatgagtagaaaaaaatcccatggggaaagaatgtaaattattaaatctttatggcatgaaatataagtagttgaatactaatgcaagcattgtttctcattgtctcatactacttttgataatgggaccctttggtagggtccatcagttaatgacagggatatgttctgagaaatgcatcgttaggtgaattcaatattgtgtgaccatcacagaatgtacttacacaaaccttgatgatacagcctagtacacacctatatagtatagcctattcctcctgtgctacaaacctgtgcagcacgtgactgtactaaatactgtaggcaattgtaacacaatggtaagtatttgtgtatataagtgtatctaaacacagaaaaggtacagtaaaaatatagtataaaagataaaaaatggtacacttgtatagggcacttactgtgaatggagcttgcagsactggaagctggtctggatgagtcagggagtgatcaaaggcctaggacattaccgtcactactatagacttcataaacactgtatacttaggctacacgacatttatagaaaaatagttttctttcttcaataataaattaaccttagcataccataacttttttaaattataaacttttaaattttgtctttactctttgactctttcttttttttttttttgagacagagtcttgctctgttggccaagctagagtgcagtggygcagtcttggctcactgcaacctctgtctcccgggttcaagccattctcctgcctcatcctctccagtagctgggattacrggcatgtgtcaccacgctcggctaatttttgtatttttagtagagacggggtttcaccatgttggccaggctggtcttgaactcctgacctcaggtaatccacctgctttggcctcccaacgtgctgggattacaagcgtgagccaccacgcccggtttactctttgactctttcataataaaacagcataaaatgcaaacactgtataactgtacaaaaatgttttctttatatccttattttataagcttttttctgtttttaaagttttttatttttcatttatttttgactttttgaacttttttggtaaaaacgaagactcaaatgcacacattagcctagacctgcagaggatcaggctcatcaagacatcagtaggcatgggatcacatcaagttagaaagcttctacacagccaaggaaacaacaaaatgaagagacaacccacagaatgggagaagatatttgcaaactacccatctgatgagggattagtaactagaatgtataaggagctcaaacaactctataggaaaaaaatctagtaatttgattaaaaaatgggcaaaatggccaggtgtggtggttcacacctgtaatcccagcactttgggaggccaagcgggcagatcacttgaggtcatgagtttgagacctagaataaataaatggatgtttaaccagcctggctaagatggtgaaaccctgtctctactaaaaatacaaaaattagccgcgtgtggtggcacacatctgtagtcccagctacttggagactggggcaagaagcttgaacctgggaggtggaggttgctgtgagccaagatcgtgccactgcrctstagcgtgggcgaccaggcgagactatgtccaaaggaaaataaaaaggggcaaaagatctgaatagtcatttctcaaaagaagacatacaaatcacaaacaggtatatgtaaaggtgctcgacattaytgatcattacggaaatgcaaatcaaaagtacaatgagataaaatcttaccccggttaaaacggcttttatccaaaagacataacgagtactggcgaggatgtagagaaagaaccctcatatgctgttggtgggaatgtaaattaatacaaccactataaagaayagtatggaggtttctcaaaaaactaaaactatcatatgatccggctgctagatgtacatctgcttctaggtgtacacctagcaccagggaaatcagtatatggaggagatatctgcactcccatgtttattgtagcatttttcacaatagccaagatttggaggcarcttaagtatccatcaacagatgaatggataaagaaaatgtacatatgtacggtaccattcagscatagaaaagaatgagatcttgtcatttgcaatagcatggatggaactggtggaggacatgttaagtgaaataagccaggcacagaaagacaagttttgcatgtactcactcatttgtgggagctaaaaatgaaaacaattggactcatagagagagagtagaaggatggttaccagaggcttggcagggtgtatggagcgggaggggtggggatgattaatgagtacaagaatatagttagatggaataaataagatcttgtatttgatagcacaacagggtgactacagtctgcagtaatttgtggtacattttagaataatttagggaatagaattgggatgcttgtaacacaaataaatgaatgatttagatgatggctaccccatttatcctgatgtgattattatacattgtatgcttgtatcaaaatatttcatgtactccataaacatatacacctcctgtatacccacaaaaataaaaaaagacatcactaggcaaataggaatttttcagctccattattggagctgaaatgtagatgcagtacattaccgaccaagctgtcatatggcgcatgattgaattctgatctacaggtagacttttcagactttgcaaaagtggtttcaaaagaattgttgttaggtttttctcatttgtaccttccctgaagcagatgtggtagttttacattttagagacttttcaccacttctggctgaaagcagtagggaatataccagagattatgatacataatttataataaaatttaccagaccccacaatggaagcaattgcacactcagtcaaaactttctcttactatgacctactttaggtcaatttctagaaagatactataagtaaaagcaggataatgatggtgggaatgtcaaaagtttcatttaaacctcaacagtagggtcaaatctgctatgtggtttctgtttcagtctcaaggaggctgaaaaggtgaattcctgtaacagcatcttttgcatcctcagcacgtgatcacagaggttactatcatagctaatcagctttataatatcagtaatatgaaaaagccatgctattcagatgtattaatttttgcatgtttgttttcaagaggtgagcattttaaatgtaacttggagtaaaaaactttataggctttgtatgttaatttcacatgtggaaatgtaaatactattccagtaggaaaatactgcaacaattgattgcaaaagctattcattgtctattataaacaactaatttttaaggtaattatgcaaggaaaaagatgaatggatactgcacatatcaactaataagtcacacaaggaaggaaagccagctaacttgcaaacaattaatgtttgatagaaaaatgttggcttttagagatgattatgcagtttacctctgttggtcccttccctccaacatgttcttcaaaattgtcttcagtattcttggtccttcgctcttccatgtgaattttaggatgagctggccaattaccccccttccccaatttttagataccatgaacaagatttttataagtataacttttgcatgtctttttgtgaacataattttgattttttttgggtaaatatctaggagtggagtagctgggtcttagggtagataaggagttggcaacctttttttgtttgaaagtaaatacatttttgtctggatagcaaatatattttagattttgcaggcccctgtggtcgctgttacatatgcttctttttgttttgttttgttttgttttaacaacactttaaaaatgtgaaaactattgttagcttgagagctgtgcaaaaacagcccttggatcagatttggccagtgggtagacagtattttgctgatgcctagaataaatacatgcatgtttaaatttataagaagctgctaaatagttctccttcatggttgtatcatattttactccctccagaaatgtctaggtcagggtgcttttgtgtccttgccaacacttggtgttttcagtccatttgattttgtgttttatttttaagtggttgtgaagcagtatgtcattgtgtttttaattttagattttcctgatgaatactgatgttgagtacttttttgtgttattggtcattcatttatatttttttctgaagcatttcttcaaacataatgaaaaaaattagaaaagtagtaccagtatattggtatcagtttactgttatataccagtataacggtatctgtatacccttcacctagattcagcaattgttaacattttggcttgtttgctttatatttgtatccatatgtacattgtgtgtgtgcattttttttttttttggctaaacaatttgaaaataagttacaggacatggatgaagctggaaaccatcattctcagcaaactatcacagggacagaaaacaaaacactgcacgttctcactcataggtgggaattgaacaatgaagacacttggacacagggtagggaacatcacacactgtgtcctgttgtggggttgggggatgggggagggatagcattaggggaaatacctaatgtaaatgacgagttgatgggtgcagcaaaacaacatgagacatgtatacctatgtaacaaacctgcacgttgtgcacatgtaccctagaacttaaagtatatatatatatgtaaaaaaagcagcattaaaaagaatcccctggacaggaaaaagaaaaaaaaagaggccgggcgtagtggctcacgcctgtaatcccagcactttgggaggctgaggcgggcagatcatgagggcaggagatcgagaccatcctggctaacacggtgaaaccctgtctctactaaaaatacaaaaaattagccaggcgtggtggcaggctcctgtggtcccagctacttgggaggctgaggcaggagaatggtgtgaacccgggaggcggagcttgcagtgagctgagatcgtgccactgcagtccagcctgggcgacagagcaagactccatctcaaaaaaaaagaaaaaaaaaaaaaaagaaaataagttacagacattgtggcattttacccgtaaatactattcatctcgcagtaataagtatggttttctacatatctataataccttatgaaacctaagaaaataactcattattctataatatcatgtaatatgcctaccacattcaggtttttccagttgaccccagttgtcctttttaatatttttctttgatccacagttcaatcaaggttcatgagttacatttgtttattatacctctttagtctcttaatctaaaatagtgcccctattctccctctttttttgtttgatttttattatgttggcttttagatattttggctttgtatggaatctattttctcatgaatagattcagattaaatatttgacaagactacttcataagtgatrttctttctttttttcttttttttgtgacagagtctctctcagttgcccgggctggagtgcagtggtgagattataactcactgcagcctgacttcctgggcacaagcgatcctcccaccttagtttcccaagtagttgtgactacaggtgcatgccaccacgcctggctgatttttgtattttttgtaaagatggggtttcaccatctttcccaggctggtcttgaactcctgggctcaagagatcctcttgccttggcctcccaaagtgctaggattacaggcgtgagccaccgtaccccagccagtaatgttattttttttaatagtaatatcataacaagaggttcttaatgttgaattgttctgttgttatgctaagtatgatcatttggtttcatcaggtcttcccattataatggtacattttctttttttttattaaataatttttggggtgagtttttgaatccttgtgaatattttgtccctcaaccacctctcatctaatgtttttgcatcgataatgaaaattgcctgagcctgattactttggttacatttgtcttgtttgctgtctgtggagtaagctgttgattttctgctcctttttgaatctgcctgtttttatgtattatcttttttcttatgtatttgaggcctttagtatatttatttttagcatatttaatttaaagaatctatcatattattgtattatttcaagtttgtgggtgtttatttctattcctgactcttcctcataacatattgtttcctcgcatgtttaaattttggtgtgtgattctatgtttggtgcttttgttgttgaatttcaagatggtttgggttatggatttggccaggtaggataggtggtatatttgtttccatcacaccctccagggtatcactcatctgggactaatttttatattaaatttttggcataaagattgtcaaattttgaagataatgggaagaacaaaatgagattgcacacacacagatacacacctgttgaataggctcatggtttctaatatctagagacattttcgtttactttgaaccacagagatacgagcatagggtttatcctctctatttcgtaggttgattcctcccccacaacctttcactgagaatgtaatctttgagcctcctggctttagacagaagggtttccttcaaacctccaactcacacgggatctgtttcctttctctgatcgttaaaacccaatcttctagattattgagattcccaccttcactctccaagactggctcttgtggatgcagactgattttcatttttatattatttatttatttatttatttgagccggagttttgctcttgttgtccaggctggaatgcaatggcgcaatctcagctcactgcaacctccatctcctgggttcaagcgattctcctgcctcagcctcccgagtagctgggcttacaggcatgcatcaccaaactactgaattttcagtagagacagggtttcaccatgttggccaggctggtctcgaactcctgacctcaagtgatccacccgcctcagcctcccaaagtgctgggattacaggtttgagccaccatgcccagccagattttcagattactttttttttttttttttttgagacagagccttactctgttgcccaggctggagtgcagtggtgtgatcatagcaaactacagccatgaactcctgggctcaagtgattgtcctgcttcagcctcctgagtagctgggactacatgcacatgccgttgtgccctgcttcctttttctttttcatcccttgtagtttttttgtgagccaagctcttcatttgaaggatgtttgttatatttaatctaggtctttagatgtttctaaggaggatttgcaggttatttagttggcttattgttggtttgtcttaaaacaatatgacatcctattctttgttgaggaaattcccttaatttctttgagaaataaagactgatctagagcagtcttaaagtcaggctttccctaggaaaacaattcatttataatgatgagattaatgtgcctgaatccaggggatgaggctatagggaagcagtataaaatactccaatgggaattggtcagggcaggagaaagcaaaatgggagttaagcctcttattaagtcatgaatttttttttatgtttcattttccaggccctaggaaagcacgcttattattctctgggaagatttgtggagaatagtttatgaagagaagacaattctagtkcaagaatgtaaccagctgggattttgattgatattgcattgtgtctgtagatcattttggagtgtatagctatctcaacgtttttaagtcttcctatccatgaacatgtgatattcttccatatttaggtcacttggatttctttcagcaatgttttgtagtttcatactactataagtgtaattagttttttaatttcaattttttaaattagttgcaagtctgtagaaatacaaatgattttcatataatgattttgattcctgtaaacttgctgaactcttttattagttctaatagttttttagtggatttcttaggttttttttttttttttttttttaagatggagtttctgtcacccaggctggagtgtcgtggcatgatcttggcccactgcaacctccacctcccgggggtcaagtgattctcctgcctcagcctcctgcgtagctggggttacaggcatgcgccaccacgcacagctaatttttttgtacttttagtagagatggggtttcaccatgttggccaggctggtctcgaactcctgacctcaagtgatcctcccgctgtggcctcccaaagtgctgggattacaggtgtgagccactgcgtctgggccttaggattcttttttttttttttttctctcttgagaccgagtctcattctgttgcccaggctggagtgcaatggtgcgatcttggctcactgtaacctccgcctcccaggttcaagcaattctcctgcttcagcctccggaatagctgggactacaggcatctgccaccacacccggctaattttttgtatttttagtagaggtggagtttcaccacgttgaccaggctgggctcaaactcctgaccttgtgatctgcccacctcagcctcccaaagtgctgggattacaggcatgagctactgtgcccggccaggattctttatataagatcatgtcatgtgtgaatagagatagttttacttctttccatctggatgctttttatttcatattcttgcctgatttctctggctttaacttccagaacaatgttgaagaggtgagaggaggcatccttgtcttgttcttcatcttagggggaaagcattcagcatttcacccttaaatttgatttaggctctggtattttcatagactttcattatcaggtggaagaagttaattgctattcctagtttactgagggatttttatcaagaacaggtgttgcattttttcaaatgctttttctgtgtttactgagatgatcatgtggtttttgtcctttatttatatggtgtattgttacattaattgatttttttgggtgttaaaccagccttgaattcctgagattaatcccacttggtcatgctgtgtaatcctttgtatatattgctggattcagtttgttagtattttattaattttgtgttcatatttacaagagatattgtctgtagttttcttatgatgtctttgcttggttttggtgttagtgtgatcctggcctcatgaattggaaagctttctctcatcttctagtttttttggaagaattggtattaacttttctttaaatgtctggtagaaatcaccagtgaagccatctgaatctgggcttctctttggttagtttttgattgttaaatctacctttttacttattgtaggttttttcagatattctgtttctttaatcagtgtctgtagtttatgtctttctacaaatgtgtccatttcatcaaagtttctagcttattggtatagtattttcttatttttattttataaggtcagtagtaatgtctcctctttcattcctaaatttagacatttgagccttcccttttttcttggtcactggcctagtctgttcaggcttgttatggattgtcatagtctgggtggcttataaacaacaggaatttatttctcatagttctggaggctgataagtcaagattgaggcactgttagatgttgtccctggtgagggctcctttcttagtttcttagtggagccttcttgctgtgtcctcacatggtggaaggagcaagggaaggatctcattcatgaggtctctgccacaagtgttctgaaatagcattccagaagtacaaggtgatacagttagtcaagagctataaattggtggataggaaaggcaaaaataagaagattgtattgagtttctagttatacaatgaactgaataactccttttcttttgagacaaattctcactctgtcgtccaggctggagtgcaatggcaccatcttggttcattgcaacctccgcctcacaggttcaagcattctcatgcctcagcctcccgagtagctaggattacaggtgcctgccaccatgcctggctaggatttgtattttagtagagttggggtttcaccatattggccaggctggtctcaaactactgacctcaggtgatccaccctcctcggcttcccaaagtgctgggattacaggcgtgagccactgcacctggccctgaataactctttagaaacagaaaaaatctctggtggttggttaaatagtaaatataaataaatctataaatttcctatatatcaataaggtagaaaatacaacaagaaatgtaacctcgtagaagcaatggaaatgataaaacactgtatgatgtgaatttaaaatgaaatttttaggacttacatgaggacttcttatttttgtatagggaaaccgatttttaaaaatgctcttttctgtacattttctattaaatcctaatataacaacataatggggggggattgacaaagagtaaatatgcaagaatagcctagataattctgaggaaaattgatggggagtagcctaacatattaaaatacattttaatacattgtaagtcagcaagaagacataggtctatggaatacatttgttagattttaggcagtgggatgatgtgggaggatttttgagttgttaaagagggtctcatgaatattatgtggatttagaagacaaggtaattctaggattgcttgcctctaatttactgagatttttaggtatctcagagaagataagaaatataaggaatgagaaatgtttaatggctttagtgactaggagtttctaaatggacacatgggcccatttcattagtttggtgaatagtgagagcaaagaatttgggaatttaagattgttgtacttctccaaatgaatgttttaagtataaagactagtatgtctttccacaaaaatggtaaaatatattgtcacatttatatcaaactgctaaaataagttttgatattttttaaaaaatgagatctcatcaggttaaatgaaaagagttgagaatcttcattcccaaagaggaaaatgattctgtatatcaacagaatcattcaacctttgactgtattctctatctacgttcctaaattgaacctatctatacatattttgttgctttgtctgtgtacagtcatgttggatttaaatgagaaatatctgattttaccacgttgaaacaagaacctaaaattagggaagtattcactgtgactcacatcttacccaggcagcctgctgttgaaaggatgatccctggtgcgcactgtagtctcagcctcaggattctataatgagattgagtggggtttcctgtgagcactctggggtgattgacagtaaggtgagggcagtcatcactttttatgcctacccttgatgatatgtccctgctgtctggggagggaccgaggacgaataggacttggtgatgtctaagtaattagtgtatgttggttccagctgaacaaactggagggtaatgatcaggtaaatggaaatggaacacattaatgcagactaaggtataaaagaccttagggttaaacttttcaacattttatgggattattagaatatctttatttcattttttatatttacatgtctctgtatatacatacacttatttatatttttgtcagtgtatcttcagttttaccttagatgtatatagagatgaaagcaacttaaatgtgaaaacctcaaacgcattttttctcctttacatgatttcagaatattttcaaactttttctgtttggaaaggagttaaggttcttaattaaacattttctttttaatttcacaaaaattgttaatggacttgtttggagctgatgcctatcactgatcctcaaataggagcaaatgactaaagtcaggcttggaaaacttttttggggtgttaactgaaaagtatcaggtgaccttttatttgtgtgtgtgtgtgtgtgtgtgtgtgtgtgtgtacttgagaatgttatatttcagtaacattttcttaaactgccttttcttagtaaaggatattttaagatgatggctgtcctggtccatgtttcacagttggtcttaattagatcagaaatatttccagacatttaggttgcaataggaaatctataggattcttaatttattcttacaaaaggtatttatagttgccattcttcaatattaactttccttatcaacagcaaaaagtcttacggcaaagcctctggagagtgactgcagtactgcatttaatgggaagggaggaattgtttgccttagtatatggttttgaatctgggagtctggtaattaggtaatcaaagggtttaaaaaatggcataatggctttaaaacttgctattgctcacttttcttataaaacttagctttcagaaatctttttagattaagaatacaatgtacctactatgcaaatttaaaacaatagacttttcattaaagaactaaccaggagaagaaagcatttaagatgtgtagacatttcttttccttttctttttttcttttattgtctttggaaaaacttattttgcagaaacagtatactgtatcaattttaagtgttttgattatctttgacttggctaaattattttctctgcatttttgggtaaaatggaataggatgggattcctggtaggtatttgttcacattaatactatatttaattggagatcctgcagaatagtagcaggaggctgaagagaattatttagcattagcaatggctcgtctgggagttgtggactaatcaaggcgctgtagtgttagtggtggggatgatgggaattatgacgattatgacatgtaagcatgtctgtgtacgaattggacaggcaatgagttaatcaagaagtatgttaaatggctcccatgctgattcattattatctaccatagtgcctgtcaggttgtgtatttaaaaaacacaatcattgccaaattcaatatgtatatgagctgaattcagccattgtttgcttttccataaaataacctcagatttccttatatgtataaaaatagaaaattgtgtcaactgtgctgtgatttgtgtttatagtatggtatcttttttttttaacagagtcatttaaacctatgtttgctttgccctttcatatattcgtgtaaatattctctggcttgttttctatgcataaagggtttgggtttgaaagtgaaatttatgtgtctttacttttcaagatgaaaaaataattccagtatttcagagacaaattaatatttaacacatgaactatggacaaatcaaagcatgaatcttttccaccatcaaaatgcttgaatttaaattgggggtgggggtggaaacctcctttgctgtagcggggggtctctttgtgccaggtagacagacccattctgtgcccagcatggttggggttatctgtcaggaaactatctattagaaatgctagaaatgtatgtattttgggggaatggaactaataaattgaattccttttagaaaataaattgaaatgcagcataaatccatgagcaaactggattatatctctaggcaaatttaaagagttattgtacagatgaacaccatttttttttattattgtgagcactgccaaatttaataaaactttctaccaaactgtgactttcatgtattaacttaattaaagcagtgttatgggtaatactcagtgttaacctgtggatggctgttattgaaatccattatcaatggagtcagtattagtggtcagcagcatcagaagtaaaacttgcaaccaagaccctcccatgggtgctgtgagctcagcaggttaaattgtcaaaaaccagtaaagcttcttaaaggactgatagcttaagccacccggagttaaaggtaaactagtcattccagtcaagatggactatgactttatttagcagtcaggcaaaaattatatttgggcaggatttatatcagtatcttcatgtatgacttattcatttgtatgttcatgtaccttgctatttaaattcaataaaaccatccagctttttttaatctgtgggaagtgacttgtggatattttcttttataaaacgttaaggagatgtcttaagactttctgaattttttgttaataacttatactgaagttactttttacttatactaaaattttaaattaagaaaaaagtgaaatattgtattaatatatctttttggttttgtttattttataatttctggtaaacttaaacaacatggttttaaagggaayttatgtatttcagtgtaattagtacctgctgttatgaaaaagcacctaatcatggatttatttttctctaagcagctatttgggaaggatcagaagtcctatcttactgaaaaagcatacatataataaaagatttgagggccgggcgtggtggctcaygcccgtaatcccagcactttgggaggccgaggcaggcggatcatgaggtcaggagatcgagaccatcctggctaacacagtgaaaccccgtctctactaaaaatacaaaaagttagccgggcgtggtggtgggtgcgtgtagtcccagcttctcgggaggctgaggcaggagaatggcgtgaacctgagaagcagagcttgcactgagccgagatcgcgccactgcacttcagcctgggcgacagagctagactccgtctcaaaaaacaaaaaacaaaaaaaaagatttgatatacagtttaccttattctrtgttccagtgtttctaaggccatgacttaactcatttttacagcctccctcattcagactccttagtggagggaaaggacatgattattccaaataatgcctctcactcattcagaatctatggtgtactggaaaagcacataattacataaggattgaattactgttactgttttaaattgagaaaattggggcttcaagtataaagccaatcttcgggttgccaaagatcactgggctagtaagtagtggagctgagattcaaattatgtgtaacttctaagttgtactgtttccactgtgcatgttgcttctcatactaagtatgaggaaaagtcccctcccaccacaaaacgaagtgaagtttattactttgaaggcagagtttttattagtgcctgttggaggctgggtactatgataggtactggaactagaagagtgactggaagtgataggattgctgctttagagatgggtatagagaaataaaacataaataattacaaattgtgataagtgttatgagggaaacaagttgttgagagagaatcatggttcccttcagtaatagggtgctcagggaaagtcttgctgaggggtaaaatgtaagctgagaatgatggatgagaaggagtcagccagctaggcagacaagaccgcgtgcgcaaaggctctgagtcaccccagtctgcttctgtcctcagtactctactatagagttcttgctagtgtgaccaccagttttctcatgttaagtccagtggacatttttcagtcctcttctgtttgacttcccagaatcttttaacactattaccctttttcagacactctcatcctctggctttggtgccattttaatctcctagttttctctctacttctgtggccctcctctgtgtcccctctacaggaatcactcaaggtttgattggtgggctcttcttaaaattgttttattttttgtactttctctacccttaccctgaaagatggcattctcttccacttctgtttctgtggttttaatcaaccctagactccaactctgttttctctctctctgtgacgtctctagttgaatgttttaccactacctcaaacccagcattacccaaactgaactttgatccttcgggcttcttgtatctgaatcctcctgcagaagcacaagatgtaggaatttatgttcaccatcattctttctttcatttctcatttccaatttatgagcaagtccttttcrtaaataattttggaatctagtcacctatcttcacttcgttattgcttctttagcaaggtcttttaaaatcttctagtgaatcttttaatcttttagactgataaaattaatttcatctggggcagtttatctaatgtgaactgtttcagtttctgaagttttgtttgatagcgaatgctttcttactctgttttggaattttagttcataggctcttttttctggtgaaagttaaaaatgtttattgctcttcatgcttcatcttctcccttccctttgcttccttgaccttcctcttcctctctctttcctagtttctctctcaccccggccattgctgcctcccaccttctccctgaccagtagttttgtgggtgcccccccgccggcattttggattcctaatctacatccaggtcttatggtgatagtttggacacatggcagattagtcccagcagcttgttcagattttgaccctgaagctgtggttctgcctccctaggtccacagtctccaggagttgtagtgagctgtagttgcagacaatacttggtggcctcctcttcaggccaagggcagttcctctttggcctggtcttcaccagtggctctggctctcttctcagtcttgtgagaacattctygccatctgtactttgcatttggcacttcctgcttctgaggaaccagccagtggttagcattgttatgcgtttttctcctgttttgagtttgtgaaatgtttaccatttatttctgcttacctgttttcttagttttcctttctgggttttattgtcattgttgtacatttgaagtagagagagcttttgaaatatgaactcactgtgccatcctttttttgtgctaaatttattgaagtccacaaaaaccagagaaaaatgtcagatctcaaaattgtgtttttgctcaatttcaagcatcaatttatccaagttacccacttgatacctgacttgccctacttagcaagtcgaggcattgttttgctggctctggcactctggctatagccagtcactcaccccacttgggattgcttcctttgctgcttgttcctgctgctgctcagtggcagctgccaagttggagtagcaaagggaaaagtttagtaggcatcttttaggaagacagaatgctgtctggagatggcagtggtggatttatatctgagtcattcatctgaattggaacctgtacaaaggaaaagaggttctagctcagataaatagatataaattcattgttgctatcttcaggcattcatttatttaattagatgcactgaaaagcactctcgaggtgtggggacagggtgtggtgtatccaatggagagtttgtagaaattgttaagttgaggtacaactgcttataaatagtatttgaaaatgtcttattttgtaaacaactgagtatttagttgattgcaaatcttcctgtaaatcaatgatagattagtttagtttccgggtctatagtatattcctcaaatggatagtaggtatttttgtaaaggggactttataattaaatatagcaaagtgtcttccgtggactgtattaattaaatgttacagatccccaggctgcactgatgaaactcagctgggatgctctacatgtgatagggaaatttggtttcaaaattacacaacctatttgtgaaggtttcgtgtaatttttcttttcagtaagaagtgtttccatgtatcagtttttttacatttaaaaaagtaatttattttcaattgtggtaaagtatacataacataaaagtttaccattttaaccatttgttatcaaaagatgatgagatctgtggaggaaaaaatggagagctttattttctatagaraaaacttgcagactggggaggcatagttttcactagtgaaaatgttgctctaaagagaaaaaaaaaggggcttggcttaagtagggaaagttcttgccctcattctctgtgaggtctgtgcaaacgaaggattcaagcttgttcggttcagattgaaccctaatctggtgccagaagtgtctctgtcagatgttccttcgaaaggctggtgcaggggaggtttctgctgcaattcttcttggccccagtcacaggaactgttctggcttaagaacagttcttaatcaagagccgtgatttccaagaacgaagggtggtgaccactcttctctcactctgctatggccgcttggacccattgtctaaatgtgggtatattagccacagggagtgcatctcatctggagagcttgcagttttatttacaattttatttcacacatttttaagcatacagttcagtaacattaagcacattcacattgttttgcaggatgaaaagttctggaaacgggtggtggcgatggtttcgcattatcaatttttacctagtatgcttttttttatacagtgttttaaagtgttggaaaaaacttatgcctttacagtattttattatattagcttatgttcattgtatggggttgtaggcagtgacagatactcaacctttaacaaataccgttgagcacttgttatgtgaagatgctccacatcttttgaactaggcagttgtggttcctgcactcttgtggcttccagttcagtggaagaagcagacattttataattacatacatttatgacattagtgtaatgaaaaattatagggtgttttgtaagtgtggaacaggaggatctgaaccagcctggggagtcagggaatgcttttttgaggaattcacattttggcagagacctgaagggggtgacaagagttaggtgaagctgggagaggacaatactagggcagaatagagcttggtaatttccagaaagttagatagggctaatgtactcttaaacaggaggcctgcaktgttgttcacaatgttcacctatatgtagttgtgtttgttttttaaatttttaaaaattatcctatagtaataggatacccatctttcatacccttctgtggatatcagcacatgtgtagattatgtcactactagcacaatcagaatgcagagtagttccattacccctcagactcccttgtgagtcattacccctcagactcccttgtgagtcattacccctcagactcccttgtgtatcccattagtgtcacatccttttccaccctgacactggcaaccacggatgtgtttcccatcactatagcattgtcatttccacacagcgtgtaaccttttgagactggctactttcactcagaatatgtttttgtgattcatccaaactgttgtgtgtatcaatagaatgttccttttttattaccgagtagtgttgcattgtgtggatgcacaggtttttttaaatccatttacctgttgaaggacatttgggttgtttccagcttttgacaattatgaatagaactgttgtaaacatttgtgtacagattctgtttctctagtataaatatctaggagtgggattgctggtcatatggtaagtataagaaactgctagacttttccagagttgctataccagaatacaatgagagttgtagtggttcttcatccacttcagcagtcttgtcaatatttttttttttgagacagagtctcactctgtcacctgggctagagtgtagtggcaccatcttggctcactgcaacctccacctcccgggttcaagcgattctcctgcctcagcgtcctgagtagctgtagctggcattacaggcacctgtcactatgcccagctaattttttgtatttttactagagacggggtttcaccatgttggccaggctggtcttgaactcctgacctcgtgattcacctgcctcagcctcccaaastgctaggattataggcatgagccaccatgcccggcctcattttaaccactctaatatggtttggaagtagtatctcattgtggttttaatttgcatttgcctaatggttaatgatgatgaccttcttctcatgtgcttatttgccatccatgtatccttttcagtgaataagctttgcctgttttttaattcatttgtttgtttgtttttctgttgttgagtttagagtgttctttatgtattccgaatacaggtcctttgttggatgtatgattggcaaatagtttcttccagttggtaggttgtcttttttgtcctcttgacagtgtctactgcagatcacttgtttttaattttgataaagtcagctgatcacttttttcatctataggttgtgttttactgtcatgtctaagaactctttacctaacttcaggccacgaagattttcttcaagatttttgtagttttgccctttattgttagatatgtgatccatcttgagttaattctctgtaagatttgcagtcggtttttttgttttttgtttttttgcatatagatgttgaattatttcaacaccattcattgaaaatagtatttctctattgtgatggttaatattgagtgtcaacttgattgggttgaaggatgcaaagtattgtgtgtctgcaagggtgttaccaaaggaggttgacatttgagtcagtggactgagagaggcagacccacccccaatctgggtgggcaccctctaatcagctgccagcgtggctagaatgaagcaggcagaagagtgtggaaggacttgacttgctgagtcttccggccttcatctttctcttgtgctgcatgcttcctgacctcgaacatcagactccaagttcttcagcctttggactcttggacttaactggtttgccaggggctctgaggccttcagccacagactgaaggctgtactgtcggctttcctacttttgaggttttgggactcagactggcttccctgctcttagcttgcagatggcctgttgtggtacttcaccttgtgatcatgcgagtcaatactctttaataaactccccttcatatgtacatccatactgttagttctgtccctttagagaaccctgactaatacaattacttttgcacctctgtcaaaaatcaaatggggtgatatttggatgggtttcttgactctgttctttttcattcatctgtgtctattcccttgtcagtactacatagtgttaaaattggattcctctacctttctttttctccccccatttttccaaaactgcttcagctattctggttcatttgccttttcgtatacattttagaatcagcttatgtttatgtacacacacaaaaaaaatcctgctgagattttgattagaattttgttgaatctacatcagtttgggaagaattgacattttccactgtgttgagtcttccaatccatgaacatggcatgtctcttaatttatttaggttttctttgttggtggtggtattcttagacagggtcttgctctgttgcycaggctggagtgcagttgtgtgatcatagctcactgtaggcttgaccacctgggctcaaacctcccacctcagcctcctgagtagctgggattacaggcttgtgccaccatgcccagctaggtttttaatttttttgtagagacagggtctccctatattgtcaaggctggtcctgaactcctgtgctcaagcagttctcttgctttgggattacaggtgtgagccaccatgcctagcctgtttaggtctgctttgatttctttcattagcatttcatagttttcaatatgcagatcctgcacatgctttgttttgtttgttttttgtagacagggtcttactgtgttgcccaggctggcctcaaactcctgggctcaagtgatcctcccaccacagcctcccaaatagctcccaactgtaggtacatgccaccatgcccagcttgtactgttttgttagatttttaacctaagtgtaatttttttttggagactcttaaaattgtattgtttggccaggcgtggtggctcgcatctgtaatcctagcactttgggaggctgaggtgggaggatcattgagccaggagtttgagaccagcctgggcaacatagccagaccctgtctctacaaacaaacaaaaatatagtagggtgtaggggcacatacctgtagtcctagctgctctggaggctgagagggagaattgcttgagcccaggagtttaaggctgcaatgagttatgatcacaacacttacattccagcctgggtgacagagtgagactctgtctctttaaaaaaattattgtttaggccggtgacagagtgagactccgttattgtttaaaaaattttggtttccagttgtacattgctagtagtagaagtatgattaatgtttgaatgttgaccttgcattctgtgatcttgctaaactcattagttctaggagtattttcgtaggttccttggggttgtctatgtagataatcatgttgtctgtgaacagagacagttcgatttttttttctttataatttgtatgtcttttattttatttttttctgttgctctagttaggaattccagtatgaagaggaagaggagtagcagtggtgcacattcttgccttattcccaatcttagtggaaaagtgttcagtcattcagaattaagtatggtattagctgtgggttttttgtggttgctttttatcaggttgaggaagatcctgtctactcctaatctgccaatgaatgttgaatgttgtcttacacttttcctaaatcaattgatatgatcatgtggggtttttttccttttgattgtaatatgctattttacgctgagcgattgatttttttagtatgaagctacttttgcattttggttgtggtgtattgttttttatatattgctggattggacttcttaattttttgttaaggattttttacatcattattatgagggacattggtctgcagttttctttttgtgtactgtctttggtattagcataatgttgtccttataaaattaattgggaaatgtttcttctctgaatgagagtgtataaaattgttttttttttttttttttgagatggagtttcactcttgttgcccaggctggagtgcaatggtgtgatctcggctcactgcaacctccacctcccgggttcaagtgattctcctgcctcagcatctcaagtagctggggttacaggcgtgcaccaccacgcctggctaatttttgtatttttagtagaggtggggtttctccatgttggtcaggctggtctcaaactcccaacctcaggtgatccacctgtcttggcctcccaaagtgctgggattrcaggtgtgagccacgcgcccggcctataaaattgttcagaattctccagtgaaaccatctgggcctggagatttcttcttcagaaggttttaaatgacgtattcaagttctttaatagttattggagtattcaggttatctatcttattttgagtgtgttttgttagctttgtgttttgccatttttgaggaattggttcatttcatctaaattgtccaatttatgcacatagaattattcttagaaaccttttattatccttttaatatctgcatagtttgtagtgataacctctttcctttcttattttggatgtcgtttttttcttcttttcttagtctttttagagatttatcagttttattgatgctttagaataactagcttaggttgcattgatgtcttttttctctattttctcttttaaaaattattgatatctcctctgttgtgttcttycttctactttaggtttattttgcttttctttttctggtttgtaaggtaggagcttagattattgatttgagatatatcttcttatttaatactataattttctctctaagcactctaagtgcatctaatatttttttttatatattgtgttttcatttttgttaagaatgttttctgagacttccttttttgcacataggttrtttaaaattgtttaatttccaagcatttggagatttttctactgtctttctgttatttatttctaatactaattctctttgttcagagatcatattttgtattattatagtttttttcagtgtgttaagttcattttctgatccaggtatgacctgttttgttgcatgtttcatgtgcacttgtaaagattgtgtcttctgttgttagacttcagtactgtataaatgtcartgagatacaactggtttgtggtattgtccagttcctctatatccatgccaattttctactacttgtctttcttttgagagtcttgatgtttccaacgatgactgggttattgtctgtttctcctctcagttctgccagtttttgctttatgaagcactgttgttaggaacatacacattaaggattattgtatctttttggtgaattgaccctgttactattaggtaatgttcttctctatcccttgtaaatttctttgctctgaagcctactttttctgatactaacctaggcattccagcctttatttgcttgatgtttgcatcgtattttttcccatcattttacctttaaactacatatgtcattatatttgatgtgactctcttgtacacagcatatacttgggtcatattttgacaatctcttttaatttgtatgtttaagtcttttttttttttttatttttttcgagacagggtctcactctgtcatccaggctggagtgcagtggcgcgattatggcccactgcagcctcagcctcctgggcccaagtgatcctttcacctcagcctcctgagtaactgggaacacctctagctaattttctttcgtggagtcgtggtctccctatgttgtccaggctggtcttgaactcctggactcaagcattcctctcatttcagcctcccaaagtgttgggattaaggcatgaaccaccacacctggccacttttatgtttaatgtagttattgaaatgtttggcttttgggctactgttttattattttgtttttctatctagtttttttcactgtttcactctttgtgtcttcttttgcattatttgaactttttaaaagtattcctttgaaatttattgtgtttatgactatctcgtgtagtttttcttcaaattaatactttattgattataatatacatacttaacttcctatggtctattgaaaattcatattttaccaccttaattggaatatgtcagtcttaccatcatgcaggtatctacattctcttcttatgttatggttttcttacgtgttatatctgcatgcattgaaaaccccatcagacaatgttaaaatttttgctttcaacagttaaacgtatttcaaaagcaatgttatcatttctgttgctcttccttcattccttatgttccagatttccttctaatgttattttccttctgtctgaagaacttccttaagcagttttagagctgatctgctagcaactaatgctcttagttttcctttatttgaaaatgtcttggctgggtgcaatagctcacgcctgtaatcacagcactttgggaggccgaagcgggtggatcacgaggtcaggagttcaagaccagcctggccaagatggtgaaactctgtctctaccaaaactacaaaaaaattagccaggcgcagtggtaggcgtctgtaatcccagctacttgggaggctgaggcaggagaaaggcttgaaccaggacagtagaggttgcagtgagccaagatcacaccactgcactccagcctgggagacagagcaaaactccatctcaaaaaaaaaaaaaaaaaaaaaaagaaagaaagaaaatgtctttatttcgccttcattcttagaggatatttgcactgaatatagagtactgagttgacagttctttctttccagcacttgaaaaacattatgtcacttccttctggtctttgtggcttctgatgtgaaatccatagtagtttgagtatcattcctttatagttaatgtgttgtttttctttgtttactttcaggaattttgtctttaattttcagtggtttgattatgttttctgatttctttttgttaccctgtttgagattcactgaccttcttgaatatgtaggtttatgtcttttaccaaacttgggaagttttcagtccttattaaaaaaaatattttctcagcatggtgctgagaacattttttttcttcttttctctgatagacatgtatgttagacctttaagtattgttccatagtctcttgttaattttttctactctttttttctctcttgtttcagattgtataatttctgttgatcagtcttcagatttattgactctttcctttgtcatctgtagtctacccttgagcccatccagtatgttttttttaatttgattattgcatattttagtttaaaattttccattggtttctttttacaaattctgtttcttttctgatactttcaaagtttccatttgtttcaagagtgttcataattgcttgttggaaaactttaataataacttccttaaaatctttgtgagataatttcaacatttttgttactttggtcttggtatttgatttttccttccctgtaagagatttacttggttcttgggttaattttagatattttgagtatgatgttatgagacataatcctctgaatttagttcatttctttttaggatgttaatatttttgtttcagtagcaattaacttggttggcttcagagtgcacattccagtttttttttgtttttttttttcctgtgggcggtgggtctttgtactcctatacagatccaccccacatatgtgtcaacaactcatcagtctgggatctgtggttagttcagtgtttaaattctttggtatacttattagaattacatccatacatgcccaacctagggatgagctcagaagttcataaacaactttattgtgtcacttctccatgctagcttctcccattctggttctttaggccttcacttttcagtcttcttacttagaaatctgaggttttattaccttgctctgctgttcaaattttgtgtttgtgtccaggacgtgtaaagagcacagagagagcagaaaaaaccttggggttttacctgccctcttgagactgcagtttcactgattgaagaagaatgtttcttctctcattgttttggctcttgctggcatctatgtctgcctctggtaccacagccacaaaattacttgggggttggggcaaaaaagaatagagcaaaaggaaaaaaaatatgggaattgagatttccataatgttgtaagtatcaggagctccctttyctgccttttgagtgagatgaataggggttctcctggagttctctccatcagtgtccccatgcctactttgcatttcaggcttttccaaggtcrgtcagggagatcatgggaggaaaagaaaatgataaaactcaccacttgtttatagtaatttgaattcttttcttccttgatctgcctgctactgtttgcttttccaagtctataaatacttgattcgtgcattcttttgaggtttcatagttgaattcagtgggatagttggggtggagcatgcttagtccatcttacctgcagttagaatggccaggggtgtttcttgaaagctacttagaaaacaaatgtgggaaggaattagcagaatgcatctttgcatcctgtatactatgttgtgtatcctatattatggtaaaagtttggttagataacagaggaaaataaaggaggttttcattgttgatagcactatgtcctaaccttcatctgaggttactgggagagaaaggaaagtgttacagctaattgcttgaatgactcaactgcagtaatatatagtaagctgctattaatgatgcagtatagcttgcctcctgtggatgttattttctttccataggagataaacattgagaatcacagacttcccaaaatccaaacactttaccgtgacattcaagatccattcaagttcctactgatttttcttctaccatcctttcccatcagtcccttttcatacactttattttcaagccatctcacagatttctatactggcacctttcacatttccaccatttcgaatgtactctttctctgttagttctctctcactttttttcatttattagaaatccagttttattgttcaatagccaattctctgtgaaaccatttgtacatgttattttttattacatttatttatttatgtatttatttatttatcagacagagtctcactctgtctcccaggctggagtgcagtggcgtgatctcggctcactgcaacctccacctcccaggttcaagtgattattatgcctcagcctcccgagtagctgggattacaggcatgcaccaccatgtccagctgatttttttgtatttttaatagagacagtgtttcaccatgttggccaggctggtttcaaactactgacctcaagtgatctgcccgccttggcctcccaaagtgctaagtttacaggcgtgaaccaccacacccagcctttattactcttaattgcagttggtgtataagtctttcataccagaccaaactcctggaggggtagaggactgtgatttatcatctttttataccttgctgtaataaagtatacctgtaataaatttttgagtggatcagggaaaagaaaggaagtgttcatgatttagttaatgttaaagggatatgatgggtggaacatcaaatagttgaattacataagagagtggaaaacaaaggcaagtactgtttaaatggaattaggaactaatgttttgggaaatatgtttcgatgactttgagtgttggcaataatacttggaaattcattttttctgatctttttattatatacagtttttcttccagtagggcagattttttttttctctagtcttttctcttctgagggccagctgccacctcctataaggtagagtttttctaccttgtgctgtccagatgtttctttttatttgaatttatttatttactcttttacacaaaagaggcatgccaacagctgcactaagtgttctttcctaagccagccagatgtttggacttggagaaaagttagattttgaaataaaagacaggtggattatagcccttcattcaaccattcagtttttcyttgcctattgctgctgccaggtagggtgtctttaacccgtctttatagtacctcttgtcacaaatttagttccagaaattaaaggactaactcctcctgaaatctctatgagatgaaatgagccttctttttttttttttttttgagatggagtcttgctctgtctcccaggctggcgtgcagtggcatgatctcggctcatgcaacctccgcctcctgggttcaagtgattctcctacctcagcctcccgagtagttaggattacaagtgcgtgccacgacatccagctaatttttatatttttagtagagatggggttttgccatgttggccaggctggtctcaaactgctgacctcaggtgatccacccgcctcggcctcccaaagtgctgggattacaggcatgagccaccacacccagctgaaatgaaccttcttacagactagattctatgtggttgtcctagtatgaggctggtaagcttgctgacatcatgcttgggttttcatctgatgaggttcagctggtggcccagcatagcgtatcaggctccctgtgtatgacagtgccgctggagatgggtcattcttcgactagtaggtratttgatctcccctgatacatttatgttttttcacattttgggctctgattctcccccttacatgggcttcaattccaaggaaggtaggagttgagatacaggtacccttctgtttttcaatcctgctactcttgctgtgtttatctgagtgtggttctcttatactctgtaaactaagtccctaaagaggaacttctgttcctggtagctggacctacttaaggagttgcaggtaaattcagtgaatggcatagtcactttgggtctttaactattgagttaaaatatctttggccaggtgcggtggctcatgcctgtaatcccagcattttgggatgctgaggtgggtggatcatttgagggtcaggagtttgagactagcctgaccaacatggtgaaaccccgtctctactaaaaatacaaaaaaaaattagctagctgtggtggtgcacgcctgtagtcccagctacttgggaggctgaggcatgagaattgtttgcacgtgggaggcagagattgcagtgagctgagattgcgccactgtactccagcctgggtgacagagcgagactctgcatccacaaaaaaaaaaaaataaaaaaaaaaaataaaaatctttattaattattagtcttggatgaataggaagaaataaaaattgtttcttgagctccttcaaagtacttattctgtcttcgggtatagaatgattttcttttttgggaaatggggagaaagaatatttatttttgaagagaaaataaaacacttctagacatttttgttttctttttgttgttgttgtttgtttggttttgagtcagggtcttgctctgtcacccaggctaaagtgtagtggcacgaccatagctcactgcaacttccaactcatgggctcatgcaatcattctgcctcagcctcccaagcagctgggattacaggtgccagccaccatgtctggctaattaagagaaatttttttttttttttgtagagatggggcctctgtgttgcccaagctggtctggaactcctgggctcaaatgatcctcccatcttggcctccgaaagtgttgggtttacaggcatgagccaccatgcccggccccagatatttctgatgtctttaaatttcataccactgcttggtgaaaaatgactgtgctaaggaaaacttcttgagctccrtaactgcttttcatgattaccttcaatgtctgggagctaactataccaggaagcttttgagtggttgattttgctgctatttgtaatactcatctgatagtttttggtaagaaactaaacagccatataccgtaaatcaagagctgtcctgtcttttgggatcccagcaaaaatattggataatgtgggaaatggaatctgagcccagaaagccagcttttagagtttctaggaatgccatgatgtctgcatagatactaggagaaagatactcaccattaagatacataaatagaggaatggctgtagtaatttaggactggtatgatcactttcatgtactcatttttatatcatattagatgctcactagattagttgatgcttttcatgacagtcttaaaaataagttttaactgattaattgtagaaaactatgttcttgtttataatctttgatttttaaattaaaaatacatacactatatatttcctatgttaagaaatgaaaaaatttaaaagtcctgacttataattaaggctgttgggatgagccagacttcatcttcctgtcccaaattcccagggatgagaaaaagttgaagagaaaagacctaaagataaacaacaaaccagaattttgatggaaaatggtaaagagtactcatgggatcctggaaatgctggtcctggaaacagtgaggaattttgcaagagagatggctgatgggatcatgccccaggaaaccccagtctgaaacacagataggagaggatggctgcaaagatgggagcagctccagaggagacagccttgagcacaagaagtgacatccagctaggtgattcttccacactcagtgtccatgagggagcagatgattcgtaaacaggtagagccatatcttggaattctttagtagttaaaaagactgaggtggatctctgtatatcaacagagaacatctctaagacattaaaaatggaaagagaacttgtgtaaggacacatatggtataatgataccattaatggtaaaagaatcccaacctaaaatatctttatagttacctatgtaaaagcatacagcataggttctcaacagtggcattgttcacattatgggttagaggactctgtcatgggcgactgtcctgcacactagagggtttttagcagcatccctggcgtcttaccctctagatactagtcgtgtcccctcaggccccagtagtgacagccaaaactatctacagacattgccaactgtgtcctgggggacaaaattgctccaagttgggatcccttggcatatattgaagtctaataatgcatattcacctgttaagtgattaccggagagagacattgtaatggggacaggtgtggtcagtggagttgttagctttattttgaataagaatgtttaggtataacggtagggcgcagtggctcacgcctgtaatcccagcactttggaaggccaaggcaggcagatcatgaggttaggagatggagaccatcctggctaagatggtgaaacccatctctactaaaaatacaaaaaaatagctgggcatggtgacatacacctgtagtccctgcgactcaggaggctgaggcaggagaatcgcttgaacccaggaggtggaggttgcggtgagccaagattgcaccattgcactccagcctgggcgacagagtgagactccgtctcaaaaaaaaaaaaaaagtttagctattacatatatttacatatattacatgtaattaaaaacaaaacaaaagatagttttgcttttttttttttgagacagagtctcactctatcgcccaggctggagtgcgctggtgcaatctcggcagctcgctgcaatctctgcctcctgggttcaagtgattcttgtgcctcagtctcccaagcagctgggaccatagatatgcgccaccacactcggctaattttttgtatttttagcagagatggggttttgccatgctggccaggctgatctcaaactcctggcctcaagcgatctgcctgcctccacctcccaaagtgctgggattacaggcgtgagccaccgcaccggccagctttgcttttttataagatatctgttgtattaaatttaaaaatggttaatggtggctgggcgcggtggctcatgcctgtaatcccagcactttgggaggccgaggcagacggatcacggggtcaggagtttgagaccagcctgaccaacatggtgaaaccccgtctccactaaaactacaaaaattagccaggtgttgtggcacatgcctgtaatcccagctactcaggaggctgaggcaggagaatcacttgaacccaagaggcggaggttgcagtgagccaagatcgtgccactgcactccagcctaggcaacagagtgagactctgtctcaaaaaaaaaaaaaaatggttaatagttagaagaaatacaggtagcttacaaacgtgcaaatgtgcccaaactcactaataaccaggaaaatgcgaattaaaaaaatgaatcatttttctccattacattaataaaattagaaagataaatcatgttcagtgatggtgtagtgttgggaaattaatctctaatagtagtgtaagttgacctaagattttaaatgtgtagtttgtggtatttgtatttaaattaaatatttttcttatagaaatatacatatgtatgcagattggcatgtttagggaagcttattgcagcgcacaatacctgcaaattggaaccatgtccaatactaggagaatggttaaataagttatggttcatctagattactagaaatactgggtagcagttaaaaattatgaggtagaattctaaaaaaaaaaaaaactgagtgataaaattagttgtagaataaaatgtagtgtgattcagtttataccaagaaaaatcttaaacatgaaataaaactctgcacctttatttctgcatatccatatgaaaatgcttaggtaagtttggaaggacacatgcaaaactgatcatggctggataacaggaaatgggactaggagcctttaaaacggggcagggaataatggttatctggtatctatactgcttaagctttttttctttttaaccaaaggagtaactcatacattacttgggtaattacaataaaattgaaaaatgtaagaacatctaaatgacttgctttatatgcatagtgtcatcatttagtggcctgtgttgagcagtgatagctgctgctggggctctggtagggctttaagatcccatgacttttggtggctctccatattttgtggaattggcattagctgttcatatggtttggaaacacttttttaaaaatattgatttcagtggagattatttcccaaccctattcctagaatttcactctgttattgcttcagaaagatgtattcagaaatatatgcctgtgtatttatgacttcatcactagactttgaatgcatgtgtgatagctttctctttagtaagtggaaattaatcttaaagattgcaagctagagctgagcccacactcttactggtattttcttgtttcctcccctaacctaacttgtcatagtttttcttaggtagtattatttatttctttttttactacgtagtgacattcttcaaatgtatactttcactctggcttgtccgtaattggctggaaattgtgatggatctatatagttttttttgtgtttttaataaaatctgtataacataaagtttactattttgctcattttatttcatttatttaattattattttatatttttacagatggggtcacactgtgttgcccaggttggactcgaactcctgggcttgagtgatcctcctgcctcagcctcctaagccgtggggactacaggaactgggccactgcacacggcagttttagtctttttattttttattttttgagacagggtctcactctgttagccaggatggagtgcagtggtggaatcacagctcactgccaccttagcctccacttgggaagcctcttgggtctgccactgcttgtcagaaactttttactctgaattatgtcatatctcaggtgtttttacctagttattttgcacattacccttctcaaaggcatttgttcaagtttttcctaagctaatgaaggaaaacaaacctgagtcatctcttggctgtcactctgcctctcctactctttacatccagccatatgtacagtcctcaccccacccaccccacccctactctactttttcctctgctttattccgcagtcctttcatttgtggtctggtacccaccagctacactgacatgactcttgctaaggttttgcttgaatacttgatgtctcctttctctctgtcattcctccccttctcccttgatgcttctactaaggggtcagtggtatgagaagatagttctcctcctgctggttttcattattttgttgtttactgtatcgtcaggaatgcatgcttgcaagacaaagactaaaacaaaaaacaaaaaacccaaacagcaaaaaaaccccaaaacacctttgttttggttccgagatcgattcagtattagttcccttttgtgaaatgaaaacaggattgtagaaaatgggctgggaattttgcaactggcaaaaacgtattctctttttttcctgtagtttaaaattttaccactttgaaaatcatgtaagttatcttagaagaaaaatagtagtccactaattctaccatccaaaataaccatgaataaatatgtcttggtgctacacatgtagtttttcaaaatggaatcaaagcgaatctttaaaaaaaatcattttgttttctatgatcaaattgcctttctgggaaaggacatgccagaatgttagttttttaaaacttataaaagtatctttagatactttgaatgaaatagaaagagttctattctttttttttttagaaataggattttatctggttgtttgattttttttttttttttcagttattcaaatgaagattgatgcagttggctttcctttaaccttttagtctttcagggtaattttctttctttttttttttgagactcccaacaagtttattattttttaaattgtggtaaaatgcttataaggaaacttgccatcttaactatttttaagtgtacagttcagtggcattaagtacattcacattgttgtgcagccatcactataatctatctccagaactctcttcatattccaaactgaaaytctgtacccatttaacagtaactccccattccaggctcsccacagtctctggcaaccactattctactttcaggataattttcattggttagtaatgtttggataatttgattagatttggtggatactgaagactggccgggttatgtaagctgttgctactttcagccaaggagtgcatctagtccgtattacatcatccttggagtgttctacccagtgtcttgcattgaaggacatcagaaggaaaactcctgtattctcagtcgtggtaaatagtgtccacttcattacagatctccttgagtgataggtttcaaaatatctctaggcatgaagaaacatttccaaacctgcttgtcttctctacctttctcagtatgtactagtttagaaggtattcaaaatstttcactgagaccattgagttttatgctaaatataacatctggcctagcactttttatcactcatatgcaatctatttgataaggacagggaccaaatagaatgtctttttcaatgtattttaggcatctaattgactaatatgaaattttctattaatccagagtttttaaatgcaggcataattcccccccaccccgcccgcaaagattcagtcttgctctgttgcccaggctggagtgcagtggcctgatcggctcactgcaacctctgcctcccaggttcagcaattctcctgcctcagcctcccgagtagctgggattacaggcatgcaccattacgcccaggtaatttttcttttgtattttttggtagagacagggtttcaccatgttggtcaggctggtcttgaacccctgaccttgtgatccacccgcctcggcctcccaaagtgctgggattgcaggcgtgagctactgcacctggctgcaggcatactttttaacctatttatatccaaacatttaaatttattttttatttttattatttttaatatttttatcattgtatatgtttatttatattattatttcaaattgtttattaggtatgaattttacaaactttacttatattagcggtaacggtggagcgggagagtattgcgccttctccaagctccccggcgagaaccaccaatagtgtggtggaacttacggccgtttccaagggccagggctcttttggcctgcagatgtcagcccacacatctccctgtgctgtggactgatttggtgatccattaggtgtcaggatttcttctgatagctttatggaatggatcagtgaggataacctcaaaaaatttgtatgtggaatcttcaccaacccagtaagaattcaggactctcaaagccccacagtggcgtccagcttgctcctctgcaacggactgaaggcttggagcaaactttagctggttaacaccatgatggacaggcttgccataagttgcacccttaggaactgggcgttttcggccaccacggcaaacacgaatcctatatataacgtaaccttgcttggcctcgcagcccagtcagcgcgctttatcaggctgggtggggcrgagagccctgtggagagcagagagctggcggtactgccagcagcggaccctcagaagaaagcgcatgacatcagactgctgctttctccgtagctcctggatgtactcgtatgcacccatcttggcttacctgatggctgctgccagacggaagaaaagaagtttaatttattttttaaaagttaataaagaagatgatttttctcagtcctgtaagatgaaaaacacatctgttgttctagttatttggaaattaggctcatacgggtaatagttgatgctagtaatttttctctgaagaataaaataattcaaaatagaaaactaaatgcttggctgggcgcggtggctcacacctgtaatcccagcactttgggaggctgaggtaggcggatcacctgaggtcgggagttcgagaccagcctgacccacatggagaaaccctatctctactaaaaatacaaagttagccggggttggtggcgcatgcctgtaatcccagctacttgggaaggctgaggcaggagaatcgcttgaacctgggaggtggaggttgcgatgagccgagatcgcgccattgcactccagcctgggcaagagcaaaaactctgtctcaaaaaaaaaaacaaacaaacagaaaacaaaacaaaacaaaaaaaaccctaaatgcttgatgggaaagctaataatctgctttaaaaatctctattggttttctgagaacggagaagtttatgaagacaaactatacttagtgttagtatttaaaatgctttacttttctttttgaaacatatagccagtaaatcctgcttagttgattagtgtacctcagtttaaactttccatggttgttatgtatttcctttgccattaaaatatataaaaaggaatttatatttttcaagatgttgaaatttttgaaacaaatatatctactcagcctatgcaatattaagtcattctgcagaatagcatctgcattgcttgaatattgtttgtttgttttgtattattaagccaaaaaaaacacctcacacatttcatacaacaatgacaacaaaattgaaatagagtttcaaaagtttgttagattgttctttccaggttgactcttaagtgtctctttaactaaggcagtagagaattcaaatgttttcttttgcatggccttttgctactagtgaccctgggctagactgtgggcttgttgagatgtgaatgtaccctgccccctgaagtaagatttgttcctgcaaatggaggaaaagaagccaaccaatcctttataaacaatttgtgtttagtccttctttgtaaagtccatagcagttttgacctgcttttaatgcatgatttattcaattgtttattggagcactctttttttttttttttaaactggaacaatcttaatcacccagtaaaatatattaggctctgagctagttcttgatakgtttattttatttatttatttatttttttgagacagagtctcactctgttgcccaggctggagtgcagtggcgcaatctcggctcactgcaagctccgcctcccgggttcacgccattctcctgcctcagcctcccgagtagctgggactacaggcgtccgccaccacgcctggctaattttttgtgtttttagtagaaacggggtttcaccatgttagccaggatggtctcgrtctcctgacctcgtgatccgcccacctcagcctcccaaagtgctgggattacaggcatgagccaccgcgcccggcctagttcttggtatgtttataaaacgtttgtgataacataggaaaaatgtctattatgctagttaaaaaacaaaagggtgaaaattatatatgcggtatcattacgaaagtgtatttagagaaaagactaaaaatgtcaatactattaggattctctctctcctttttacttttgaatgcatgttcattatagaaattttggacacataaacacatgtgcctatgtgtatcttttaatttcttttccttgataaaccaccaattgccatatgtattgccaagattaagaagactttatgtaggtgtagatttttaccttaaacataatgaaaaaaaaataataaaagttgcaactttttgtacctcaaagacaatggcttttaacatttgataatgaaagttattaagcaagctgctatccaagtgtatctatgagtaaatagctttaatcacataacattgggctaggggagattaaaaaaagaatttaaggcgtaaccttatgatctggtggaggagaaattgtaactgtgcaaagcagttaaaatgagattgttgggtagatgagattatatgctaaaatytgcactaactactctcagagtttagattagaggagattcatcctaaattgaagtacttgggaaagatccagtggtagatgtgaaacttggagtccatcttctataataggtggtatctgaggacaataaaacaagtgtggatttaagtttaaacaaagacttaaatgtattctttttaaaggattgtgaagtactcaatttctttcttacagaaraaaactacaatcacaattacaacaacaaaattgacagtaacaggatctgaagtggacagagggcaatagggcaatagaggagggggcatcctggtctgagggcagaagagcaacttgaggttgggggcataccaggcaacgataaccacgaggaaggccttgctttgaacacagggatatttagaagccctttgcaagcagggctgcttttccctacaattggtattattaaataattaccgaatgtatatatttggatattttatagtaagatattgacctgaaaatcccttgggcatttacctgatcttttacctttcaatactcaatataattttttactaaagtggaaaatatttattgaattgacaaagagaattcttagctttctaaaagactacttttttagttttttaagatctcatttaaaacaaagtatttaaaaattatttcataactgaagactctaacagaaatactcaggtatttgccacctttgacttttttttttggtagaaggtgggtcataaatgtttaggtatatgtttgtgttccagtttttatatctgccttgcaaaataattgtaatctggaagtttctgaaactggaaagccattaggaaattaggaaaagtcatttaaaaagatagtaatcctttcatcagttaaaaagaatagactccttttagaactaagcagtttactctttttcatattgaatgcttagcttctattatgcaaaataaatagatttaaacattatagagtgagtagtcttaaaaatggagcatacattcctgaattttgagtagctttagaacttaatacacatatcatttcttttaggaataaatgtaaaatggatgaagattgaatgtgagagtatttaaatgattctcaagattttctggttcatgtgttgtgatattgaactctttctttcgtcttaggctttaatttgtgcctggtgctgacctgatgctgtgcagggacactcactgcatccctccattcagtccctctaattatcccaacttcctggggagcttgcttagaactgggcatgagtgctctttattaaaatattgggctaccctggctacatgtaacaaggtagtttttgatatcaaatttatgtattgatgaacggaataggaagctaaaattgtttgctgtgattttacataaagagataggggatattatggaaattatttggttagacaatgaattaggctgtaataaatgaaatcatggttaatagagttcctgagtttatttgttgcattgttgctttttagtgcatactcaaaaagaaatacgactctataaatgataggcagaacaatcagatttgcaattttgtgtgtatttgcagatgatggtaattctttttgctgggcgcatctgttaatgcagaaatttgtctcctcaggttcatgtgaaaatggcggatgaggctgtctgtgttggcccagctcccaccagtaaaagctacctcaacatggatgccatcatggaagccattaagaaaaccagggcccaarctgtgagtctgaatgaatctatctactgcagctgtttcatatgtagtgagcagaaagctagagtttgtatttaaaaaaaaaaataggaargaatgattgaaaatgytgttgcagttagttcatgtcacatgagttaaatgtggtcgaattcgctactggaaatcaaaggctttgtagcatctggcagtgttggttgctgatcctgcaggtggctgctggattcagctttcacaccagggagcagtttcagttcatttccaaatttgctaggaaaaaagaaatcccaattagttttgagtattaaccctttccgtgtaataagagcattttaaaaaattctgtgttataaacaggatccaaagactgtgttcaaattccattttaataatttaaaaattacttatacctagtacacttccagaaataaaaacagcacatttggtaattattttagtttgttaatgtcagtagaatgctcataatttacaaggataaatcattctctccacccccagttctgtttgaatagagtggaatccaaggaaaaaaatgatttctgatatcagaaacagtgttttttcttctattttcttttttctttttttaattatcagaactaattatatatagtgttaaaaactatgcaaagttatctctaaaactggatggaaacatccaacaccagcaattaagcctggagcgcttcaattagcgctcacatttcttttgaaagaaatgttttagtaagatgmatgtttaaataaaaagcctaattcgtgaacccatattatagatgtttacagtttattagcacagttagtgaaggtaaaacactttaaccttttaactatagcttgccaaaataaatatgtagttgagtgttgataaaatgaagttggtggaatgaaaactcttcttctctgatacagtagtttaaattcttctgtaccatgctcataaagcttagttcagctttttttttgttttgttttttgagatggagtttcgctcttgttgcccaggccagagtgcgatggcgtgatcttggctcactgcaacctctgtcccgccaggttcaagcgattctcttgcctcagcctcccaagtagctgggattacaggtgcctgccaccatgcccagctaattttgtatttttagtagagaaggggtttcaccatgttggtcaggctggtcttgaactcctgacctcaggtgatctgcctgcctcagccttctaaactgctgggattacaggcaggagccactgtgcccagcccgagttcagcatttaaaagtcgctgatacgtagctatttctggattatgatactggttcctttagaaatttgactctctttttagcagaattattttactagaagtatgttcaacactggctgatactgaagtggckaaatttatgtttggccagtctgggagagccaaaaattacttgattggatcaggctggtagattgtagcaatgtggcttgtgggtgaggatagtataaagtagttgtggatggcaaagtttggggtgaggaaggaaagaagagtagacattagaagaaaaaaaattcagagcacaaaataaaagtaaaaccacacctccattttagttcagtttgatagaaacggcttgttggtagttgccgagtattattaatgccatcaggaataaaatgtgttagctgtcctagtagtctgggttttggaaattaccagttcgtgagtactgtaaagaaaggagaatttagagtttttcatccatctttgccaaggttccttttacataattctttgatgcaccagccattgtgaaattctccagaattgtgggcaaagttagcctcaggaaaaggagagagagttttgttgaatagtgtagacaaatgccagtgggcaggaagctatgtgggcatatactccccattgtggttaggacaaaggtagtgtgtggaaaatgaatcagttaggacaaagggagtgtggagaaagtaaatataagaggcagtttcttggaatttgattctgatcctagaaatgtgagttagaactgatcagwgtataagagaagtgtacttattcaagggctcttgaacagtaaatattaatacataaatgcactgtacattttgcttataaagcttttgcaatatgataaaattgaaagtgctttttgctttcatttctaaggtacatccaggttatggattcctttcagaaaacaaagaatttgccagatgtttggtaagttggtaatgaaccagaaactgttcatttctttttcagaaagcagtrtggtagcatggctttgtaaatgtgggtagtgatggattatagaattttaattaacccagcagttctttgaaaattgtgacaagtgaagtggttttagtctgaaactcaactgtttatttgaagagtaattataaaaacagaaaagtttacaaaatcaccrttacactgaatgaatgatacctggtttattatatactgcatgatatttgaattaaagttaaaaacttcagatttttaactgtaaatatgttagggagtttagtgagttattgtagtgatttaattattttgtggcatttaatatcaaatcttaccaatgcctctattttgggtgaagttgtttttaatgatctaaatgtccccttccagctaggtgaattaacgtatgtttgttattaaattgatttttccaggtatatttataacttcattcaagatggtactgaaaccttattttttaggtactagaatatgattttgattaatgtttgtacatatgtttgttattagatcaattatgccaggtactatcttaatttattctaatatgttatacttgtttctgtggcatacagtcatgtgttgcttaacagcgtgaatacattctgagaaatgcatcattaggcgagttcatccttgtgtgaacatcacagagtctacttacagaaatctacatggtagagtctcccacacacttaggctaagtgtgttatagcctattgctcctaggctacaaacctatacgtgttgctgtactggatcctgtaggctgttgtaatacagtggtagatatttgtgtatctaaacatgtaaacagggaagatacagttaaaaatacagtattagaatctatggaaccactgtcatacgtgtggtgcctcattgaaatattctgtggagcataactgtactygtattctgttcttccacggattggaaattatttgtgaatgttgttattttctagatggaatttccacttaaaatctataactttaacttgaaacaattattaagatcacagaattgtctatttgaaccaccttgctttgtgggtccaaaactaaggcctaaagagatatcctgagggggcaaattacatggacacatccagaggttccagtttcccaggttttatgcagcatatctacatttttttgtttatatccctttttattttttatcttccttggaattttgaccaagattctgttattataaaaactatttgaatataatacttaaatttagatgtgtatgtgtgtatatatataatgtaatgtattacatttaagtcygtatagatgagaggtcggcacactacagtccacaggacaaatgcagcctgctgcctgtttttgtcaataaaattttattgaaacacagccatgctctttcatttatgcattgtctatgctgcttttgtcctgtgacagcagagttgagtagttgtgacagagaccatttggcctatcaagcctaaaatactttttctatggtcctttatacaaaaagtttgggaactcctgctataaatgaatatccaaatccaaattatatgagtaggataagtgatgtggtgccagtattatacatttattcctatacagttaatacatttatttattttatatattatatataatattatatacagtttatgcattttttsagttattaaaaaaatgctgcctttttttttttttttttttttgagacatagccttgctctgtcacccaggctggaatgtagtggcatgatctcggctcactgcaacctctgtctcctgggttcaagctattctgcctcagcctcctgagtagctgggattacaggcacacaccaccacgcctggctaatttttgtatttttagtagagacggggtttcaccattttagtcaggctggtcttgaactcctgatgtcgtgatccgcccacctcagcttcccaaagtgctgggattacaggcgtgagccactgtgtctggccaaaaaatgcttctttaaagtctgtttaaggcctttgagaaggatatattaataaaaatgaatccaatctggttcccgcgcagaatgctgcagtccatgggtgctatgagtcctgggtgctcatagtcatgttacggaaaataagttgatacacaaataacttcacttcagggaagaaaatactgtgagataagatcaatatctttgtaaatgaaagtaagaaggatgatttccatctggggttctacattagagaaaaacctgtagaatatacaacctcctcctttctttcacacgagttttctttccaaacctatttccccatttcccttttatcagtgctgtgcctccacccagcctgactgtgcgctgctcccatgcgtggctggctctgccctcagtgctttcctcactctctctgggtgggtgtgcctggcctcccacccaccgtgtctaactgctgcctgcccttgaaggcacagttcatatgcagcctctgcggggaaagggttctagatccttctgttgagaagtaatttctttccttggactttttgtttcagtttgattggaatgtttttgtttttggaaaaatgatttgtgctttatctgatacattgtttttacttaatatccaggactaaaatgattttttgattttttttgcataactgctgtgtatttgctttagaaagtgtacaataggccaaattcccccaatgtaaaaacacaccaaactttacaagactgataattttttatgctgagtttacgcgaagtgggattggattttatacagtccctgctgtccatgacttgaaaaagatcatgtgggccgggcgcggtggctcatgcctgtaatccctgcactttgggaggctgaggtgggcagatcacttgaggtcaggaattcgagaccagcttggacaacatggcgaaaccccatctctactaaaaacataaaaattggccaggtatggtggcacgagcctttgatcccagctacgtgggtggctgaggcaggagaatcgtttgagcccgggaggtggaggttgcagtgagctgagatcacgctactgcactccagcctaggcaacagagcgagactctgtctaaaaaagaaaaaaaaaaaaagatcatgtctttttgttattgcttagatagttcatagaaaaaacaaagctacacataatcctcataaaaatagcaatttkcaataattttaatgtgctgagctaacagattttatttccaagctgttttctattctgtattttccctgcaggcttcttttattatgagcattaaaggaccatccatgggagactatgaggattgttaggatgaggcaaagacatcttaacagagtttacaaagagctttgaaacgtgaaactaccttctctggaaaaatgggatgttggcttgaagatatttcttagtattctgtgttttctttctggtttttctatgttgttttaatcatattatcataccttgtcatttcaggtaacatagcataagttatagtaattagtttcaagagaaacatatgttagaatttgtgttttgtgtttggatcctatctgtgtacttgaaagatacacgtatatgtagatggatagtgagttccatcaggatgctcagcgttgaaagcataggagggaactgtgctgagcgtgtgaggtttggcgattgtgctcttttatcttctttctttcttgagtttttarcaagataagacatgtaactactgtaaaatgagaggtaatttttaaaatagccactgggttaaccaaaaaccttttaaatagctgtggcatccagtgtgggcaagggtcacatagttttgttcctggaagtgtaaattgtttcagacctcccccggcccccagaaatttgctagtatttatcaaaatttaaaacatctatatgttctttaatttaacagttccacccttaagaatctcacttacaaagatatacttgagaaaatgttcatggtaaggtgtttcataatagcaaaatttagaaagtgttcaaaagtaaaatgtggagaatggtggcttccctgcagggtcattggtcctcagttacaaggctgcagtccatgatgtgttatagtttaaagtgtgttgtaagcactttgtaactaatactaaaattctgaagttagcaagtttgccagtgactttgtttaacaatttttttgtttataaaataaagtggattaaaaatgatccatatgatactctactcattcatatttggactttttttttatttgagtaggaaaaaataggagagacttagaccttgcaagcccagggttgtttataactcttattttcactatatgggctataatctgcatagctcatggaaatacattatttttatatatcgcagcttaagaagggttgagaattgttactgtagtgtattttgtgtagacatcattttaatgacataaattttcttattaacattattatattttccattttggacacagacctttgattttagtatcttaaaatttttaatttttgagaatgtaaaatgctaagaaatttaagcacatgaaaacattgaaaattaggatttctttccatctttgaaccttcgaaacaagaccccaatttaagtctttagaggtcaccactgttaccttctggagcatgtgtgtctgtakgtgtgtgtgtgtgtgtgtgtgtgtgtgtgtctgtctgtctgcgtgtgctagaattttgctatcatttgttttgtaagatactcttagttgcttaagtaggacttactttttttatatgaaaagaagtggcatagaacttttcttatataagaaaacagtggtccctaggcttttaaaaataagtatggaatacctacctgcaggtaagttatttaatctttatgacaacytatgatgtattcttatttttattcttggttttatggaagagagaacaatctctgaaagtttaaataaatgccttgtccagtgtcacatagctggtaaatgagagagtatggatccgttgtttagtatatgttccagactgactctcagatgcattggaactgggctgggccgttagtggtatttgtttttgatcgatagctttagctggcatctgttcttgctgttggtggaggcttctctctttctgcttccttcccctcttccccattggtgtatcatcatagagatctaaaaagtagagttgtttcttttgtttttctcatcttgtaacttggatgccagtgaaggcaaatcctcacttggatttgctaacttactaagtaaggtaactgagtgagctttgctcagttaactgagtgccagagctacagcatagagatattgatgcctttwaccactcgttgatattcttaagtggaactaatraagtctccctggatttggaggagaaagttctgtgactcctttttccttttcataataattttataatatttttctagttgtgacttgtacatatgtgatgttcaaaagaattgataagaactaatgaatgcaacttcataaaacccttattatgacagaatatcttttgaaatgtttgagaacgtttcctttcctatatgttggcttaagktcagcttttagaatatttgaagattttgaatgcgatgtggaatactaaatgctctaaagtgaatgcctgaaaaaggaaaactctccctttacagttagggagtcttttaaggatgtagataggtcagatacttttagggcttgtgggattttggggagtggtttcaataggaaaagtctgggatttgatgaggctgggatttttttccctttgcttgaggttaaaacagattgaagtgttacgttctagttttcctattacgctctctccttactgccctatgtatctattagctcattctggagtcagaatgacagctaaattctttctctgccacttagtagctgtgtgatcttggacaggttgtttaatgtcggcctctgaagattgtgttttattcttactatttgcatgatatgyatttctccatctgtgattttatgttgaaaatactgtgtgtttcttgtagccaggatgtagttgtgtcatgcttttgaaataattctgatggtctctatttttaaattgtagtgtttagactatgaagttttttcttctttagtttgccttagtgtattttcttaaatagcagctttattgagatttaattcatgtgtcatcaggctcaccctttaaaagtatacaattgagtgatttgtagtatagtcacagagttatgtaaccatcactgctatgcaatgtcagtaaaatccattaacatttaataaatgatcaaggtggttggatttatgtctagcattttattatttgttttctctcagtctcccctttttttccttctgttttccttttctgacttggattattttagtaatttttgaaattccattaaaatttatctattggatctatctatttttcagtgttttttctaggattgcaatatccatcctaacatttcatattctagttagagctaatatgataccatttcaagtaaaatgtagaaattttgcgatcatatagtccatcctccttctcttcccatcactatcctctatgttatagttgtcatatgtatttcatctgcatgtattataaattctatgtgaaaatgttataattttgttataaacatgttgaggtgagttaggacatttctttaaattgatctgtcaaatttaaaatatagagacaaatctctagattaaatattttatttgagaatcacagaattggaatttgagacatacacatggggtcttcagtatrtccaaggaacaaagagaaggttgaaggttttattagatagaaaaaaaatgttactgattattttgaaagaaagttcattggtacttgaaaagctttgggagctggcaggctcggataggagagtggcagtggtagtttaaaaactagtcttagagtgatagcaggttgtttcagcagttactaggtaaagctggtcttagggttacagcaggctgtttcagcaactgggcctctggatagttcagttcttggagcctgtgctatgtgccctgagtgcttttttcccctgactccttgactcttatgtagttgggtatacaagaatgacccaattcatgtaatcaactttcacagatccaaatatcattcagttgaaattaagactcattttattttggtccatttaaaaaatgttgtcttttaaaattacatatgtatttttattgtggtaaagcagacataacataaaatttaccctttcaccaattttaagagtgtggctcagtggctttaattttattcacaatgttttgcaatcatcagctccagaactttataatcaccccaaactgaaactgtacatattaaacactaattccccatttcccacctactcctagcccctggtaaccttccttttactttctgtctctgtgagtttacctattctaggtacctcacataagtggaatcatataagatttgttcttttatgtctggcttatttcactcagcataatattttcaaggttcatccaagttccttcctctttaagactgaataatagtctactctgtggatataccatattttgtttcttcatcacctgttgatggacatttgggctgtttgtaccttttggctgttgtgaataatgctgctatgaacactggtgtataagtatctgtttgggtccctgcttttgcttctttttagtatatagctaggagaggaattgctgggtcctatggtaattctatgtttaactttttgaggttctgccctactgttttccatagtggctgtaccatttctcattcccattgttttattgtttttaataaccaccaaatcatgcctttccttaatgcaagctctgggtaattagttgactcattggatatttgtaatgtccgctttacataagtttaagaggtttaattkgacagtatcttcctaaccaatatgtttatgcttgttagtctagtgttactgccagagacctattgcacagacttgtgggagtattaatattttttcccctcacattttctttaatgaaaaatttaagaaatacagaaaagtttgaagaattgtactactacaaatgccagtagattctataattaacattttcttatttgtttttaacatatttattcatttgtgttttcctctactcatctatcaatctcattttcattttgcacgtcaacttaagttgtagataatagtacaattcactctcctgtacacttcagcatgcagtttttaaagmagagttcaggccaggtgtggtatcttacacctataatcccatcactttgggaggccgagataggaggatcacttgaggccagaagtttgagggtgtrgcgagctatgaatccagcctgggtgacagagcaagacyctgtctcaaaaaaataaataagtaaataagtacaataaaaaaataaaccagagttcattattcatttacagcttttccaagaaagccttattgaaatataattgctattcaataaagtgcacatatataagaaattaattgtacacttatatgtgtacacttatgaaatcataatcacaatcagaataaagaatgtatccttcaactccaaagacttcctggtgctccttcgctggctctttcggccacttcctagccttcctcttcccctttaggcaactactgatctgttttcttatcatagattattttgcatttactagaattttatataggtggaataacacaagttatgctgttttttggatttttttttcacccagcaaaattattttgaaattgatgcatgtaattgtgtcagtacttcattccctgttttgttttgttttgttttggagacagagtttcccctcttttgcccaggctagagtgcagtggcacaacttccgcctcctgggctcaagtaattcttgtgcctcagcttcccaagtagctgggattacaggtgtgcaccaccatgcccagctaatttttgtatttttagtagagaygggattttgtcatgttggccaggctggtttcgaactcctggcctcaagtgagctgcctgcctcagcctcccaaagtgctgggattacaggtgtgagccaccgtgcctagcctgcattcctttttattgctgcattcatttctttttattccattgtatgggtttaccaccatatttttagtagccattcatctgttggtggacatgtgagttgtttccagcttttaactacaactagaggtgctatgaacaagtagttatgtgggcatatgctttcatttttttttggtaaatgcctaggagtggaatggctagatcatttgtatgttttatcttcttagaatctgcaaactcgttggtacaattttacatttccgccaacaatgtatgagtgtactagttgctccacattcttaccaccctttaaatttaactgttatactatgtagtgatgtcttattgtggttttgatttgcatttgtctgatgattaataatgttgagctcatttgctttatatctttgtcgatgtgtttgtgaagtcttttgtccatttttaaattgagttgcttgtcttatttagacatattagggttctttattctaggaaaaatcttttgtctggtacatgtcattgcaaatattttctcccatgatgtggttctgttttcatttactcagcagtatcttttgaagagcaacagcttttagtcttgttgaagtccaggttattaatttttttttcttttatagtttgaaccttttgagtcttaaaaatatgggccaggtgcagtggctcacacctgtaattctagcactttgggagactgaggtaggtggatctcttgagtccaagagttccagactagcctgggcaacatggtgaaaccccatctctacaaaaagtaacaaaaattagatgggcttggtggcatgcagctgtagtcctagctgcttgggaggctgaggtgggaggatcacttgagccttggagtttgaggctgcagtgagctgtggagtgttactgcagtccagcctgggtgacaaaagaagaatgtgtctcaaaataatgaattatttaaaaaaatagatatatgtaatttcttgccaaactcaaggtcactgagactttcttgttttttgttttgtatttttaatgttttatagttttagatctctgatcaattttgagttaatttttatatgtggtgtgaagtagggtctaaattaatcttttttgcatgtggctattcagtttgctatacaatctcttgaagaggttatcccttcctctttgaattgccttggcacccttgcagaaaaagtaatgggacatacatgtgcgatctcggctctctgcaagctctgcctcccgggttcaygccattctcctgcctcagcctcctgagtagctgggattataggcgcccaccaccacaactggctagataatgaactcttaaaaatactttgtccacaccccctttcrtttactcccatgtattactaatcctgctgaggccgtcttggtgtgacctccttcctcaccactgaccccctcttttctctctcagaacttccttactttaacaatccagttgaacacatatgccaccttattcagcagttgaatctcaacctgagagattctagtgttcattcttcagttccacacataaccatcgtgagtaagagaggctcattcccatagaaggatgaggtttaagattgctccagtcattaacagtatacaagatgtcagatagcgttttactgggtctaagataaattaggctgtaaccaagaatatttatatatcaaaccagcctctccacacatcccaattataaattctggacaaaatagaaaaagctacataatacctatgggtaccagagagcagccacaattagacagaaataggaaggcgactacccttggaaggaggaaatggcatgggggcagtttccttttttggccttttttgaacagttcctggaatgaattctggagtgttccatgtatgcatgggtcagattccaagcactccagctgaggctaaaagaaccaaagagaattattagctgttacttatgctagtattgggggaaaatattcaagttctacctaggtgactcttgaaccccttttgaaatgtgacaacgtagcagatgctgttgatgctgctgtccaccctttctgcccggttgttagcgtcaccttaggtgaccatcccttccctgtgagtctcagtggtaaattctgactagtgaaatcctgaccaggattcattctcttccttaccaatgaccagtttatgggaggctcatggtccagtttgattcctggcaagtgaggggacctttcaagaaaaggtttcttttcattgtgtgaaataagcctttttaaaattattttaagccattgtaaactgagggtttttattgttgttgggatttttgttttgttattttaattttggccaaaactaccgggttgaaagaccagtgttttacagactgacattctattgaatcttaaaatagaatatagcttctgattcttgtgttaagctttctgaagtaatttagaaacaaaaccctctatggattacatggcaaaaaaggcatgtttcaaccataaagtaaattgttttaaaaatttcccttaatttggccaggcgcagtggctcacgcttgtaatcccagcactttcggaggccgaggtgggcggatcacctgaggtcagcagtttgagaccaacctggccaacatggtgaaaccccgtctctactaataatacaaaaattagccaggttggtggcgggtgcctgtaatcccagctactcaggaagctgaggtaggagaatcgctggaacccaggaggcagaggttgcagtgagctgagatcgtgccactacactccagcctgggcgacagagcgagactgtctcaaaaaaaaaaaaaaaaatcccttgatttatgtaaggattagtcacttttgtatgcaagtagaaggctgaactcatgctttttattttttattttattattattttttgagacggagtcttgctctgttgcccaggctagggtgcagtggcacgatcttggctcactgcaatctccgtctcccaggttcaagtgattctcctgcctcaggctcctgagtagctggaactacaggtgagcgccaccatgcctggctaatttctgtattttttttttttttttgagatggagtttcgctcttgttgcccagctggagtgcaatggtgcgatctcagttcgctacagactccgcctcccaggttcaagcaattctcctgcctcagcctcctgagtagctgggattacagatgcctaccaccttgcctggctaatttttgtatttttagtagagacggagtttcaccttgttgaccaggctggtctcaaactgctgacctcaggtgatcctcccacctcagcctccggaagtgctgggattataggcrtgagccaccacacccagcctgaactcatgctttttgattcttctgtatcactcaggctttctggaggtgcttattaactctttgctagattagataagttgctgaattcaaatttagaattctggaaataaatgtagaagggatgctttgagaagcatccttgtgctttcattgtgttatgctattttaaacttacggtaacttcgtgatgtcttaaaatttattttcattgatttatttgtatgtgactcctaagcttagaattcagttggaaagatttttgtttttgttctagtgaaggaagtacattgctcgaggatttttttgggttaactgaagtaatgctagttatctctgttacatgtagttaatgattcttgttgcccccagatttgttctaaacttaaacttttaaatgcatgctttctaaaacaggcaaagaagcagaaataatgaaatgatcactggggctttgtttctgtactggtccttatttaaggatattacaatgttcctaagttaccattttgactcataatatgtgatatgctaatgttccaagcacagagtattcttttctgtatgtttccacttcccaacctacctatggtgtagcgcctgtctgtaccactacgtgtgtgcatgtgtacatgttcctagctttttattcagtcctttatgtgctagttgattgttgagtgcagataaaaataatgtgttgtatttcttaaccacaatatttgatttataaggaaatattttgataacagcatttatagtaatatatgctcttactgattagaatgccacaaytgatagaaaatatattggatgtaaattagttacatatttacataatctatacacaagtaacagcatattttgtcagcatagcgtacagtagccataaaataagagtgggtgatacaatagagcattggttcccagtatgttctgtggtacctggggactcttgagaccctttcagacactctgaagtaaacaattttccataatagtttttcctgctctcattctctgaggattgtgcagtagagttttccatgtaacagtagagttatatgatatatgttatcacagcagattgaatgcaggaaccagatttgagaatccagctgtcttaagccacatgttraagagatttgtgaaaatgtaaaacatttctactctaatgaatttgtcataaaaatgttacttctaattgttaacattaaatgggctattcttttgaaatacatttttaaaaatttcttaattttaacatggtaaatattgatatatacaacatgtataagccaaagctccttgagattgtcaatatttaaaactgtaaagcccagaaaatttgataggcactgtcctgaaaggtgactgggtagcctcttgagatagggtgatgacagtcttctctgagagtgtggcctttaagctgagattctagacagaatgagcatgcctcctctgactactatgccccactccacttccacattcttttttagccttagtataattacttccatgtcaagtcaaggacttttactcattcatttctgaattcctgttgcttaccactttacttactagtcattaataattctttacggccagacgcagtggcctacgcctgtaatcctagcagttcgggaggctgaagccagaggatcacttgagtccaggagttcaagaccagcctgggcacataggaaaaccccatctctacaaataatttaaaaattagctgggtgtggctgggcgcggtggctcacgcctgtaatctcagcactttgggaagccaaggtggacagatcacgaggtcaggagatggagaccatcctggctaacacggtgaaaccctgtctctactacaagtacaaaaaattagccgggcgtggtggcaggcacctgtagtcccagctactcgggaggctgaggcaggagaatggcgtgaacacaggaggcagagcttgcagtgagcggagttctcgccactgcattccagcttgggtgacagagtgagactctgtctcaaaaaaaaaaaaaaaaaatattagctgggtgtgttggcatgcgcctctggtcccagctgcttgggaagctgaggtgggaggattgcttgagcccaggagatggaggctgcagtgagctgagattgcaccactacactccagcctgggtgacagagcaaaaccctgtctcaaaaaaaaaaaaaaaawttacctttcagtggaattatttatatacatttctacacatgagacaaacttttgaaggaagtttaatgtctttggtattcacatcaaactaatttgacatatatttttatttagttttttttaaaaacaaatattttttaggatctgttatttcctattaaattccttttacatgaaagatcataaattgatttttaaaaatgacttytaatgttaatagggctttgtcttttagacatatttgttaatgataaatttgtttctgtaatttttatgctttgtagctttaatttgggcccatacgtaaagactatgtagttttattatcattcctgccgtcatcatccttgatcataccatttaaaagcaatagaagttttaaatggagtagtagagaaagacaatcaggaattaatgagtttagataaaataagagtacaagcaaacaaagttgattgtggccatgttatgaatgcgtgagatttcaacttttaacaaattaataactttttttgaacacttagtgtgtgccaggcactattcccacccctctgcatgtactaactcatttgctcttcctagcagccctatagacaggtactattatttctgcttttcaggcgaagaagcagaagttgctcaggatcacacagctgttagtgccagggcaaggatttgaaccccgtcattaccatgctcataactaccggactatgctacctctgaagaagagattatacagcttgttgtggcacaacacaaaaccttaaaatgttttcagctcttttttttttacycatccttattttttccccatatgactattatttattcagccttttggtatctagcttgcagaatatttcagggtcccaaagggactatataaagagctgtctgtaaaagttctgctttcctcccaaaagctagcagtgggaaaaacaggcaggagagataaggtgcaaagcacagggaggaagaaagagaatagtggaagcagcagtggtgatctgtagtggtgtctacagtgtgctggttctggttgagttggtacrggcagccatgtcagcaaccaagtcttcacttgttggaggactcgctttttacatgctctggctgggatggttttagttactaggatgtaggggacaggaataacggcatttggtagagattcaaaacagcaaccagggatgacgagctgcagacattgatcgatatcaagtaaataataagagatagaagataaaacagctctcaggtgccagaaagcaacttggtaatggagaaatacatatcctagagaaaggtagacaagtgtatttatcctctcaggaaattacctggataagtgtacatttctgcaaagcaaaatagagtcaagctcctgaactcctgctgcataggctggtaggtgttaatgggtgtctgaatggagaaggatgaggacttcaggtttctagtaaacttaaatgtgatatggtttggctgtgtccccacccaaatctcatcttgaattgtagctcctctaatccccaygtgttgtgggaggaacctggtggaaggtaattgaatcatggggggcaggtttctcctgtgttgttcttgtgatagtgaatcagtttcatgaaatctgatggttttataaatggcagttcccctgcacaagctctcttgcctgctgccatgtaagacatgcctttactccgccttcacttgccaccatgattgtggggcctccccagccatgtggagctgtaagtcaattaaacctttttctttataaattacccagttgtgggtatttcttcatagcagtatgaaaatggactaatacataatgattcccttgtttggaggattgtcagatactatatgaaaagyggtttcacatgtgcttaaaaaaacctgtatatgtgccttatggtgtcattatttctaatttatagatgtagaaataataatatttagagaaataaaatgctttttctaatcacatgccagtaggagatcagcaagctgggactagaactcaggttattttgattgaaattcttttttacgaagccctgagggttctaaaaagctcgagtttcactgtgaaccattgtatggaaaacttaaatgtagccagaaaccacatagagaaaataaccaggttttaaatgttttatagtataatatttgttgtggtactcttttatgggctttaagaatctagtatgctggagggctggggtggctcacgcctgtaatcccagcactttggggaggccaaatcaggcagatcacttgaggtcaggagttcaagatcagcctggccaacatggcgaaaccccgtccctactaaaaacacaaaaattagccaggcatggtggcgcatgcctgtagtcttagctactcaggaggctgaggcaggagaattgcttggacctggaaggtggaggttgcagtgagccaagattgcaccattgcactccagcctgggcaacaaagcaagaccccatctcaaaaaaaaaaaaaagaaaaaaaaagaaagagaatttagcatgcatttaggtaaccacagagataaaatcatattcaaatgtgcttgtattatgagtattactcttctttatgagtattctttggaaaaactattgtcacacaataacatattaattatatctttattcatttaccatatttgaaattctcattaaagttttaaaatgtattttaattataaaaataatttacttaaaaagttaataaatactagatgtctgttcacacttcatttttccactgtaagttgcagattagattatgatgaacagactataatcttctaatattctgtgccctagtaaatgagtccttgcttatgtaagtcagatattttgttattttgatatctaagtaattggttattatgatttatttttttcttgacaagcttctgagctttgttcagtcttgtcaagtccctggtgagttttagatctctgagtctagagtttgttgatcgaattaatgaataaaccaatagattagtacattgttgatttttttttcccccaaaccttagatcctatttgctctcttaggaaactgtttgaaagtattgcaacttttagagaagttttgcaaatcttagccacatgtctactaatgttttgcacactatttttagttgatgaaatktaagcaatttatatttgtcttaactttccatctataaggtagtgagagtggtgacaggctgctctgttttgcagctagcatctttaattgatgttgaattgtggctttccgtgcacacagggttaagtgaaaaggttgcagtcatctagtgagcattttcctttaatgtgctcattagtggtggcaagtccaggtttcagcacatgtcagtaatttacatttcattgtggagaggctgcccttgttcaagagttgtttctaagcctgatgaatatatattgggaataaacagagtagaagaattgaaagccaaataccctgccaggcctttcagttggttctgaagcttccagtggatctctgattagcaatgcataaagcaggatgaaaatgcaaagatgaggcctacaaaagttgtcgcaggtagcttctccccttaaatcctctttttgtgactgcttttccatttcatcttctccaaattcttttttcatggcagacttcgttaaagtgaaaatactctgtgttagacgtaagatgtgaatactacaggatctacctggttcctgtaccccttctaactatgaagccaagtctgatcgttatgcaatgagttttcagaagcaaagggcttgataggcctcggttcttagggatcagatgattgtgattggaatctttgtgatgattccttctgggactcattttttccatctttgcctgattggtaggtaccagcttgttctggcttttgaaagcttgcatagatcagtaaagaataactgtggaggctgtggtcagtgttgttggggatagagacaggactctgaaattgtggtgtttgggaaaatccagaaattttctttttgtagaaaaacttcatatattaaaatgaagcatttttggaacttgggatttgattacaagttacytcatgcatagatggtgtagcwttagaaaactcaggcctagctgtttttagaagaaaatgttataattctttatacattttaagtttaattatttacatgtgtataaaaatttgggtttattgcaagaaggtacgttttgatattgctgtttctgtgtgtttgtatgatacatctacccatgtatctgtctacttatttatctttgtggtgctagtcaaaacttgcagcttaagagaatttgttcagaattggtggttagaatcaaaagtgagtgaatttatgacttacattattgaaaaacattgacaaatgtcaggactcaagtccgatttttattattttactgtaaatccagttagatgtgatttagcacttggatcatttaaatataaaggcatgttagtcacagtttaagtctttatattagtttttttaattaggtagagttttaacagaggagcaacatggaaaatgtttatgtgtatgaggataaaaatgcaagtcttgagaatattagtttagtaatgttctgattagtgtttgtagcctttgtaaaaaatgtaaatttaccttctagatgactacttgaaactgttgtttttggatgcttgccagataaaagccctgtgggattaagttctggtaaatcgcttgcaaatttgtgagggatatcagtgactttgagtgtttaactgtccaagctgtcatctacatgcgtcctatcactgcattgggtgaaaaaattaagtttctcagccagttagaattaaaggtgacatctgcttttaattggtgttttattttcttccaagtcagtaaaaattcagtaagacatgaattatcaaattttgcaatgctaagcaacttgtcaagtgacagtaagcactaccttgagcagttgtacagatgggaagtgttaaaatgttgattaatcttccagagttctgattatgagaagactaaagcttatatcatcattgccagctttctagtgtcagagtagtatttatttgttaattttgtagacctttttcaattactgacaaattgtgtcttgcataatgaaaattttactagttttaataagacttggtctattagactaagggtcatagatggcaatgtagaattcatgtttctgttgtctattatttagtaaacatattagattctttttagtaaaaaactgaaaaaaatctaaacgtgagctttaagttttattctgttatacacattcatcctgtgttgagaagggagtatctgtttgaatcttggcaaaggaagtcttgcctgggccccctgttgaaaaagaaaatggattatttctgtttttaccatttataaaacattttaagatgtaaaacataaggacgaaaaaaatcatcaccttcaagtagtccatgtaaaaataactcaagtcttcaaacattctcagaactaaaaaagaccaaagaaaatattcccatcatactgattatgtttcaattttctagttactaaaaattagaacatggcactaagtagactatataaagtatgtctttaaaaattcaactgtgaaggagatcttttttttttgataatcattaatatgaaagtgaagtttctcttttccctgttataacagttctatgtagtagtagaggtagaattctgaattgaaggtggttaggacttatagcaacatttctgggatgagtttttcagtattcccrgacttcaatttaattcagggtttcttttttgctctccacttatgaatatgtgataaatattttatgtagtcgtgtacttttgctatagaaaatcagtggattatttaatttgattcaggaaatctaccctgtatggttatttcgatgttgggtagattttatttcaacttaaaacgtagaaaagatgcttaggcaaatgatctaatagttttagatacatttggtaacttgtatcttaaaccccagggccaagtttagcagtcttacacatgtttagaaaatagttgaaaaatagaaaatttaggtctttttaggtaaactatacaaaacacttttatagtcattttgatgcctgataacttcagggttcattgcccctgtacatttttcaaattatttgcttctcaatccataaggctttaatttaccccctactgacaaatcccaaatgggtttttaagaattttgagagtggtctgctgtagttgtgcttcagcactggcttcaattgctgacacagaatctcttaagatgcaccaaatttagaaggataggaggttcaggcagcatttcctctggcaaatactaagattttatttgcggagggtggggacggagatacagaattactgttttctgtaatatttttctttctttgatcctgttttaatgcctgtttattaaaaaaaaataatttagacacaagatttagccacatttttttaattaattaaaatgtgtgggccgggcgcggtggctcatgcctgtaatcccagcactttgggaggctgaggcgggcggatcacaaggtcaggagatcgagaccatcttggctaacactgtgaaaccccatctctactaaaaatacaaaatattagctgggcgtggtggcaggcgcctgtaatcccagctactcgggaggctgaggcaggagaatggcatgaacccgggaggtggagcttgcagtgagccgagatcgtgccactgcactccagcctgggtgacagagcgagactccttctcaaaaaaaaaaaaaawatatatatatatatatatttgtgcttgtttggatgggcttttttaatcttgaattttatagaataataaagttaagtatttgtaccttgacataccctaacacaattaagtattgcttccataaataattttgatcttataataaacataccttacatactgaygaataatattaacacaaatgtatactcccttagaggtgctcaaaatgactttcatgccacccttcatgcctgctgggttttaaggcataagagaaacagatgatttctgcattttactggaaaaaaaagwctaaaatgtacagctagtattgaattggggtaataatctgccacttttttgcccttcaatgctgtcgtgatcttttagggaagtgaggtcatggtagacccgcttgttaatcatttctgcgttttcagctcagtttggtcatgaatacttgacttgctacctatagtcttgcttctgtttgcctctttgcatgcagctccttaaattgtttaaattaccatgctttctttatcatgtgatcctgtcatctattgacaattgattggatcaaggattagtgcctgacccaaggcagacatctacagaagggtcatcctcttcccacaatggtttattttcctgtctgtgtgtgtgtgtgtttgtgtgtgtgtgtacgtgtgtgtgtggtggtcatgaatggtggtggtgccaagaaggttgtgacatttgactaataactgatgatgagagaagcagccagcacttggagatctagagtaagagctctccaggcagagggaatagcaggtttaaatgttctgaggctggaatgagatttgagacatagaatatagagattggatatagagaaaggaactggtgtggcaggagaatcatgaatgagaaaacacgtggtacaagatgaggttgaaagggtaggtggctcagggcagatcagttagggtcattctaagaagctgggatttaggtctgagtgcattggggagctgctggaggagttttaagcatgtggtgcacttctgtatcacttctgacctaatgtgatgcacttctgtatcactgtaacaacagtgcatatcagactgaagaactatgtgattaagaacactttgctacataggagcagaaaaatttaaagaagaaacagtgccctagaagaagttaaattctcttgggcatccacctgtagacgtcctcactccttaatttgtcctgctgttcttagcatcatagctctctgtgaaaacaaagctatcttctaatttatactttgcaaatcatttgcttttccgtaaaccccattcttgcctattggggttaatctaataccaagatccaagattcctcttcccacartggtttattttcctcaggctggattattcagtattgaaaaacagccccataagacaacccatgggaaccattgaccattcaggtcctaagaacagttagagttagggggtaggtgtggatacagaggttgtatgtatgtggtattccagtttaaggtggccactctcttctgatttctttctcctctgattttgtctcctccgatttctttcccctggtattaattactaatacgcttctttgactttctgtctggctagtaggtgaggttacgttgcacaaatgcttaaatgaatgcatgtatattggcatccttgtatatgggcttatgtttgcacacaaatactcaaattccagtgaagtttgctttgccaacatcctttccaccacaggtgatttgtggaagccagtcaggatcattttatcttccctgacaattattgattcagggattaatcaaggcttaagccattgtgggccactgaaacatgatgaaaggctttcctgggattcctggaaaaggaacctccttattcttaagagaaagacattggaagccaggttctcttgcattctcccccacccaccaccttgtgaatgagagagcttagttgctgctggcagccatattgtgaccatgagggtagctagcctgagggtaaagctgacttacagaataaggcagatctgagagaatggcagagaaatccagaattgggagatatatttttggaagaatttctgtctaaaagtgttggtggggtatgtgttatggcaagaagagagctgggatgtttaatgggttaacagcattttgttctttatcatatatttattgaaaaattttcctatcccattgtgctaggcactgaggaaattatttaaaaaataaagtagggcacagaacttgcctttccaggaaactcatttacaggtattgggttttgattctttctttctttcttctttggaaacagggtgttgctctgccgcctagccggccaggctagagtgtggtagggtgctcatggctcactgcaccttctgcctcctgggctcaagcaatcctcccaccgtagcctcctgagtaactgggactacaggcgtgcaccaccatgcctggctaatttttgtattttttgtagagatgtggtctcgccatgttactcaggctggtctcgaactcctgggctcaagtgatccgcttgtcttgattccttgtataactgccccttgtattggatttggggactgaaagaacacttagttactaatattcttttttttgtttttctttttctttttttctttttttttttttgagatggaatctcgctctgtcgcccaggctggagtgcagtggcgtgatcttggcttactgcaacctctgcctctgtgttcaagcgattctcctgcctcagcctcctgagtagctgggattacaggcacgcgccaccacacctggctaatttttgtatttttttgtagagatggggtctcgccatgtttctcaggctggtcttgaactccagggctcaagtgatctgcttgtcttgattccttctataactgccccttgtattagatttggggactgaaagaacacttagttactaatattgtttttttctttttctttttttttttttttttgagatggagtcttgctctgttgcccaggctggagtgcagtggcttgatcttggcttactgcaacctccacctccccgttcaagcgattctcctgcctcagcctcctgagtagctggaattacaggtgtgcgccaccacacctggctcatttttgtatttttagtagagacggggtttcaccatgttggccaggctgatctcaaactcctgacctcaggtgatcctcctgcctcggcctcccaaagtgctaggattacagcactgtgcctggccagttactaatattcagttttaaattttagaaacctagtacttaaagcacattaaactttgcttactgtggaaccagtgtcagggctgtgagttgccttcagtgatgttgctgggtagccaggcttatctgtgcgttatacgtgggtgctttgaggaatccaacaatgagaagatagctagccttgaagacagcactggaagcagagagtagccagcagtcagtcagtcttctctctgagtttatgctccattctttgaggtgtttctgcaagcctctctgctttccacctctgcttgtctggcttgcggccctgttggaacatgctgacttcattgctcctaagcctacatgatatagaccagggatcctgaaaagaggaaagcctctttttctctctgtccccatgccccattcctaggaaagggaccctgataggtctagtttgggccagctgccttttgccactcccgtctgttcagagagcaagattatgccattcacaaggtctacaactgaagaggtcttttgctgagtttgggaaaagggcagttcaggaaaatcagactaactctgccaccaaatgtctcttaaaccacataattatgggacagtatgataattgcagcaatcaaaggctgttgagtgttgtgtacaggaaggtagtggttaactctggtaggttgggggttgggtacagctgaagagaagattgtcaaacttcacataaagggtctgtgtgtgtgcgtgtgggtgcatgcatgcgtgtgtacgaaggattcatgagggggagtattttatattggtgtaggtgttggtttcctccccaagaatttattcctatcataaatactctctgtgcccctgtgacagtttcataactgtggtatcattagcgttacaaagtacagaagacagaataaaatcatggactttttgagctggaaagaccttgaaacttatctaatttgtttgacatacatcttttgatgtggcagattctggtaaatataaagacaaagcaggttccctaccctgaagaagtttatagggggactacagcagggaagaaatactgggaggagtttctctgattcccaggagaggatagctggccatcgggggaagtcagatgacgaagtcatccattttgatggaggagatgtgcccagaaaggcttcatgacgaaggtggcatttgaagtaggtcttgaagataggtagtgtttaggcaggggagatgatagaggagaagaatgggacacacaggtggaggggacattccaggaaggggctgtagtgtcgggatggcagaaaaaggggtgctgcattgagccatgagctgtgacagacctttgagtgtaagagtgtaagagtaagcccggaaggcgaggggccctgggtactgggcttgaatttgtttataccattcaagctttccagaaaacccctgtgagctttgaaatgcttcaggggagcattctgtgtgaggctggctttttctgcccttttmctcaattcagcaaatggcaagaaacttggtatcatctttgcccacctttgctgttaggccgtgtgctagtctgttcttgcmttgctataaagaaatgcctgagactgggtaatytataagaaaagaggtttaattggctcacgattctacaggctgtacaagaagcgtggtgtcatctgcttctgaggaggcctcaggaaacttacagtcatggtggagggcaaagaggaagcaggcacgtcttacatgaacagagcaggactaagagagagagggggaaggttataactatagtagttattgcttcctgatagataatttgtttgtttctctttctcctctgctgaaatacagcctacacaaccataggagttcctgtctcttgatkgttgctgtttcctcagtacctaggacagtgtctggctcatatatatttgtttaatgaacaaatgaataagagatgggttatttagctttaggccattcatggaaagtttaataccataaattctctgttaagtaggcagatatttataaatacagaaatggcttctaaggtgtctcygtaagatagctattcaactgttgcacgagcttatgatgactggaatcgtacgccctttcatcatatagaccagcatttggcaggctttttttctgtaaagggccagataataagtgttttaggctttgtgggccatactgtcacaaccattcaactccattctaaatactcagctcttctgttgtagtgtgaaagcagccctagactataggtaaatgaatgggtatggctgtgtttcaatacaactttcattatgaatacttaaatgggaatttcatgtaattttaacatgtcacgaagtattactctgcttttgatttttttcaactatttaaaaacataaaaaacctttcttagctcatagactacaaacgtggtgggctggatttggcctgtaggctgtaattggccagtacttgttatagagctttctgtcttcctcatctttaatggttagaaaattcttcattgtattaactgaaatctatctgtttagaatatttacctattttttcagtagtgaaataggacatatataccgaaaaatgcacataatgtaaatgtacagctttacaaattattgtgggcacccacataatattacctaggtcaaaaagtaagacaaatgtctgcaccctagaagccctttgcatgttcccttcaaatgatgctccttcctcccatcccaggaacactgtcctaactattatgggaatcatyttcttgcttctctttatactttcacctccttaatatgcatcctatgaccctggagtttagttttgcctatttttttgaactttctatagatagaatcatatagttaaaaaaatttgctttctgtctttgtttctttctctctttttatcttttctttctttctaatattttctttttttctttcttttgacagttttgctctgtctcccaggctggagtgcagtggtatgatcatggctcactgcagcctcaccctcttgggctcaggtgattctcccacctcagcctcccgggtagctgggaccacaggcacaagccaccgtgccctggctaattttatgttttgcagagacaaggtctcaccatgttgcccaggctggtcttgaactcctgggctcaagtaatatgcctgccttggcgcctcccaaagtgttgggattacaagttttcttaaatttctttttcttttttttttttttgtgagacggagttttgctcttgttgcccacgctggagtgcaatggtgcgatctcggctcaccgcagcctccacctccgaggttcaagtggttctcctgcctcagccgctcaagtagctgggattacaggcatgtgccaccccgcctgactaattttgtatttttagtagagatggggtttctccatgttggtgaggctcgtctcgaactcccgacctcaggcgatccacccgccttggcctcccaaagtgctgggattacaggcgtaagccactgtgcccggctaaatttctttcagtaacatttattagtttcctgcttagaagtattgtgcattttcactgtatttattattagaagtttgagtcttaaaaattattcagttttctctttgatttcagtcttaccattccatctagttaaaatagctttgaatcaatattttatcattctttttcagcattggttcatcattgaattargcaatcagtgtctttgtgtggcgttatacaagtatttagtaaaaatatccattagggaagggccaaaagtagagtagggctttttagttagacaaaaatggactattcaatgatctggatatggcgtttgaaacaattgtgtatctgtacaaatatatttagtttaatacacacttgtctgtgttgtccataagcacacatttgaatatggccacgagaaagattttgggtgaccatgtggataaaaaaattatttggtacagttatttctgctaatggatggggaatgtatagtaatatggaaagtacaaaataggggccgggcgtggtggctcatgcctgtaatccagcactctgggaggttgaggtgggtggatcacttgaggccaggagtttgagacctccctgggcaaaatgacgaaaccctgtctctactaaaaatacaaaaatggttcaggtgtggtggcacgtgcctgtagtcccagctactcaggaggctgaggcaggagaatcacttgaacagggaggtggaggttgcagtgagccaagatcgcatcactgcactccagcctgggtgagagtgagattccatctcaaaaaaaaaacaaaaaaaaaaagaaaatacaaaatagggatagtgtagaagaaatctgagaatgttttctacaatttaatgtgtatcacctagtaactatatttaataatactagatttatattctcttaagtatatgccaattgagaattgtgcagtgagttcagggatgctgtgaaggaattattttcagaattcaaaattttcaatggataattgagaattaattgcaatgatgaaacatatgtaacatgtagtagcttatgtaaacattagtgttagattagatttgtaaaattcctagttttcccaaaatatttgaattatgctgtagaaaagtccagggactcactcctgcaaccctaaatgtagctatactgatacaggatttggcagcctaatagatgtagggttggagcacaaagaagtttaaaaatactccattccatggatgtttaatagatttatacctgttgattattaatttttgagtttgtggattaggtattatcctccatgattaaaaaaattggagaaagaggataatcactgtaagaacgaatcaagattatgactttgtatgttcagaccaacatgggaagaagaaattcttggtaatacgtcaattgggatctgcgataggctggagaggtttttgggcagatatgggaaataatgctatttttagtctgttcactttcatcaagctgaccacaaggtggggaataatacattatatgaggtctggatgacctgcgatatcatccagagttataatagagaattatattactttaaagaatgtattttttaaatttggatatttacacatgagttagagtcaaacagtgtttttatagctatatcttgactagttatgccaacaataattattttttaaaattgtttctcagtactgtaaggttcttattttattgttgaaaaaaacttattttaagttcaggggtacatgtgcaagttcgttacataggtaaatgtgtgtcatgggggtggcactctttttatttcagtaaatttttgggaaacaggtggtatttgattacatgaataagttctttagtggcgatttctgagattttggtgcaccagccacccaagcagtgtacactgtacccaaggtgtagtcttttatcccccgcccccttcccaccctttcccccaagtccccaaagtccattgtatcattcctatacctttgcctcctcrtagcttagctcctacttatgggtgagaacatacgatgtttggttttccattcctgagttacttcacttagaataatggtctccactttgggaggccgaggtgggcggatcacgaggtcaagagatcgagaccaccctggccaacatggtgaaaccccgtctctactaaaaatacaaaaaatagctggatgtggtggcacatgcctgtaatcccagctacttgggaggctgaggcaggagaatcgcttgaagccgggaggtggaggttgcagtgagccgagatcgtgccactgcactccagcctggcgacagagcaagactctgtctcaaaaaaacaaaacaaaacaaaacaaaacaaaacaaaaacacaaavaaagaaagaaagaataatgaattccatctggrttgctgcaaatgccattttttcattcctttttatggctgagtggtcgtattccatggtgtagatataccagtatttatctactcgtcaattgatgggtatttgggctggctccatatttttgcaattgcaaattgtgctgctataaacatgcatatgcaagtatcttttttgtataatgatttattttcctctgggtagacacccartaatgggattgctggatcacatggtagttctacttttagttctttaaggaatctccacactgttttccatagtggttgtactagcttacattcccaatagcagtgtaaaagtgttcccttttcaccacatccacgccaacatctaatattttttgattttttgattatggccattcttgcaggagtaaggtggtatctattgtattgtggttttgaattgcatttccctgatctttagtgagcatatattgaagtttgttggccatctgtatatcttcttttgagaattgtctgtacatgtccttagcccactttttttttttwaattatactttaagttctggggtacatgtgcagaatgtgcagttttgttatataggtatacatgtgccatggtggtttgctgcacccatcaacccgtcagctacattaggtatttctcgtaatcctatccatctcctagccccccaccccctgacaggccccggtgtgtgatgttcccctccctgtgtccatgtcttctcattgttcaactcccacttatgagtgaaaacatgcggtgtttggttttctgatcttgtgatagtttgctgagaatgatggtttccagcttcatccatgtccctgcaaaggacatgaactcgtctttcttatggttgcatagtattccatggtatatgtatgtgccacattttcttaatccattctatcattgatggacatttcggttggttccatgtctttgctactgtgaatagtgccgtagtaaacatacgtgtgcatgtgtgtttatcgtagaacgatttataatcctttgagtatatgcccagtaatggaattgctgcttagcctactttttgatgggattgttcatttttttattgctgatttgtttgagttcgttgtacattctggatattagtcgtttgttggatgtttagattgcgaaggttttctcccactctgtgggttttctgtttgctgattgtttattttgctgtacagaagctttttagtttaattaagtcgcatcttttatctttgtttttgttgcattttcttttgggttcttggtcttgaagtctttgcttaagctctttgcctaagactttgtctctatatttaaaaaaatatatgttgcccaggctgctcttgaactcctgaactcaagcaatccccttgctttggcctcccaaagtgctgggattacaggcatgaggcactgtgcctggctgcattattattttaaatccataaaatcacacctttttcagcttaagatcatttctagactgtcctctcactaaaaataccctggaatcaatatacatgttgttagtttgaaaattctttgctaggttgaacagccatattggaaaagtaccaaatccctttagggttttgttattggtaatataaagaggacagagaatgtatttcaaattagttgtcatttcatgaggtgttgcccttcatttcttggcaggtcttaactagaatctagcctcctcttataatagttgaaaatgtstcatgactaattaatatgatacaatgagagcactgttttctgattaataaggtgggtggaccttatgaaatgttatctgaagatcacgcacgtaatctttgatggctgttattgcgttatattgacttgtgattcctgtgtgttcaacttctagtgtgaatagtaaggccaaaaattcaaaagggcttttgaagttgatttgtaattaaatagcattattaaaataaagagtcaaagcattgtcaagtgtgataaattcagtgtcaaaactgagcctttaaaaccaaaaagcgtggctgggcgtggtggctcacgcatgtaatcccagcattttgggaggcctgggcaggtggatcacttgaggtcaggagttcgagaccagcctggccaacatggtgaaaccctgtctctactaaaaattagccagatgtgatggcatatacctgtagtcccagctacttgggaggctgaggcgggagaactgcttgaacctgggaggtggaggctgcagtgagccgagattgtgctattgcactccagcctgggcgacagagcgagaccctgtctccaaaacaaaacaccaaaaagctcatgcctgttatgctagcactttgggaggccaaggcatgaggattgcttgagcctaggagtttgggaccagcctggacaaaataaggagaccccatcactacaaaaagtaagaaaaaggggctggtcgtggtggttcacacctgtaatcccagcactttgggaagctgagataggtggatcatgaggtcaggaattcgagaacagcctggtcccatggtgaaaccccatctctactaaaaatacaaaaaaattagccaggcatggtggtgtgcgcctgtagtcccagctactttggaggctgatgtgggaggatggcttgagccctaggtgtcaaagctgcagtgatcacactactgcactctagcctgggcaacagagagagagatcctgcttccaataaaacaaaacaaaacgccctcctcaaatcagaaagcattctcaaccatagtacttccaagcaccctatttgtgttagaagtgtttaaggcaatgataaagtcagtaaactatttcaagctgttggaagtgcatctcagcacacgacagttgtgatttcataagcttcttaaggtttcaagtgcacagcattttaccgcagaactattactgtctcaggaatgaggcccatggaacacaggaaaattctccacccagggaggaaggctgggaggcctcagcagccaatagtggtgtgactgagactctggagtcccttcacacttgtgtcgcagcttactacgggtcacctccgtcctaagtgtcttacatttattaatcatatatcctcacagatagggaaactgaggcacacagcagccaaggaactygtccaaggccaaccaggtagtatatggtggaactggagtgaaggcaggctccacagtccctgttcttaacctttatactccactgcttctaattccttactttcttttatacaagaatataatttaaaatcctgcccaacacttgttttgtaagatnctagtggcatgggaagtgaggggttacagttggtgtcagtcatatttcaaatggctgggaataggggtgataacatacacccaaggaagtcacgctggctgctacaacattgtgagaatatcattctgctgagattttacgcttgctggtagttgacataaaatgaagcttagtctattatatacaatgccagctttttccttcatcagttacaaggcttgactttaatgaaaggagaagactgcattttcaagtttgatctagaaggctatgaaggctctggttggaattattgagaaagacaaatctcaggtgatctgaacgtgttaaattgtaagagtacttaatgtgaattggaggaagcaattctctgaagcaaagggggaggaatttgtatcttggaaagaattgcctttgtcttttattatttatgcagttgataattgcaatattgccacttcacatatgaaaatatcattgtagtaaatttatgtagagttggctaacaaagttcccatccatctttgctttagttcaattgccattagtttcccagagtactttctaattcctctaccacagtactcatgctttattttgattttaattgtgttatattttctcttctagttagtcaaataagcgaggtcctggtgcacctctgtcttgtccatcattgaattcctaggcttaccacagtgcctgacgtagagttggtgttggcagctatttgtaggatgaatgaatacatgactgtgttaagcagacatcaaaggcgtataaaattgaaatctagttgttgtaagacttaaaaagagaggagatccttatagatgagtgctggttgtttgcaggatcattattattctctgatgatcaaaaaactgtttacgcatgcaccagtagtcccagctactcaggaggctgaggcgggaggatcccttgagcttgggaggcagaggttgcagtgagctgagatcacgccactgcactccatagagccagaccctgtyttaaaaagaaaagaacggtttacagatcagtgagagaggtgttttcctaaatatttaaatgtttgcttgcccatgctacttttccaaatcctaattgtccttttccccctcaaatgctccttcctttgtgaagccgtccttgattcccttgttggactctgttcaccgtgtctgatttttacctcttctagtgcactgactattcttaccgtgtattgtttttattttttggtacatgtgttgttgtttgttctactagactataaactcttgagtgtgaaaaccatgtctacttaaccagcctgcttccgagagtgaaaagggacgctaatcagataggacaccgagtaatagatgtgttcaaggctgtgcgaggcaaacctgatggctggttactctccagtaatctttagcttattgaaaaagcagaggccacttgcacctgtttacaagcaggtgagatgggcctgagaaggtgattgaattgcagattcaaaacgctggtttgtgtcttagtcttatctctgtcacttcactagtctaatgactgtgggtaatttatttcatcttgaagaccctcattttactgacatgttaagtagtgatgaccatttatttcctgctgtttcttaggccccctcctttttgtgttttgaggaagagaagatataaaaaaaygcccttgagagctgtgaagtgtcatagatactacaatatcgttttagaatcaattgaagactttctaactttgtaaacaaatttgaatctgatgactgaaatgctaatctataaaatggttttttagtaataaagtgagacttaatacagtgcttttaaatagtatgaaataagtaaataaatattgtagtttttgttagtatcattatattccttgttcttttaattcatttttaaacttagaattgtttcctacagataaacaaatgtcagcttgggtccatctactacatcttattgtcactttcacttcattgcatcattgctcttaatcagaataaagggtgaatttagcaggttgtagggtttgagtagtgctaagtattgtgaggaattgtgctcaaggtaattaattataaatcatagtccgggtgcggtggctcatgcctgtaatcccagcactttgggaggccaaggcaggcagatcatgaggtcaggagatagagaccatcctggctaatatggtgaaaccccgtctctacaaaaaaattatcctggcgtggtagcgggctcatgtagtcccagctactcgggaggctgaggcaggaaaacggcacaaacctgggaagcggagcatgcagtgagccgagattgtgccactgcactccagcctgggtgacagagcaagcctccgtctcaaaaaaaaaaaaagaaatcatgatctctgctattttaatattttgctcagtatttgaaataagctttataatgtaggctatagtaaaacacagcaattaagtgcttaaaacaagaatatcccaactgtaggtacagcatactttacctaaactatatgactcttatttctatccagcaatgggatcaaaaacttgatgcatttcagaaaacacgaggttaagcaagacgtgggaggattttgacttgtggtaaattttgaaagaaattgtaaatattttcaaagaaaatagaaaaagcacacaattcagagaatatacaaagccaattaaaaagttgtaaaattattattattattattatttttgagacggagtctccctctgtcgcccaggctggagtgcagtggtgcaacttcagctcactgcaacctccgcctcccgggttcaagcaattctcctgcctcagcctcccgagtagctgggattacaggcgtgtgccaccacacccagctaattttttttgtatttttattagagacggggtttcaccatattggccaggctggtctcgaactcctgaccttgtgatctgcccaccttggcctcccaaagtgctgggattacaggcgtgagccactgcgcccggccgtaaaattaaatttaatatctgatctgacggactaaacaaaagatctcttgcctttcaccagtttaccagctttctgttctttttcactcttagttcactaagtgtgagtggactgtgaggcatgagcaggaaggggtggcattgggcatttacagcaagagaccctcatgctaagtgaagtgttatcaaatcttcatttttttgcttatactgtaaaattgccaattatattcatagttattgtaagttatattccaaagtttaactggaaaaatattattttgcaaccaaaaaggtaccaattaatattcctgttcatgaaacaataaaaagaattgaatcagggagaaatgaaaacagctcattttaaatattcaaatttaaaatgatataaaatagggatataaaataaaagcattttatatgaggtatagaggaaagaaattacaacttcaaaacaaatccttgtgatcagcttccatgaggaggaccttagcaatgtataccaaatttaaatgtgaagcttcttaccttcttcttacctcatcttcttaaaagatacatctaaaagaaaaactaaaatttgtatcgatatgtttaattaaagcattattgttattattatgtaaagcagaaagaaacttctgaaaaatagttgagtgatacatttaagcatttcacctaaggaaatttagtgttatttaaactgattaacagtatttggcaaagtattttcattagcgttctaatattaaagctagcatttcyttaaaggagggaggctaaaattcatcccaaagcttgtttttgttaactcaaattttctcagtgttattgctgaacaagttactgaattttctctgggtatcttctatattgcctttctttgattcttgtcagtgcaaccagtctaaggttttacatgataaaggaaatctgtggagctaatcctagaaacctctttctattttcttacctaacacctccaggcacagagaagacaaaatacttcatttgcattcttaaacattaggaactcagaataagtctttcaactggaaatgttattgcatctacatttcccgaagagaaaaaggttaacagcctactcaggtttatgttaactcatctctttttagtatcctgatgtgcacaaagagtgaagaatgtgaggcttacccacccaggctctttcttctttacaatcaatgagactctggaagtggtatcagtgctgattacagggaaataaaaagaaaaaatcaaatatgcacaaaagaaatggaaaacactaacatactttaatcttagtcttctaggaatagaaagaacatttccaaaattaataacgaacatagtaattcaaattttttaaaataaaaagtttcctccataaatttgaaaagcttaccaggaaagtacaaagatattgagatttatagtttgtttgttgaaatggtttttattaaagtaatcaataccaaaaaactcttgtttgttctaagtaccttggtcagaaacccgaaacatttaataaaagaaattgaacaattttttgacttaatgtttgctaaaaagtagaaatggaaatcatttaattgccagatattaaaaacagaaagttttctattgctgtaatactcactccccatcagtgtaggagaaacaaggttttatatttaactataatatattccttaaaatatacttaagtgggaaacttaacttctgccgacagttacagtggggaaagttaccactgttctctttccctaactaaataccgtacatagctatcatctggaagtaatagtattacttcagtgcattgtgccagtagacacttaatacagaatatactttagactaaatgaaatccagatcccagtaatactgaaacagaaagacacaggttcctttggttaaactaagtcatagtgtacagtgtactataaattaaatacagtttgtgagtatgtcattagattttaattgaatttgcaattagcatcccaaacatttaaaaatcgtgtgggtttataagtttttacttttgaattttaaaataatagaacctttacccccttccactacccatctcccatagcaatcacatccatttatgttcttatcctaatgaatcagctaaattgggttttaatttacaatgagctggtaagagttaaagaaaatgactcctataaatgtagtaggtgagaggctgagggcatcctcttctaggttattctgctccttcctacctttgttgatgccccacagtcartgttggggaaaattaattaggatttatattccagtcttctctaatgtgttgtcaccattgcacagactcaggacttccagtgcagtgttgactagtaccagtgcacatccttacccaggggactggaacttacccaggatcacaaaaatgacactaggaatgtttctcccctctcagcattcaaatgttctccttatcttttatttttatatatttatttttgagacaagattttgctctgttgcccaggctggagtgcagtggtgtgaacatggctcactgcagccttgacctcctgggctcaagcagtcctcctgccctggcctcctgtgtagctgggaccatgcctggttaatttttaaatttttttttgtagaaacagggccccactgtgttgtccaggctgatcttgaactcctgggctttaccttttattattttaatttaattttattttttgagacagagtgtcgctttgtcacccaggctggagcacagtggtgtgatcttggctcactgcaacctctgtctcccaggttcaatagattctcctgcctcagctcctgagttgctaggattacaggagcatgccaccatgcccagctaatttttgtagttttagtagagatggtttcaccctgttggtcaggctgtgatccaggcaccttggcctcccaaagtgctgagattacaggcatgagccactgtgcccagccttatcttttatttttaatgattattgtttaaagtacactgagttcaggttaaaaaccaactgccaaagtaaattttaacacctaaaagctgggagaaggggccattcttcttttatgcagtaactctttggagtccagatactaacatgccccagatttcatcctggtgctaaactgacttgttttccaattaaaaaaaataaaagtctgagtaatattgcgtaggagtaccagaaatggccttgttggaaaccaaaactatttacattcgttaagaaatctgtttgcaggtgtgtctgccacatttacagcacagtgtacagctcctggcactcaatacacagtgttgcacagcttgccgcaggagcataaagtggaggtagtaaaaaggtaaggaagaaagagggaggaggatgagttgttctctattcatttgcttctcatttcatcactgatttggtggtacccagacctttacagagccggtctccataatactggtgcaggtggcctgatgcccagtttctgttgctcagataatgcagtctcatctcgtctgtgatttcagcagcactcatggcaatgggaacattctttttctttgcaacccaggagtgagattgaatctctgattaaagagcaaagcttgagtgttttggacatggtaatgctgcagaggtgagttcctgttctggctgtccatgtccaaacaagtgaaacaaatgttttcatactttgcagttgccacgttcattcattcattcattcattcattcattcattcattcattcatttttgagacgagtttcgctcttgttgcccaggctggaatgcaatggcatgatcttggctcactgcaacctctgcctgctggctcaagtgattctcctgcctcagccttccgagtagctgggataacaggtgcacaccaccatgcctggctattttttatatttttagtagagayggggtttcaccatgttgaccaggctggtctcaaactcctgacctcaggtaatctgcccgcctcggcctcccaaagtgctgggattacaggagtgagccaccacacccggtctgcagttgccacatttaacctttagtgctaagtaaacatttcaccatggttcactttgtacaaaatgagaatctttactgaagcatcccagccaaacataagaatgtactttacaattttttttttttttttttaagcctaaagtccctggaagaggctggcaaactggcttgagaaacacttcactgggcatagagctgctgaagctgctcctagtccgtgtgttgatttcactcctataagttggtggctactctgaaatagttttcaaaatttttattgtaaaataaaaggcagttacaggagaactatacaaaagaaacctatggcttaatgaactattatagggcgaactattttgaaatcatgaaataggtccagacgcagatgtttaccctgaatcctggaaagcygtgtgacccatctcagtgctaacctccggcctctctctaaacatacccattcctttggcttttatagtaatcatttttttttgcrtttaaaaataattttattgtccaaatgtgccaccttggacacaatatttaagtcttgtccatttatttttaaatttgataagtctttaaaatcttagtctgtaggctcctcttgcttccttttcttcatgacttatctgttgaagaacttgggtgtttgacttacagagtcttaccccagtcttgacttagctcactgcatggcgatgctatagctcagtggtttcccccattcttggtgtttcctacaaattggcacttgaattcagagatgggatcagacttggatttgatgcctttgatgaagactataggaggcacataatgtctttttagctctttttaagatataagcagactttgatgcttactgcccatatctagtaatttattggattacaaaattttggtagtttaatgctaacatttttttcattagttaattggaatatatttagaaagaaacccttcttctcatttactgttttattaccactggtacaattcatatatgagaagcaagataaatgcttaattctttacctttatttactatttctgaagtaatgattggttccttatcatccctcgaagttagccaattcttttgaagaaatcactatgaagtcatactgttgaaattactgtgaagtcaagttgttcctctttggtccgtggggcttaagttgactcacgggtctttttgacttgacctcataatcttctctagcttccttactatctgatctgacaggacattccaggctcatgttttacattttctgttccaactctttatttttatttatttatttatttatttttgagacagagtctcactctgtcacccaggctggagtgcagtggcgcaatcttggctcactgcaagctctgcctcccgggttcacacygttctcctgcctcagcctcctgagtaggactgctggagcctgccaccatgcctggctaattttgtttttgtatttttagtatagatggggtttcaccatgttagctagaatggtctcgatttcctgacctcgtgatccacccgccttggcctcccaaagtgctgggattacaggcgtgagccacagtgcctggccttctgttcaactctaatcagccatcttttcaaaatgccttggcttcttctaatggtatttggagatcacagttggggtactaggcatggtcattgctactgattggtcattttaagcctttttagttgcaggctaggaaaaaaaatatacrtatatattaacaggtttttaacatatacgttttatgttatatatgtatattgcttataatacaatatgttatcttaactatattatattaataaaatatataccatatggcaatatatttactatataaatatgtttaaatataatgccaaccctaacccaaaatagggtatgtatataaaacaaatttatattataataatcatactgtattaataaaatgcacataacatttttctcatatataatgtatataacaatatagaagtataattaaataaagtctacattttatgtgagacaaaacaactcctgtgttcatagcaatattttccattacaattcaaaattgcagaactttaacctctttgttgcctctgtgtatcttcattcttctggattcagaattctgactctcaaggataggggaaatgacagaattagagtatctcacaattgcttatttgtcttgtcctgtgctatacacagagcaatctcaggataacaatgttaataccactaccaatatgattactaaaaacattaaaaatgtatttgtacataatcttcctgtaatattaaaaaaaaagttgtactatatctatattgtcagaaaatgtggctgttatctataaggttttatatrtatatctccttagctttcatttagttttagctctacaagtaaatcccgactctttttgttgatatctcttttgtcattttagtttcctgaagctcattctctagtacaggagtgggcaaaccttttctgtaaggagccagaggggaaatatttttggctttgtaggccctatgatctctgctagtactcattcttattcttatagtgagaaagcaatcacagacagtgtaaactatgagcatggtggctacgtttcagtttcatataatttttatgtgtaatgatacagtatttaaaaaaatttttgcctaacccccacccccaataattagtaaaatcttttcttagatcatggactgtacaaaaacaggcagtgaggctaggtgtggtggctgtcacctgtaatccctgcattttgagaggctgaggtgggcggatcatctgaagtaggagtttgagaccagcctgaccaacatggtgaaaccccgtccctactaaaaatacaaaattagctgggcgtggtggtgcatgcctgtaatcccagctacttgggaggctgaggcaggagaatcgcttgaacccgggagctggaggttgcagtgagctgagattgcaccattgcactccagcctgggcaacaagactgaaactgcgtctcaaaaaaaaaaaaaaaaaaaaaaaaaaaaaaccaaaagcagggagtgaatgggccagatttggcctacacactagtttgcaaacctctgttgtattggacttctcagagtttatgagttcttgcatgttgttaaattttctctgcctttcatagttgcactgacttctatggatttaaaattcttagcttgactcagcctggtggctcatgcctgcaatcccaacactttgggagactgaggcaggaggatcacttgaggccaggagtttgagaccatcataggcaacatagcaagactccatctctacccaaaaaaaaaaaaaaaaaaaactgggcacagcagtacacatctgtaggcctagctacttgggaggtcaagatgggaggatcacttgagcccaggagtttgaggctgcagtgaactataatggcacccctgcactccaggctgggtaacagagcaagaccctgttccacgaaaagaacataaaattattagctcatactttctttccttgaatttcttactcaaaagagtttattattccattttcttttggtataaaatgttgctgtcaaagtctgatgattatttaaatttctcttttgtataagttacctattcctgtttttttttttttcattttcttttacttaagtaatattgctagaatttttcttggtatgttggtcatcctggaatgaatttctcctgtagtgtggtcttttaatatgtatttttagttcaagtaaattttcttgagytgtatttttaatatttgctcttttttttgctttsgttctcttcaaggattcctattattcatatgttggatgttcttttttattttcaatatttctcatcttctgtattatttattcattttttatatttaaattaaatatttttattttcaatttgtctttctcataaggcattgtctgttttccttattcactcttacattctttgtagctgttttcatttctggaatgattttctttttcatttctagttgtatcctgagttctgtcatctcatttctgagcttttctaaatctgatttatactattttatgttatgtgtcacttaaaaatgtcttttaacttgttttgaaatattagatgataggccaggtgcggtggctcacgcttgtaatcccagcactttgggaggccaaggtaggcggatcacgagatcaggagttcgataccagcttggccaacataatgaaactccgtctctactaaaaatacaaaaaaaattagccgggcgtggtggtgcgcgtctgtagtcccagctacttgggaggctgaggcaggagaattgcttgaacctgggaggtggaggttgcagtgagctgaggtcgcrccactgcactccagcctgggtgacagagtgagactccgtctcaaaaaaaaaaaaaaaaagaaatgagatgatagttttgatctattgtattggtatgtttttctcctgtgctttcctgccctacatggatgttactctggtccctttttctttgccttataaaaacattgtattggggccaggcatggtggctcacgcctttaatcccagaactttgggaggccgaggcgggtggatcacttgaggtcaggatttcgagaccagctyggccaacatggtgaaaccctgtctctactaaaaatataaaaccatattagcccggcatggtggggggtgcctgtagtcccagctacttggaggctgaggcaggagaattgcttgaacccaagaggcggagattgcaatgagccaggattgcaccgctgcactccggagtgagacttcgtatcaagacaaaaaacaaaaaaaattatgttggattttaccttgatattttatttcacttagtttaatgtgtaaaattggtttttctctacatttctttttaaagagccatgtattttaaaatcagtgactcatgtccaagaagttcaaacacgagtagagatagcaggaagtggtttattctgaggtcttgaaaagaatgaattaaccctgtaatctccccagtattctttttgatgttcctattgacatcactatattcagtgggtgctcctttctatctgctacattagtttttgaaagctttctttctgactcagtttatctcatgtgctaacttcctgaaccaatcctggaactggccttttctaccagaaacactcttttcttttatcatggaatagtattaaaaaccacaatctggatcttttggacagttcagctgtttttccgtggcttttttttttttttcgagacagggtcttgctctgtcatccaggctggagtgcagcggtgcagtctcggctcactgcagcctctacccgctgggctcaagcaatcctcctacctcagcttcctgagtagctgggaccacatgggaccacaggtatacaccaccatgcctggctaatttttatattttttgtagagaaaagtttttgccatgttgctcagcctggtttcaaactcctgagctcgtgcagctcacctgcctcggcctcccaaagtgctgagattacaggcgtgacccactgtgcccagccccatggctgtctttttcttctgaccctggttttgtagttatccaagtagcaactcttggtaagcctaaaatctatacgctttaaaatctgaattcataatatagcaatttactaacttgtggtatttctaagaatgaaatatgtatcatacattttaatttttacaatgattctttctgtccttcattcctgacataaagcctatggtaaattaaatctcatttccttaacatactgctcaaacccaaccctttcccccattcttctattaaaatttgtccagaaccatagagtcacagaatttaggaaatgagtagaattttggagcagtgatttcagcttttcataatttctttctcttcttttgtcttgctgtgttgcccatgctgaagtgtagtggctagtcataggtgccatcatagcgcacaacagctttgaacagtatctgggctcaagagatactcctggctcagccttccaagtacctgggactacaggcacacttggctcataattttttttttttaaatgaatcactttaatgatgaaaaatgcccactttttgtgatcataagacatttacttgtattcagatattatatgtatcatgcaaggtaaatttaaaaggaccttaaaaagcatatttttggaaacaaatttagttgctattgcataacaaaaaacttacagtgattaagggaaactgataattagatggataacaaaaaataccgggttaacagaagagtatcgaaggttactagtggataaaatctggccttttattctaagtcacaccgctgcctggtcaagaactgaaaacatttgaaacatgctccatcacactgcagttaccatactctcttatcctgacctcatcctttttggttacagatttatgggagccaagagcctctaatgttgctttctcattttgctttaattacttttaaaggccaatctagggagcacttccaaaacacattgataaaaaggaagttaagtctttgaaacatttgtagttatccagcatactactggctatttttcttttgtattgggtgggacaaaaaatagtcactaaatacttgatataagctttttttttttttttttttttgacaattttacatttttgggtgagtaattttcctcaaattagaatgcacaagaaaaatctggttaatcagtgttccaggtcgttgggctcctgttaatcagaagttttactgtataatcataatgtattttggatgttctcatttatgttatttcttcaattctttgtgtgggtactctgattgcttgattacatctgcctggcatagtcgtttttaaagcagcatttataataaaattttccatctttgcaagtaaaatgagaatatggaaagacaattgatggttgaagcatgattgtttcctcttgtctttacttagtgtttagtgggtttcaggttttggataaagagaaatgaatatgattattgtcctggtccgaaatgattcatgtatccacctggagacgtagagttgatagaggtgtaggcttacctctattatctcctcatacagagcagcgctacttcctacgtatgtgctttacatttttggggatttgcataagattttttttttccatgaaaataaggttctactaaaaccaaatacagaaacatttgatagagagatactttataagcacctcttagggctgaaagggtttcttgtctagcatcctgccacttgtaacaccagcaaattctaggcatttgggttcctataatattattttagagtcctgtggacctagctatcttattattctagtgtcctcttttttttctggagacagagtctcactctgttgcccaggctggagtgcagtggtgcaatcttggctcactgcaaactctacctcccaggttcaagcaattctcctgcctcaacctccagagtagttgggattacaggcgygcaccaccatgcctagctgatttttgtatttttagtagaggccactatgttggtcaggctggtctcaaactcctgacctcaggtgatctgcctgccttggcctcccaaagtgctgggattacaggtgtgagccactgtgcccggccattctaatgtcttctttttatcaagacttctggagagtggacaaaaactaacagttgtggcactcaacttggtgctttatattattattgatggggtttaggacatgctactcccaaatttggcaccttggcatataagctgaaggatttggagaaaacagcagaagcacgaaggtctctgaccttccccttcctctcttccctgaagcaggtcctaagacctaggagggactttctgaccttctctgaaccagatcctaagaccttcatgtgagagatgcccttcctgtatctggaagagaggagcatcctcatccccatagagaaaaggaygcagagtaatctgagtagtttcccccagtttatgatacttacctcttgctctccgtgctatcatttctccataactcaccagtcctcatcaaccctgtataaaaacactcaagtttaactgtttctttggattttcatttccttatgcaggctccggtgtcacgtacaacttacaattaagtaaatgtgtatgcttgtttttttggtaaactatcttttgtaataggtgccctagccataaacttagaagggtagaaggaaaataatagttttcctcctgtacattattttatttaattctttaatcaaacttaaaagtcagatattatccacattgtcactcaaagaaatgggtgctttagactcagggtctaaaatttcccttttcttttgttttgcttttgggtaggagagaagcatacctcttgaatttaaagacattggcttttctactcattttctctgaatgatttcattcacaacttttatttttgtatttatttttttgagatggagtctcgctctgtcgccaggctggagtgtagtggctccatctcggctcactgcaacctctgactcctgggttcaagcagttctcccacctcagcctcccaagtagctgggattacaggcgcatgccaccacgcccagctaatttttggtagttttagtagagacgggctttcactgtgttggtcaggatggtctcgatctcctgacctcaagatctgccctcctcggcctcccaaagtgctgggagtacaggtatgagccaccacacccggactgccattcacagcttttaattccgtcctgtatttgatgcctttaaaaatctgtattttggccaggcgtggtggctcatgcctgtaatcctagcactttgggaggcggaggctggtggatcatgagattaagaggtcgagatcatcctggccaatatggtgaaaccccatctctactaaaaatacaaaaattagctgggcgtggtggcgcgctcctgtagtcccagctactcgggaggctgaggcaggagaatcgcttgaacccgggagacggaggttgcagtgagccaagattgtgccattgcactccagcctggtgacagagtgagactctgtctcaaaaaagaaaaaatctgtgtttcagcctggacttgtctaataacccctatacctctatatctgcctcctgaacatgaatacttgactattgcagaggcctgtcagctcagcgtgtgcaaagttggagtcatcatctcgcctcttaaatatttatctccttgtatattctttgtgtttattccttgttctacttctacttcctgctcggggtgggtttaatcctcttggtcatgatggccaggagagcagtccaagcaacaggctactcagctgccctggtcaccaggagaatgaaccttttttcccaagtcaagattctttgcaggcagcaacgctaacatggaatgaacaggtgatgtaaaagtgatatacaaatatgcagtttattgtttataccaactctgacaaggtcgtaggacaatcagcagttaggcgccttcctcgaggaaggcctgcatataggtctggtttttcccattttatatttaccttcagttctttatgtaatgacttcatcctttatctcagcaaatacccccattacttttctagaccatgccctgtggtggagctaatggcatcatattttgttctgtctctagatctatttaagtcactagcttttttttttaaattagagtggcataaacaagagaggtagatccattgtcaaggtattcagtgtggtttgtgcagagtggttttgattgaaactgaactctacccagttaaattcccactggatttttgactcatcttttatagtcacaggatgcaaacatgtactttcttttgtctatttctctgaggtgtcagtgatctgttcacgtttcctggaaattgttgatatcctgttgtcttcatccatgttatctcctgtgtttagctcagagcctggcacagaattggtattcaggaaatatggatatttgtgttatactaggcattatgctgcaggctattgagaacacagagatttataaggtgtttacgggtgaccttactggctagattaggtggtgtaggacgttatatacaaatacagtgtcatagagtgacttttccgaggcacactgtttacccagaaggagttcttcagtgcttttggttgttttcatttgactttgttgcatgcatctatccacacatgtactatatgcaatatagtattttaatgtgttggctcaaaaactgttgtttctgcaataaaaataattagaaaatacacatatgggcttttcttttataaaattgtgactccacatcatgctccgtaatgttcttgttataaattttgacttgtttttctccacaggcagcagaagatgtcgttttcattggacctgacacacatgctattcaagccatgggcgacaagattgaaagcaaattattagctaagaaagcagaggttaatacaatccctggctttgatggagtagtcaaggtgagaagctactttaacttttattgtatatgtcttcaagttaaacattttgtcaaaagtataagataaaatgtaactattgcttttttgggatatmcacacacacacacacatatgcacgcacatacatacatgtatatatgtttaaaaaatcagtgtttttacatttatttatttatttatttgagatggagtcttgctcttgtcgcccaggctggagtgcaatgaygcaatctcggttcactgcaacctctgcctcctgggttcaagcgattctcctgcctcagcctcccgagtagctgggattgcaggtgcctgccaccatgcccagctaatttttgtatttttagtagagacagggtttcaccatgttggccaggctggtctcgaactcctgaccccaggtgatctgcctgcttcatcctcccaaggtgctgggattacaggcgtgagtcactgcatccggccagaaatcagtgtttttaactggattattttattatttttagagatggaggtctcactctgttgcccaggctggagtgcagtggtgcagtcatagctcactgtaaccttgaactcttaggctcaaatgatcctctcgccatgactcaagaatccctccttctttagcctcccaagtagctaggactgcagacacacaccaccacacctgactaattatttttattttgtagagatgagggtctcaccgtgttgcccaggctggtctcaaactcctgggctgaagtgattctcccgccttggccttcccaggtgttgggattacagatgtgaaccattgtgcctggccaacttggattgttttaaatagcataagttaaaaagagtgagaaactgtttgagcattgtatttaatgaatcagcagtgactcagactttcataggaaaaaatttggtgattaaaaaatgtactgtcagatctctggactgcatttaatagtggtatgtgtttcatgtgttaaacattaagagtttctctgtatatctttatcttgagcttctctccatgtgcataatatgtaagttaggatcatgtttctggtgaaagtggtatagctataggtaattgtatattgcaaacatttagcaagggccttctgcagctgaaggcttctgagggagaaatgcagaaattgaagtatgcaacttctccttttcccatgagaaattattctgtttttttctagttagaagagagtcctcatgtagagttttaaccttgmgatttgacttagcctgcaggaactcttcatttcagcatttcgtattgttacttttggcattctgtgttgggttgttcttcattgtgcaagatcatttcatgcattagaggacgattagaaaacttgccccctagttaataaatatcctcagcttcttgcccatatttacctgcatttacttttatctatgtgtatccatgttgtttcttcccacttgttacaaggaagaggtgttccacatcctctggaaagccagttcctcctcctacgctccaaatgtattctttatagccttcacaggctatggttttactgattatcttttctctcttctgtgtcttaaaattctcctcatcttttagctccttttgttatcattgctattaaaaatgctcagtgaacaaatgtgttggtcactcagttatgtgggaaggatgtggtgatgagatacacatgatctgcgtatcatagttctcacagtttagtgggaaagaaacaaacatttcttccattcgtaaagcaccatcacccctatcactctacagctagttgccaccttctttctctcttcccctttcagtgccaaagctcttagaattgtccttcctcactttcatttctgtatctttcacttaatcttttcttgccgtctagcttctttcctcattcctactgaatttctcttgcaaagctaccagcaacctcttccctttgttaaatcaatatgtaattttgaattctgatcttatatcaatctttgagcaacatttgagtctcttggtcagtccatacttctctcatgagatactcacttttggcacattactcagttctagtttttgtgttttttggcttttttgaatgccattcttagattccttcccgattgttcttcctatctttgttccttaaatgggggttttattctgggtcctgagtaggacatttcctctttttattgtgctaacttgccctgggcaatcttactttttttcatggcgtcaattgccaccttttcttttttcttttactattattattattttttgagacaaggtcttgttctatcacccaggctagagtgcagtggcatagtcatggctcactgcaacgtcaacctcgtgggctcaagtgctcctcccacgtcagcttcttgaataggtgagactataggtgtgtgccaccayagctgcctacttttttatattttgtagagacgggggtctcactattttgcctagactggtctcaaattcctgggctcaagcagtccttcccctcggcctcccaaagtgctgggattacaggcatgagccactacacttggcctattgccacttttctgaccaatctcaaatgtatgtatctgttctgaacttcaggattacatatccagttgcttcttatatagctctcactacttgatgcctctgaggcaccttgaaactaacaattaaaagctgaactcatctttctcctgaaactagagattggtactatagcccatgcacacctatttttataaataaaggtttattggagggcaaccatgttcatccctttacatattgtctgtggttgcttttccactacagtggtagagctgagtagtagactcaatatgtggagtagactcaactacatgggacacatagtagactatgtgactcacaaagcctaaaatatttacttcctgatccattaagaaaaagtttgcctatccctgctctaaaattcttatccttcattcttttccgcctaggaaggtggtggctagaaacatagagtaattcttaacaaatgcgactgtggagaattcactcagatagctttctaatccatttacttctttctttgcccgtactaaccaaccccagattccagctactatcatctagtctggattacttcatctgccttctaattagtctccttgtagtcattcttgcttccatccaattaattttttaaaaattcttcacctcaagtatttataatgtctttgtgttacaaacagtctaatatacttttagttatttaaaaatgtacaataaattattgttgactgtaatcactttgttgtgctgtcgaatactagatcttacccattctatctaactggacccatttttgtacccattaaccatccccacatcacccacccccactcctccccactacccttcccagcctctggcaatcatcattctactctctctcactgtgagttcaactatgttaatttttagctcccacagatgagtgagaacatgtcaartttgtctttctatgtctgacttagttcatttaacataatgtcctccagttccatctatgttgttgcaagtgacaggacctcattctttttggtggctgaatagtactccattgtatatatgtaccacattttaaaaatccattcgtctgttgatggacatttaggttgcttccaaatgttggctattgtggatagtgttgtggtaaacatggtagtgtagatatctctttgatagactgctttcctttcttttgggtatatacctagcagtgggattgctggatcatatggcagctctatttttagtgttttgaggaacctctatactgttctccacagtggctttactaatttgcattccccccaacactatacaagagttcccttttctctatatcctcgccagcatttgttattgcctgtcttttggataaaagccaatttaactggggtgagatgatctctcattgtattgcatttctctgatgatcagtgatgttgagcacctttttatatgcctgtttaacatttgtatgtcttcttttgagaaatgtctattcagatcttttgcccatttaaaaaattggattattagattttttttcttgttgagttgtttgagctccttatatattctggttattaatctcttgtcagatggatagtttgcaaatattttgctcccattccatgagttgtctcttgactgttgatttccttggctgtgtggaagctttttaacttgatgtgaccccatttatttatttttgctttgcttgcctgggcttgtggggaattactcaagaaatttttgcccagaccagcatcttacagagtttttgcaatgttttcttttggtagtttcataatttgaggttttaggtttaaattttcaatccattttgatttgatttttgtatatggcaagagataagggtctagttttgttcttctgcatctggttatccggttctccgagcaccatttattgaagagaccgtcctttccctaaggtatattcttggcacctttgtcaagtgaattcactatagatatatggatttatttctgggttctctattctgttctattggtctatgccagtactatgctgttttgattgctatagctctgtagtataattttaagtcaagtagtgtgattcctccagttttgttcattttcctcaggatagctttgcctatcctgggtcttttgtggttctatataaattttaggatttttttttctatttctgtgaagattgtcattggtattttgataaggattatattgaatcggtagattgctttaggtagtatggacattttaacaatattgattcttccaacccatgaatgtagaatctctttgcatcttttgtgtccttttcaatttctcgcatcaacgttttatagttgtttttttktgtgtgtgtgtgtgtgtttttttttttagatggaacctcgctctgttgccaggctggagtgcagtggtgcaatctcggctcactgcaacctctgcctcccgggttcaagcgattctcctgcytccggctccctggtatctgggactataggcatgcaccaccacgcccaactaatttttgctttgtttttagtagagacggggttttaccatgttggccatgatggtcttgatctcctgaccttgtgatccacccacctctgcctcccaaagtgctgggattacaggcatgagccactgaacctggcctatagttttcattgtagagacctttcacttctttggttaagtttattcctaggtattttattttattttattttattcatagctattgtaaatgggattattttcttgatatcgtcttcactgttggcatataggaattcccatccattaattaatgatacttcagtttgagtgaccaaaaatccagatttgatcgtatgcctatctttaataacttttgaatgactactcatataaatgttttaaatggttggattttgcttagctctccaaactgatactgtgccagtctatcctttgcattgtatgtatccgccatacttgacatcgttcagattcttgaaacttatgtgcttagtcatatctgcttctgtcttcattcctgattgtctcttagtcattgtttaggtcttggcttaaatgtaaattcctcacataggcattccttaactgtcttcattagattaggctctctgctgtatttttccttaggaccctacacttaactcatcacattttaaatcatttattcattcatctattcagtagatatttaccaagtgcaygcaatttgtctgacactgtttgaagtgctgttgatatagtagtgaacaaaagagactgaacatatttttatgccctcaaggagcttacactatagaaggaaacagatgataaataataaaacatatgttctatgttgaaacataagagaaaaagactgctggaaggtggggctatattcacaattttatatacaggcatgtcttcatatctacaagggattggttccaagacctaccccctcagataccaaaatttgttgatgctcaagtgccttatatgaaatggggtagtgtttgcatatatcctacgctcatccttctgtatactttattttattttttatttttatatatttatttttttgaggtggagtctcactttattgcccaggctagagtgcagtgtcatgatctcggctcactgtaacctccgtccaccctgggttcaagcaattctcccacctcagcctctcaagtagctgggattacaggcatgcaccaccatgcccagctgttttttgtatttttagtagagatgaagtttcaccacgttggccaggctggtcttgaactcctgacctcaagtgattcacctgccttggcctcccaagtgctgggattgcaggtgtgagccactgtgcgcagccctgccgtatactttaaatcatctctagattacttataataccctaaaacaatgtaaatgctatgtaaatagttgtcccactgtgttttaaaatatgcagtattttaattttcctccctttcccttccccttcccctccccttccccttcccctctccttcccctttcccttccccttcccttttttgggtttaatccatggatacagaacccaaggatatagagggccaagtgcatgtttagcagaccatctaaggaagtggcaggacaagtcatgttgctatcctggagaagagcaaagcatattaggcagaaagaataacaagcgcaagattgttggttgaggttgaagtgtacctgctactgaataaacaccgaggaagcatgtgattggaatcatcgagagagacaatttagagataaggtaaaaaaagataatggtgtagtagggagcttagatttttagggccttacaggccatttcagtattaggtaaatgtctccttcctacacggagcgtaagcttctgatggcagggatgctgctctctttattactgtatcacatgcacatggtgcctgacatattgtcagtgcttaagtcaatgctcagtcagtgctcactaggtatttgttgaatgaataatattctaggagataaattttatacatatactcattttatatacgttgccatttagtacatattgtttagtcacatctattagaggcaccaaaagaaaccaaaaaccaagagaaaaaattaaaagacaatagaaacatatccacatatgcttcagatattggaattggctgagataactacgatttatatgctaaagaaatccaaggaaaatatggagaaaatagataagtatataaagaatttcatccgggtatggtggctcatgcctgtaatcccagcactttgggaggccgaggtgggcggatcacctgaggtcaggagttcaagatcagcctgatcaacatggcgaaaccccgtctctactgaaaatacaaaaaatatttgagtgttgtggcaggtgcctgtaatcccagctactcgggaggctgaggcctgagaatcccttgaacctgggaggtggaggttgcagtgagccgagatcacgccattgcactccagcctgggcaacaagagcggaactctgtctaaaaaaaacaagaatttcacaagagaatttgaatctattttaaaaattaaatacaagactgggtgcagtggcttacgcctgtaatcccagcactttgggaggccgaggtgggtggatcatgaggtcaggagttcgagaccagcctggccagcatgatgaaaccccgtctctactaaaaatagaaaaattagctgggcrtggtggtgcgcacctgtaatcccagccactcgggaggctgagtaggagaatcgctggaccacaggaggtggagcttgcagtgagccgagatcatgccactgcaccccagcctgggtgacagagcgagactccatctcaaaaaaaaaaaaattaaatagaaattctgtaactgcaaatatatgaaaataaggactttagatagacttaacattggactcaaccaagcaaaatatagtatccatgttatagcatgtatcagtttttgtgtgtgtgtgtgtgtggctgagtgatattcagttgtatgaatatrcttcttaaaaaaatccacctgaggtcaggagttcaagaccagcctggccaacatggtgaaaccctgtctctactaaaaatacaaaaaaattagttgggcgtggtggcaggcacctgtaatgtcagctacttgggaggctgaggcaggagaatcgctagaaccctgggggcggaggttttttgtgtgtgtgtggctgagtgatattcaattgtatgaatataccacttaaaaaaatccatctgaggtcaggagttcaagaccagcctggccagcatggtgaaatcccgactctactaaaaatagaaaaaaataagctgggcgtggtggcaggccctgtaatgtcagctactcgggaggctgaggcaggagaatcactagaaccctgggggaggaggttgcagtgagctgagatggcaccactgcactccagcctgggcaacagagtaagactctgtctaaaaaaaaaaaaaaatccattcattagttgaaagacatttgggttacattttgaccattgcaattagtattgctacaaatatttgtatgcaagtatttgcttatatatttgtttgttttgagatggtatttcactcttgttgcccaggctggagtgcagtggcgtgatcttgactcactgcaacctctgctgagttcaagtgattctcctgcctcagtctcccaagtagctgggattacaggcacccaccaccatgtctggctatgggttgtttttttttttttttgtatttagcagagacgggttttcaccatgttagactggtcttgaactcctgacctcaggttatccacccgccttggcctcccaaagtgctgggattacaggcgcgtgccactgcgcccagccatatgtctgttttttaagttatttggggtatgtacccaagagtggaattcctgggtcatgtggtaattctttgttcagctttttgaggaactgtcaggcatccaaacctttatgtactcccttcctcttgtataatccactcctcttcaatttgggtagaacctgtgaattgcttctctaactaatagaatatggcaaaggtgatgtgatattactcccttaattaggttgcattatatggcaaaagtgatgggatgtcactgcattcaattacattatgtggcaaagtggttgggtgtcactcttgtgattatgtttcattatatagtacttgatcttaacagactagagaacaagattctttttgctggcttgataaagtaagcagccatattaaggaagcctacttggcagtgaatggtgggcagattctaaggatctatgtaaggacagtctctacccaagagctagcaaaaggctggggtccttcatcatgcagctacaaggacataattctgccaactacctgaaagagcttggcagcaaatttctccccatttgagtctccagtgacaatgcagcctggttcactccctgattgcagccttgcaaacccctgagcagtgtatgatgaaattattattattatttccttatgaggtcttgtcctctttacctttttgttttagacatttgtgtgaatttgggtaggggtttggatgtgtcattatgaaccttgatctactcagcctgaatatttctaccagtataattatatatttttttgatgaggaatgttgcctttttgatatcttcaatttggacttgatttattcccaagaatactgatgtgtcactgtccaaattatttctggcttgatgatgaatggtggagtcctcaagggttcaaggaagagaccatcaggagagtgtttgatctggaaattctgtttacacgggagatttttccttatgaaattagtgaatgtagtgtctcctaggaagggaatgtttcttggctaaaggtccaaaggtgaccgttgtgtgctgggacatgggaaatgtgacgggtattatccatatctgtcaactgagtagtttgttgattccgagggagagcttgtggaacaatggcaggaattaaggtaaatatactgccacccatatcaataaaatttttacttgtttctccgctaataattagtgaaaattcgtcttgtgagttgaagagtaaaaggagaaatgggtacttgatttgctgttagaacatttgcctactatcattttttcccaattctcttgaataaaacagaacaattatttttccattgtaatttcttcttacaatctctgcaggtttctttatcaaaagactggtgtttaatttttggagtgggagcatctagttttatcttcaagggtatcatcttattctgggtcttatactgcctttgttttcaggctcttttgaaatgtgtaatatggagttacattgtttgacaatgtggtgccttcccagccagtttttgcttgtttataacattttctttttctggcttaaggctgttcacaagaagtgaggaaggagctggggtcacaactacttgagggcttactcctgaatgctaactgaaggtagtaagagcccaccctggaagtctgcaaggggcttatccttcgtctgctagaacaactgaattagagttacctgttttcacaggaaagattttggtaatagccttcaaaagaccgtgtccaatatttacagtttcttttttttgtttttgttttttttgagacaagagtctctttctgtcacccaggctggagtgcagtggckcaatcttggctaactgcaacctccacctcccgggttgaagcagttctcctgcctcagcctcccaagtagctgggaccacatgtctgagccaccatgcctgactaatttttttttttttttttttggtatttctagtagagactgggtttcaccatgttggccgggtcttgaactccttacttcaagtgatccacctgcctcggcctcccaaagtgttgggattacaggcatgtgccaccgcgccccgtcattcacagtttttctaaaccccactggctttctgtgcatttggggtctgaagtcactctcaggatatttgtttcccctttctaataggtcttcctatttccctctccttgctccccactttgtaactatccttggtgaaatgatgccatttataaagagaagaccatgaatttgcattacatatttaatgcatttaaagaaacagaagtctgactctgagagaccacagacttagtctgagccaaactcatgggagtctcctaatggcatattgaatatgttgtttgtgcacctcctgtcttgggctcacagcctaatggttggccatctctaactgcaaacctgacagtgccttgttggtttaagatttggagagactgtctctcctaggcccagacttccatggacaaagcaagtcaagacagaggaaaatactcaaggttcccaggtaaattgtgttctatttggatgatgatctgatgaaaccttctgaactcactggcttctagartcagcatgaaaatgggcttatgaaacctwtgcctgtcttctttcaggtgaactttgacttatggacttagaataaaaaatgttgaggacagtatattagtaatatgggaggtttcttccaatattaaacattttcaaatgtgataagaaattcagtgggtctttattcctacagttgttgaaaaggaaattggacctctacccagtgtgactcatctcaccattgtggttggggagacccctgagggggtcgctcagtgggcctcagagaagcatgcagatgccagatctaagatcttgaactgtggcttttagtgggcttcgaacatgtgtctgtgggtaatacacttggttttgcttgttcaacaggttattttggttatcttcttaggaggctgcatctgaatttgcagcctctgttctagtaaatttggaaaatatggaaaggtagacaggagaaaagaaatctcatcttttcagtttttttccttgtatgcattagatgatttgtaacatcctattacactctcaaatgattgattctcattatctgcactaacgactatttctgaatttgtgacgccacagctgaacctgcaggttatagtttycagataagcatttacaaataatttttaaggaatgtccttttgtttccctgggaaatttttttttttttttttttttgagacrgagtctcaccctggagtgcagtggtgcgatctcagctcactgcaacctctgcatcccgggttcaagcaattctcctgcctcagcctcccgagtaattgggattacagacatgaaccaccatgtccagctaattttgcatttttagtagagacagggtttcgccatattggccaggctggtctcaaactcctgacctcaagtgatccacctgccttggctccccaaagtgctaggattataggtgtccaggtgtgagccactgcgcctggtggaaataattttttttgagacagagtctcactctgttgcccagactggagtacagtggcacaatctggactcactccatccccgccccctgggttcaagcgattctcctgcctcagcctccggagtagctgggattacagatatgcgccaccatgcctggctaatttttgtatttttagtaattagtaattttttagtaatttttgtatttttagtagagatgaggtttcaccatgttggccaggctggttttgaactcctgagcttgggtgatccgccctcctcagcctcccaaagtgttgggattagaggtgtgagccaccgtgcctgactggaaataatttttaatactagttttatttttagtttgtttttatttctgatacaagaggctgtacatatttttcttttaaatttggctattaatttaggtttctggtatagtgactccacattcacttggagctacaccattcacatttactagtttagatatattgagtataagattacttttgagagtatctatgcagatagaagtttgctgatggaaataaatagtaccgaattttggaatatcttgggtttttagcaacagtttttcattggcagagtgcatatgccaattacaggtaattctgtcttttaaaaaatgtttagtgttctttaaaattrgtctacagtgtttttaagactaaagtcttttccttgataactatattctattttttttccccaagtagtttccaccagttatgatacaattttagtttgttacatttctccttcaaacatttgttcctttcttatttgaatatgtaggatgttacatggagacagtttacccatacccctttaaagcattgtgtgcagtacttcagtggtcttctgcaactcttctttttaatggcttattaatctgtccttgaatcatccttttccttagagagaaactaatgttttaaaatgtaattatcaagtaatcgtttggtatcaagtatttgcctttaacaaatttaattttattcaacatttcattaccttgatctcaggaactggagagcagagtgaaaggcatgcacattaagatattggagacaggaattgggatcacagcttttttttttttaaatcaatgaataacatgccacagatcctgctttcaaagagcttaaagccttctgtgtccagaattggtgggttcttggtctcactgacttcaagaatgaagccgcggaccctcrcggtgagtgttacagctcttaaggtggcgcgtctggagtttgttccttctgatgttgggatgtgttcggagtttcttccttctggtgggttcgtggtcttgctggctcaggagtgaagctgcagacctttgcagtgagcattacagctcttaaggtggcacgtctggagttgttcgttcctcccggtgggcttgtggtctcgctggcttcagcagtgaagctccagaccttcgcggtgagcgttatagctcataaaggcagagtggacccaaagagtgagcagcagcaagatttattgcaaagaactaaagaacaaagcttccacagtgtggaaggggacccgagcgtgttgccactgctggctcgggcagcctgcttttattctcttatccggccccacccacatcctgctgattggtagagcctggtggtctgttttgacagggcactgattggtgcgtttataatccctgagctagacacaaaggttctccacatccccaccagattagctagatacagagtgtcaacacaaaggttctccaagtccccaccagagtagctagatacagagtgtcgattggtgcattcacaaaccctgagctagacacagggtgctgattggtgtatttacaatccctgagctagacataaaggttctccatgtcctcaccagactcaggagcccagctggcttcacccagtggatcccgcacyggggctgcaggtggagctgcctgccagtcccgcgccgtgcgcccgcactcctcagcccttgggtggtcgatgggactgggcaccgtggagcagggggcggcgcacatcagggaggctctggccccacaggagcccagggagggggtgggaggctcaggcatggcgggctgcaggtcccgagccctgcccggcgggaaggcagctaaggctgggcgagaaatcgagcgcagtgctggtgggctggcactgctgggtaacccagtacaccctctgcagctgctggccagggtgctaagtccctcaytgcccggggccggcagggccagccggctgctccgagtgcggggcctgccaagcccacgcccacccggaactccagctggccygcaagcgcagctagcagccctggttcccgctggcgcctctccctccacacctccgtggaagctgagggagctggctctggccttggccagcccagaaaggggctcccacagtgcagsggtgggctgatcaggtccctcaagtgctgccaaagtgggagcgccaagagcgagcgagggctgtgaggactgccagcacgctgtcacctctcacttcttcaggaggactgcaagtattcaggcaattgactacattttgataatgctaagctcaaggcgcaggggcctatgcatataggatgggcatgtaacctagttttaggtatcattgcagattttccaatggaaatgatagctaagtgaaacctcaagtctgagtggtagtgagttagctgaaaagtgagattgatgatggacacagctctaatgtcagtgaaaacatcttattgcaaaagcctggaggtgagagacagtgagaactctggaaaactgcagatttgtagtatgaggggctgcagttagaaagggagctagagagaaaattaggatccagatatgtatgggctggaatgtgatgtaacttattttgaaggctattcttgtggtttggggagcctctgaataatttcatgcagaagagttaacatgacagaattgtggcattagaaaactcattttggtttgttgtgtggaaagtaaattggagcatggcmaaacttgaagttggtagacaaattaggatcctcttctaatccaggatagaaacggtagacccctaaaataaagtattgtatgcaacaaagtagatggtgttgagaaagatagtggaagtggaatccatgggattatgtgatctgttcaatgtcaggtgtgaagtggagggaaggatcattgatgattattttactgcatttggttgtaatacctattaacacaccagtttcagaagaaatttatttaatgtcctttagttctaattgttcgttaagaggaaatagtaatacccgtttacaccacagaacagagtatggccgtgtatttgaatgagttttgtaaattaggcagtgtagatttaaagtagtaattgtttttatcacctaattggccagactttaaaaactgtactcttgctttagcagaaggaggcaaataactaagaaagctagtgtgaaggaaatcatttaaaaaagaccctaaaaacaaaaaccaaaaaattggagacaagctgtgtctcagcaattagaaagtataacattaaacattagtgtrtttgtccctgctaaaccaagaataatcagttttcctgatgaagcctcaaaggttttatattttggaaaaaaagactcaattatttttactatgctgtttttacaatgatagaaaagtgtactaaattttagaaagcttttttttttctttgagacgaagagtgtcgctcagtcacccaggctggagtgcagtggcgcsatcttggctcactgaaaagcaccaccttccggtttcaagtgattcttgtgcctcagcctctcaagtagctgagtttacaggtgtgggctgccacacctggctaacttttgtgtttttagtagagatagggttttgccatgttgcccaggcttgtctggaactcctggtctcaagtgatccaccttcacgacctcccaaagtgctggaattgcaggcatgagccactgtgcccggccgaaagatttggaagtatattaaaacagaaagaatcttctgcctgactttgagttaactggattatgtggaagctagaaagccattcctgagcccaggattgtttaaaagtttctgctttactttatatatgaatgcagaatagtttgaggacagcttttagggtacagatataactcttacctgtagtgtcttgaaacaaattattatttttttttaataaacagtcactgattcccttctagaaccagctgtaaactcctaagtggctttcatatgaatgggtagcaggattctcatccacagaatagaaaattaaggattggtaagtaggcagtagcaagtgagaaggatgtctgaatcatgaatggtggtcggcgttgacactaataccactatcaaaatgtatgggtgtttagcatctgggaagaatgattcgaatgtgcctgtctttgttgtagtgttttctgcgcttccytgtgttttgccctgttcaccagcaataccgagttcgtagatcgtctgatccagtgcattataagagaggaagtacatgttttttccagtattgtagcgccagggttagttctatgttatctaggttcagaagatgagtaatgacacaggatataacaagtaaggccaggcagggaaggtaccaacatggtagtttggggtggcgggctrcccattttctcataattactaaccttaattgagtacctactgtgggccaggtgctgttctaatgtgtttcagccttgactaatttcatcttcttaataaccctrtgagatagatactgttattatgtccattttacagatgaggaaaccgaataccagagaggcactctagtaactcagtcacagtcacagaagcagtattggagcccaagccttctggcatagcgcctgtgttctttttttctttgagacgaagtcttgctctgtcgcccatactggagtgcagtggcactatcttggctcactgcaacctccgcctcctgagtagctgggattgcaggcatgygccaccacgcccggctaatttttttgttttttttttggtagagacggggtttcaccatattggccaggctggtcttgaattcctgacctcaggtgatccgcctgcctctgcctcccaaagtgctgggattacaggcaggagccgttgtgcccagcccacacctgagctcttaactgcaaggcttggttaccccacaggccatgttctaggtattaacaaataaatgacatttgcagaaaaggcaccagatttttgttaactcttttcacgttttttctggttagtttttactaccatttagttagtttttgtagcatcatccaccactcccatcatattcacagttaaatagtactttttactgttactattcttgggttgggtgatagagcccacttaatgtgagttgttttgtaatagaggaataagaggaataaaagaaatgggtactggtttgcttggtttctttcccttttctccgtttcttaagctactcttttggcattgtattcttagtactttcctgtaactctttccccatcggtgctcaaaagagttaaatagcttcagaacctgagtgtgccttccctcaggacaagctgggattacagaaagaatggaccaccaggtagtttatcacttagaagaatagaataaaatgatatcattggactcttttttccctacctcctgattggaaaccatcaggaataccatcatctgagcattgttgctgacacatttttaatttttttgtgtactttttgttttctcaattgtattacttgtgatatgaaaataaaactattctaaagacttcaaatgaaaaatttttaagggaaaatgaatagcatcaaatttgttttaacaattctgctgaaatttttatatttgactttttcttttttttttccagacagggtcttgctctttcacccaggctggagtgcagtggtgccatctcggctcactgcaacttctgcctcccgggttcaatcaattcccctgcctcagcccccggagtagctgggattaaaggcgcatgccaccacgcccagctgatttttgtatttttagtaaatatgggatttcaccatgtcggccaggctggtctcgaactcctgacctcagatgatccgcctgcctcagcctcccagagtgctgggattacaggcgtgagccaccatgcctggcatatttgacttttcttccactttggggaggattattatgtaatgtgtcagaaattttcttttaataaattataggatattattgaacattatgttaacwgagtttattgttctaagccctttcatattttcatgtattgtgtgtcatgtaatcatagatgtgagagctgtcttaagaatattttaaagagtgttaagaataatcagctccactttttcttcaaatattgccaagctgtatttgtgaagagataatgttgttttgtttaaaatatatttattttatataaataaagaacaaaggctgggcgcggtggctcactcctgtaatcctagcactttgggaggctgaggtgggaggatcacttgaggtcaggagttcgaaaccagcctgccaagatggtgaaaccccatctctactaaaaatacaaaaaaaattagtcatacgtggtggtgtgtgcctataatcccagctacttgggaggctgaggcaggagaatcgtttgaacctgggaggtggaggttgcaatgagcggggatcgctccattgcactccagcctgggtaacacagtgagactctttctcaaaaaaaaaaaaaaaaaagcacaaagtatatttagtaaaataaagtttaaccttttacatttttatgaaataaagtttgatatctatacattgaaatgagctgctttcttttgttttgtattataacttaaacttgtggcttttcaatttgaaaacttattgccatgtagaatttgattttttttttttcctaatgcaacactttacttaaaaattatggagtagaactatattttttagaagagcaggttttacaaaacctaaaattcaaactctggaagttgcatgatgtggtggaagaagtgctggactgagaatcccaaaaatattgggcttggttttgcccaatgccaacagtatttcactgagtgcaccttgttttaaactgaagcaaaactgaagtgtaaaaagtaaagtagaggttcctcttcaaagactttcctccccatctaattaggaataaatagtaacttctcttagaagcaaaatttattctaagacctgtgctaacattcttaaatatctgctagctgtaataaagaaatcaatgtactttatgttctcagctcccacaatttagcctaaatatttgccctggcatgcttatactggtccaagcaagcattaagtcatagcctgttcctcttccttatttgaaggtgtttttacctttctcagtattccacaagttacttcctccttcctttgttctcctctgccgttgcctcttttaaaaagttctatgttgttagccaattgggacaaatacaaaatgtgaggtcctgttccagccaatggaaaccggacacagcagtagggtgggcgcctcaggttataaatgaccctgtctcctttgttcaatgtactctcgtggcaaaactgctggcgaatgtaccctttctgcagaaagtaaacatggccttgctgaggaaattaaatttatgttccagtgctgtttctttacggcactggggaacaagcatttctaacagaagcctgtctggttctgagtccctgccctgaacccctgcctttggatgtcagttaactcacttataaaaccgctgctctggagatgaatagttctgttggcatttgtgagattgtgtcttatcctaacagactaatttttatggaagctgatgcggatagttgtttattcatggaagaaataatgtgttgattgcgttaatttgctaaactctggggatttagtagagagtaagacagctagttgttgccctcatgaaggttaagtgtgaaaagggctgcataattgcagggcgtggtgtatgtgttcatgtggcaatgatacctagccaggtgtgggaggactggaaaggcactctaaagaaagtggcaggctgggcgcggtggctcatgcctgtaatcccagcactttgggaagccgaggtgggcggatcacctgaggtcaggagttagagatcagcctggccaaaaatggtgaaaccctgtctctacttagaatacaaaaattagccgggtgtggtggtgtttgcctgtagtcccagctactcaggaggctaaggcaagagaactacttgaacccaggaggcaaaggttgcagtgagccgaggtcgtgccactgcactccagcctgagtgacagactcccatctcaaaaaaaaaaaaaaagaaagaacgtggcattagctgaaactggaagcatgccaccctggactctgggaggaaatggtcattttcctgtcacccagactactgcctcccagcctgactcttcagatccctcttgcctctcaaagtgttcatttgtttgttcattcattcatttattcttccaacaactgttggttgaataacaactgtgccaggcgtgtgctcgggatttgaaatacctaayttgaaccagctggacaagggtttctgtccttatggagcttacattttaatgggctagggaggtgcagagggtggacagtgcacatcataagtaagcagatgctatgccagaattctccagcctgcaaccagagctagcccttcatttccttgctctgaggctacagttcagtttctctcatgtggctgtgaggcccagccttcccctcgcctctctcttcaggtcccagacactgtttttcactacgcttctatttctaaggtgtcttttcagttaccacgcctgagaaagttttcaggaatctatttttggattagagatcccctgttgtcacatgccctctttaaaacttgtacataacatgcaccacataatcattccttagctgctgtgtggctgtatttaaggtttgtcttttccaccagcctgtaaattacctgttggccaagatgatgtctttcttgttccgtcccgtgtcttcagggcccagaattgggcctattgtaataaaagctggtttggtaaaaggggagagagttactggctgaggctggctgaactgagaaggctgtgcaaggctggggagcctgcctgggccttgggctgcagggtaagatgcaagatgaacaggggtggggctgagactcatgcttaggcggacaggatcaagtattgaaaccagcctagggagttcaaacttggttttgaggcaatgggatgtcatgaaaagcttaagtgattttggggactcctagtttgttttgataacatttaatattctcaaaatcattaataatttgataacttcaggcatggctgatttaatttttaaactatgaaaatatgaagtatgaaattatgattcttatggtaaaaaagttcaacgtgtacctaagagcatacaattttaatttcccttttcctacaacttttaatcctaccttttacatttatttatttatttattcttaaatatagacaaggtcttgcgatgttgcttaagtcagtacagaactcctgggctcaagtggtcttcctgcctgggcctcctgagtagctgggattataggcctgagttaccatgcccggctgtctgtcctacttttgagcagtaaattggtttctgtagctgtctaatgcttaaactttcctgtgcgttcaaatgtgtatttctgtcttaatgtaggtaaggtcatacgctatgtactccaacttgctacccccgcccccagtatatactttattttgcttatttttacagtgtaagagttactctcttaaagcttaattgtcatttgtcattgccttgtatagaaccaaggcatcttggactgtgtaccaaatcccataagatctggccagaacagggccacgccgtccatacctccttatcttgtgctttgctgccacttccttactgtgtttcagctttagctgcctgatattctttccctatkaaattgcttcctcatctaggatttttatatgtgtggttccctctgtctaatgttctttctccctgatctttccatggtagctagctgtttatgtttatgtgtgtgtgtgtatgcgtgtgtgtgtgtgtgtgtgtgtgtgtgtgtgtgtgtgtgtggttttagagacggagtctcactttatttcccaggcaggagtgcagtggcgccatcatggctcactgcagctctgacctcctgggctcatgcaatcctcctgcctcagcctcccaagtagctgggactacaggtcccaccaccacacccagtaatttttgtatttttttgtagagatagagatcttgccatgttgcccaggctagtctcaaactcctaccctcaagtgatcctcccatcttggcctcccaaagtgctgggattacaggtgtgagccactgtgcttggcctggctagatgtctttatccttaggtttaaaattttactccagaagggccctttctgagcagcctgtctgaaacaagttctccctagtattcttgcctgagtactctgtttctatgtaacatttattttagttatcaattgatttgtttattttctgtttctctcattagtttgtaataagctccatgaaggcagaagatgtatttcatgtagtgttgctgggcagatagttattgaattaatgtataagtggttgaataagaacatatagatcaactgcattctttttaaaggctaatatttcattttatggatgtaccagtcctttgttgaaggcttactaaattgtttttcagaatttttttcttattaaaacaccaccaacgaattcaaaataatgaatttctttgtatgtctctctgtgttcactcatgtgggtatatctgtaggatgacttcccaggagtaaaatttcagaacaaaagataacgtgtcctcaaacttttggtagatactgacaatttctttttaaaaagattatcccattttctatgacaccagtaatatgagaagtatttaactttgtcatcctggccattatcagattttaatttgctagaggaaaagtgagatctcattgttttaatttgtatttctgtaattaggagcaaggctgagcacagatattgtgcttctggaactgtttttctgtgagcttttaatttaatcttttgtgatgattgttggtcctttttttagttgattcagagtttgattaaagttttttaaacttatgatgttataggcaacctttacagtgtgatgtcacttagtgccattgaatttggagctatatagggctttttatctcttcaaaagtaattttgtagagcctgataataaaacttcatgttctcaaagaccatattggggctgagtgtataatatttagtagtttattattgaaacagtaatagagattttaatgtccagtgcataataggtcctcagtaaagtatttttggatgaatgagtgacaagtgaaaagttaatttttaaggcagcttgattttatttgaaagttcatttagaagaatctaattttcatagtaagaagacttagcatgctgttaagttgaaagataagcttgctttgtggcatgctatagaagtgttggatttgtggcagtggaatttttaatttgctgtgtcagatatagatatggctttatgtatccatayacacccagctataacatgtatattcaaataagtgacaaaatatgtctaatgaatttttgaattaccttttaaaacttgcctgttagttctctcaagtgatgaactttttacaatagcagtttattttctctcatcacgttggaaagaaatgttaaaagttttcttytaggtttattataatccagtcttcatcagccatcactcttcctgtattttgttcaagaggcactaattgttcgcatttggcaggtttaacacttcctgacagagaggctattaaggggaagtattctccaataactgtcactggctggaacaaagaaccttccaactcaatgtgtggaaaccactaacattcttaaatgacccttttcatggattttcatccctttaagctaaagtttggagaatgtagggtcagcgaaaacagcaacgtgtaataaagcagtaaaccttgattttggaaggcatagggtgggagatatagatttatctckgacttgaaaacaattgttatttggaaaatctcattagcagatgtgactgcttggagtaaaaaaaaaaaaaacaacttaaaactgatgtcgctttcaggacccctttgaacttaacaagcacctatttgtggagcagactggctaatgaaaggaaattaaatttttctgacaacttcccctgccaacctccttattcaggggatgttattaggtactgaagaactttaargaagattttttttattagacataagtgaaccagttataaacatccccccccgcccccttctcggaggattctgacatggttgctctacattttaaacgtattagcttaaaagcttaaaaaacactgggcttcacttcagcattttagtcattttytaaaaattcagtcacacttaccagctgtggtttcaaaacaatattgtcagtctttgtggtagtttagtttgtgtcactgaattacacaaacacacacacacacacacacacmccacacatacccacacacacgaaggaggcttagatttcaacattatctttattgttatttggggaaatgattcagcagtgtcctgtgttggatgtgttaggtgagggttaatgatcagtgaaattacttagattcaagggaagtttttgtcttttcatcttcttagaggtagaagtggcattggttaatatttagcaataactaatccttaaatggataaacttttaccccttactgtttaggaaggtattttctttcttttgctttttggagttttttcctccagtagttggttcgttgaaattaaagtttttttttaatttatgtaacaagatacaattgtagagataaaatatgtacctgaaaaaaaaaaaaaagaaagaaacaatagaaaagaaaaggtaatgcagattaccaaaaggattttttggaacaattcgtaattcctgtaggtactggaaattaactttyatatttctgcaaaatcgatcaactactcccaaacaatagagaatcaactccccctgctgacagaatctaggaaaacatgacacataatattggacagaaacaagctggctgcggacaagctttaatgacctgatttatgattcagtattgattgtaaacatctaaattctgccattaaattccggcaactgcaccaaatcattggcaattctggtagtgcttcctgccagctcatttcaactgctttgagtttcttaatataataatgatgaggtagaatttacattccacttatggtattaattttacatttctctgaatgaaaagggttagaaggtagtaaaattgaacattaaatgaatcgraggagacagtagtgcaatatatgactgccctaaagacattgtgcaatgcctcatgggattaatgttgagtctcatttcctgcttttacaggatgcagaagaagctgtcagaattgcragggaaattggtaagtccttaaattaactttggtaggatttctgtgtctttcagcagatacggttgagtcaacaggtaataagtaattcccatagagcaaataatactttartagttttagattttgattacttgttgctctggaagaatgtatcagttgaattgccaaattctattattaaaggagactgtaaagagtaatttgaccttaactatacataactcttttgtaagatgagatcacaggctaattcaaagaaggaattgtcttaagaattctaaagattggatataagtttaatgtcaatttatatgtacatagttgaatgtggtttgttaaaattaagaacatttggattaaaatgaagataccatatgtgacatagttctttaagtttttgccttttgctaagatgttaggtatcaacttaatcttgttagatgggaaagataaaatagatgtgggaaattagaactgaatgatctaaattggaataaaaggtagactggaggagtttttaatggctgttttacatgtacttgtatttgggcagtgtttcccaactttttaatttcttttctttttcttttctttccttttttttttttaagatggagttttgctgtcattgcccaggctggagtgcaatggcacgatctccgctcactgcaacctctgccttccaggttcaagcgattctcctgcctcagcctccctagtagctgggattacaggtgcctgccatcacgcccagctaattttttgtatttttagtagagatggagtttcactatgttggccaggctggtctcgaactcctgacctcaggtgatccacccgcctcagcctcccaaagtgctgggattacaggcgtgagccaccgcccctggctcgcaactttttaattttaaaaatattcttggcggtcatgagaactatttttggtatctgctaattgagaaaatgtgtaagggcatgctattatatggattaacaatattgttaaataactttgcaggtttaataatcaaatcagtaattgtatacatttgacagaaatttgtacagatgagagaaattaggcaatgcttgtagggatcccagcrtcttctcagcattcctgtacgcctcagtccaagcatctcatcgtgccacacgaacatttctgtaggcctgttttctcactaagattatttagatctattttctgcctctagagagcatttgatttggcaaagctcatatagttgtgatatgtagaaatatcttattggtctggaagtgatcacttgtactagtaagcgtgttctttgcaaatgggacagtctaacttagcaggtctttagtgacctgaaaagcagtttggcttattgcacccttgtttgtagttggtactgtctaaattatttgggctttgcccatcattaagtgtgttttgttgtttgctttgcaaaaatctatcttattgatataggtcctggatttaagaccagaccatagaaaatcttattttatctgactacctcatctcttcattttttttttcagaatcattaacatttcaaaaagcctatcagtacttcataggaacatttgctcgactgctaaataaactggactatatagaactgattctgtggtttctttatggagaaaaatcaaaagtttctgttcatggtttgaaatcactggtattcctcattgcctaagaggcatataatatacctactggcttttgaggatagttttctaaaatagtttaattccatcctgtcagacatctttacatttaaaaagctctttttctagttctaggttagatattattatcaacctcattggatataataatactgttattattattattacagtatctacataaaggacaatatttagagaaatttagggaaataaagggattagaagaaaatttacagttacactgcagtgccacattttgaatggtgaattttggacttgcgagcattccctttgtgtaaatagcaggccgtggattgctttgcttcctttatgccttttcttccactttctttctttctttctttytttttttttttttttgagacagacttttcactcttgttgcccaggttggagtgcagtggtgcgatctctgctcactgcaacttctgcctcccgggttcaggtgattctcctgccttcacctcctgagtagctgggattgcaggcacacaccacaatgccagctaatttttttgtatttttagtagagacggggtttcaccatactggccaggctggtctcgaactcctgaccttaggtgatctgcccacctcagcctcccaaagtgccgggattacaggcataagccagtgcacctggccattttccactttcgttataacctgtcacctttaagataaccagctcatcatgatgggcctctgtctaactagttctcatcactttgctttcctccctcaatattttaatgctgtgctttacctccttttcattttttattttttcctactgaagttacctaatctaatctaagtcttttttctttgtacttgggcacatcctttatgactcctttctctttcctgtccttcttctaattcttccccaattactctctcttgcttgtgaaataaatgatagcaatcatggctattaagtataagagtactggtgttttgcttatactgaaagaaagggaaaccataaaatttgaggtaaaataaaccataaagaactagggtcatcagctcttacaaagcttttagaatttctctgaaaatctcttctgaatcacctcagaagcctcgcataaaatcttttccttgaagtgctactttctaaagtaaattaaattatgttttattaaagtctgttggctttctgtgttgtttgatatttcgtaagttttttactactgattttattgagatatatcacattttaactatgattatgattccatgtgaaaatgtgttcctagttctaaacaactgatttataatcaaacctttgaacctatccatttgtaagttgttgattgtccatgtgttatacctattcatagagttctctcttaattctttctgtgttatgtgatgaaaatgaagtttatcctgttttatgtgatttcctcctctctcatgtctttgcttttcttctggaaacattaatctatgctgccaaagtaggaaactcactgtattgagcattgatgaattaagtgccttttacataatggtaactccagtttatggagcatttcttcctaaggccaggcactttggaaatgttgtttctaatgctaattcttgggtttaatcatttttgtttacatttaaggaaactaatgattagaaatggtaagtaatttgctcaaggtcacagaactatcgagtggtggaccctggtttaaatttaggtttatttgactccaaagaccacagactttttattatactgtgtctaaaccaatgggattagaggatggcagctaaaatttgagcgactactttgtgtaaaatactgtaaggtactcaaatgtgttatacatggaattaaagaagcagacagtctcctatccttgatgaggtgagagacagttaagacttaatatgttacttgtatgtatttgttttttggactacctagtttctctcattcttgttcctgattttttactttgacctatctaagttgagagatacagagctattgatcctcagtttgtctttaacctcaatgatagacaacagtaatcagtgagcttgatttccattgaagtttgatctttttactgggccaaaggtccttaatacaatcaagtcaaaattgattcttgaaaggaaaataaattgtgaatctaaaacctgtcctttaacaacttccagattattcagattcttttcctttgcttgtctttctcacaatcacaaatcatgcccaatttaaataaaaacttttttttttgatcctcaggtctaccatactacaaacctacttctcccagaatttccaaatctcaataaatgtcacccctttcagtcaggccaaaactgagtctctcctggatgcctcttttcctcatcatcctgttgtaaatacatcaataggcattgtcagttcatcttatatacactgtcttcattactaccactctcctccaaactacttttgtcttttgcagggactgtggcaatagtttctttacttcatttcttaaacatttcacatagctgacagtgagatatttaaaatctttaaagaacaaggatatatttcatctcatcccagcccatttctgctttaaattctgtaatgactccattgaacttagataaaaatcacaattctttactctgactactatccctatgtaatttgacacctgcttttctctccagtcttattgtatactactcccttctctgcctcccatacttcagtcacattagcttacttgaacacagcaaatttcagggccttaggataagtttttttttttttttaatcttttgcggggtgaagggggatggcaggacctagcagactcttgctgatatcttcacaaaaatagctccttgcagtctttcatatcttagcctaagtatcatgtcttcaagagaagattctctaatactgccaccsagtcattctctgtcttataactattttctaaatttctgcatagtattcatgayttgcagattttttttattcataaacttttctccaagtattttattttgaaaaatttcaatcatacggcattttgaaataattgttacggtttatactcgtatacccaacactaagatcccactattaacctttttctagatttgctttaccacttatctgttcatatactaatccattttatttttgttgcatttcagagtaaattgcacaaccagtatatgtcccattaaatacttcaacatgtgttattaattgaattcagtatttgtatacagttttgttattttgatgccaaatttgcacacaatataatgtgaacaaatcttaagtgtgtatttgtggattttgacatatgcatatatatatatatacttagaatcccaccaaggtgctgaacatactatttccctggagatttccctcatgatccttccaagtcagttctcgcctaccccctggcctgcaggtaacttgttcagatttttatactaaagattagatttttaaaaattaagataaatttttaatactatacaattcagcctttcaaagtgcacaattcggtgattttttgtgtatttacaaggttgtgtaactgtaatcactatctaatttcagaagatcttcattactccccaaagaaactctgtactcattagtatgtacttcttattttctttccatctagtccctgacaaccattaatttactttgtgtcttgtggatttacttattctggggatatttcatataaataaatggaatcacaacatatgaacttttgtgtctggtttctttcacacagaatagtgtttttaaggttcatccatgttctaccgtttatccctttttacggttggataattttctattgtatgtacatgccacattttgtctgttttttatttttttgagatagggtctcgctcttttacccaggatagagtgcagtggtgtgatcccagctcactgcagctttaatctcctgggctctactaatcctcctgccttaccctcctgagtagctaggactacaggtgtgtgccactatgcctaatttttgtatttttttgyagtgggttttcaccatgttgcctcagttgatcttgaattcctgggctcaagtgatccacccacattggcctcccagartgctgggattatagacatgagccactgcacctggccttatctatttattcatctattgatggacatttgggttgtttttacctcttggctattgtaaatggtactgctatgaacatttatgtccatgtatttgtttgtatacctgttttcaattattttgggtatattcttcgaagtgaaattgctgggttatatggtaattctatgtgtaacttttggagatactagcaaattattttccatggtggctgtcccattttacatttctaccaagaatatataagggtttcaatctcttcatatccttgccaacccttgttattttctttcttttataaggaaaactattgccatcctagtgtgtgtgtagaataatatcttattgtagcagagggaagaatagattaaaaaaagtractcaactatatgctgtctataagaaactcactttagatgcagagacacaaataggttgaaagtgaaaggaaggaaaaagatatcccatgtaaatagtaaccaaaagagagctggggtggcatactaatgtcagacaagataaactttaagtccaaaactattctaagagacaaagaagggcattttatattgattaacaattacaaatgtatatgcaccaggaaacatggccctaaaatatttgagataaacattgacggaattgaagggagaaacagactaattctacaatagtagttggagactttaatagcacactataagtaatggatgcaacatctagagagatcagtaagggagggaatagaggacttgaacagcactatatactaattagaccttatggatatataatgaccattctacccaataacaatataaggcacatttttctcaagtaactattaaaagaggaaaggagtgatgattgagttaaaataattgttaaagaaaaagaaaatataataacaaacaggagcaatatctcataaagtgttgcccatgactcgcaatgttcccaagacttagtttgatatagaaatatttttccccgcatgtactgatttatattgatggattgctcttttcttaaaatagtataggattctctgcaatatataaattttatttttctttgcaaatgattgctttatattaatttgattactattttatagtaaaatttttgttgtggtggtggttgttttttgagacagagtctcattctgttgcccaggctggagggcagtggtgtgatctcagctcactgcaacctctgcctcctgggttcaagcgattcatctgccttagcccccacttagctgggactacaggcatgcaccaccacgcctggctaatttttgtatttttaatagatacaaggtttcaccatgttggccagactagtctgaaactcctgacctcaagtgctccccctgccttggcctcccaaagtgctgggattacargtgtaagccaccacatctggctggttactattttgtagtaaaattgaccatgagttagttttctttgtatttctaatacttaatgcttgttacagagtatatattcagcaagtggttatttggtgaataaatcaaaatgaaatatgtatatatatgtatagaaatgaattaagcaatcacatatttaaagttcttttgtaatatttatagaccagaatttgactataattttctcccttttcccccttaatcttcaattttataatagagatacctggggaaaaaaaggaatattaagcaaaacatgataaactttcagcaaatagataattgaaacaaaatgatctaggattattcaaataaattcagtatatacttgttagtgactactagtcatcaattcttgtaggctgtccttgtgttcattaggctggactaatagaaatttataggaatctaagattcaaatgtatgaaagtcttttactgaaccttattgcctttacaccagcctgttcccatgacatcttatgttctttgaaagtctggctctcccatttgacttattttactattagtcttctgatgtagtgtgtctgccctgtctctgcgtagtgtgtgggggctatatggtagtcctttcttttctgccctggctgtttgcctttgcctattcttctcatcttccttttggcataatacaacatttttttaaaaagttacttttgttgcttatatacaaccaataattcatacttaagagggataaaaatatgtggctaagtcaggaatctttttattttgtctatttcatgcagcttagaaaaattttcacatgttatatatgactctggggttaaggttatatggaagaaacctttgcaaaaacattacaatttataccttcttcacaatcttacatcttgttaatttatttgccaatttcgtcttcaggagaagacatttaatatttaaggagattgaataacgcctaaggaaaagttatgttaaagaaaatggcattaaaataatctatgtgaaatccattaaataatgagatgtatattttgctgttttcctattattgaagtgatgtggtcatttgagattagaatgatattccctgggagacaggaacttgtgttctgtggctttttttcttctttcttttccaatgggtgcttatattttcttttattattccaacatgcacatttgggtttaagcataatttcacaagttctttttctgtcttttactgttaaatttgctgtttctgtctccctttatttctctcagtccttcatcttctttctcttgttttattgttagtcattcgtgaataccatttttttcctttttctattactctgttggaaaaggctgtgcataacattcaggcaggaatgtggaaacacattgtaatgtgaaaaaaacattgctttttttgtttggaaacttcctgtgtgtgaagcgttttgctctaatctgggcactgaaatgcactgatttccgatccctggagcagagttagggatctagtatttttatttgcctaagtagagagaaataggcaggcaaaatcagtttttcctttctctgccaaagaaatagtgtcataaaatagtgtcatgtattggtttgtttagtgtataatacatctggattatatttttgtaggtactgaatattgattcttatttaaatatgtttatatagttatttgtatatatgtgtatgacagactgaggaaaggctgtgtgtgtgtgtgtgtgtgtgtgtgtgtgygcgcagtagtagagatgtggataaatcatagactccaacatatatatgtttactagttactggataattacagaccccaaatagtattgatgcaaatgtgcatcacctcagtctgaggtctgccaactcgaatgatactccaaaactaaactgataatgatgaaactaaatataactattttgtgatttaaagagagcaataaaatcagtggaaaattatgatcaaataaaaaatgagtaatgcattgatagtagagtgtatttccccaatttgtttgaatttaaactgtttccttgtttgtatctacagcaggaatttttcagtgttagtcacatggtgcatggcagccaaatttcccagtagattctgaactagattccttggaaaactctagtaatatgctaaatttaattggagtttgtggagttgtcattagttcaccagacctcgactataccacatttttacagcccctctcctgtcactttaaacaacacagatttagtttttcttcattctgtgtgttcaattctcattcgtcaggttgtagggtgagaaggaggcattttgttctatgctatccttattcagtggctaaggctgatggagtttccaccatctgcaatgtcatagattacagaggcaggacacagaaaagcctcagttttggtaatcatcaataagacattcttcatgacaaggtgtttactattatatctcattgtgtggctttgaaatttgcagattgtcaccaccatctcctaaatatttcttgaatttatctacttctctgcatttctgttgctattctctttgtttaaggtagtgtcatcccttgcctacatcactgtaacagcttttgaaatgtactcctcttatcatagcttgtaatcccttggaggtagactctggaagcttattgggggaaataattttgggaccaatacctgagggggaatgaaggaaactgagccaagggaaaagttgaattgattctctctcaacaaagccatcagctaataatttagagagctgtgaatatttgttggtcttttttagttgttccaagttcgggcaagaggattcagcctttatacacctgtatcaactatctagggggtgtgggctgcmcctaggaaggggcatgaccttaggcagaaagccgaggacaagtcagcttttggttgacaatacttacaacagttggggcaatgtcctgaactagggatctgggcagaaaactgtacttaataactttgagatatatttttcatgattgttcatttctaagtaatttcagatttctgctmtgattttgactcatatgttatttggtgatgtattttaattctttaattttttgagatagagtcttgctctgtcattgaggctggagtgcagtggtgtgatcacggctcactgtagcctcaacctcctaggctcaagcgatcctcccacctcagccactggagtagctgggactacaggcacatgccaccacttttggctaatttttgttgttgttgttgtttttgtattttttgtagagacagggttttgccatgttgcccaggctggtctcaaattcctgggctctactgatcctcctgctttggcctcccaaagtgctagaattacaagtgtgagccaccatgccaagcctagtgatatatttctaaataactgaaaaaaaaatagttttttattattattgatttctaacttaattgctttgtggtcagagagtatcatstttttcatttaaaaatctttcagatttgatgaaaattgctttatggctaaggaataagtcactctgatacatattctgtatgttcctgaaaagagtgtatattctcaaattattatatgcaatgtcttatagaaaactcaagaggtcaaacctacctattgggatattcaaaacttctagtgagtttttttttttttttttaattaagacaatggagtctcactctgtcacccaggctagagtgcaatggtgcgatcttggctcaatgcaacctccgcctcccgggttcaagtgattctcctgtctcagcctcctgagtagctgggattacaggcacccaccaccatgcccgaccaagttttatagtttagtagagatggggtttcaccatgttggccaggctggtctcgaactcctgacctcgggtcatccgcccaccttggcctcccaaagtgctgagattacaggcataagccactgcgcccagcctgtgtgggttttttttttttttttttttgagacagagtctcactctgtcgcccagacgggagtacagtggcatgatctcggctcactgcaagctcccctcccaggttcacaccgttctcttgcctcagcctcccaagtagttgggactacaggtgcctgcctccacgcccggctaattttttgtattttcagtagagacgaggtttcaccatattagccaggatggtcttgatctcctgagctcatgatctgcccgcctctgcctcccaaagtgctgggattacaggtgtgagccaccgtgcccggccttttttttttttttttgagacaaagtctcgctctgtcacctaggctggagtgcattggcacaatctgggctcactgcaacctctgcctcccgggttcaagcaattctcctgcctcagcctcccgagtagctgtgactacaggtgcctgccaccacacctggctaatttttttgtatttttagtagagatgaggtttcaccatgttggccaggctggtctcggactcctaaccttaagtaatccgcccacctcggcctcccaaagtgctgggattataggcatgagtcaccacatccagcctttttgtgatgtttttggatatctgatggacctatatttgaaaaagtgattttccaatttttccttgctcgttaggttttgtccctgtttagataataggtgtattacagtgtatcgtgtttccttggctwtcaaaacataatgaccaatttttgttttcaagtctaattatgatattaatattcctaaacaagcttatttttgttttatccttgtatcattctttatctttttcatctgccagtgaactgttgttttaggtgtgtctcttgtaagtgcacatctaaatttggactggatttttattttattgtttttctattcagcctgctggagcttgtcttttagctggagagtttagtccatttatatttattgtatttaaaattatattttgatttatttatataatctactttttgggggttttgtttgttccattctttggattctgttttctttcttggcttctttttgatgacgactttaaaaaaaatgtctcttgttcttattttatgtccccttcccattcctccctccactatgttggaaattttatactctatttctattgtttcagtgcttgctatagaaatttcaacttggagacattccttcaggtgtccttcatctttggcaacatttagtgttgtcagtgttttggattttagccattctaataggcacatagtagtatctcatagtttcagtttgcagttccctcatgacatataatattgagcatcttttcatgctattatttgctatctgtgtttcttttttattgagatgtctcttcaaatcttttgttaatttttcaattgggtggtttgtttcctggttgagttttaagagctctgtgtattttggatacaagttctttcttaggtatgggttttgtaaatattttctcccagtctagaacttatgtctttattctttttttttgagatggagtctcactcttgttgcccaggctggagtgcagtggcgcgagcttggctcactgcaacctccrcctcccgggttcaagtgatcctcctgcctcagcctcctgagtagctgggattatgggcacccgccaccacgcctggctaattttttttttttgtacttgtagtagagatggggttttgccatgttggccaggctggtctcgaacccctgacctcaggtgatctgcccacctcggcctcccaaagtgctgggattacaggcatcagccaccatgcccggctgtgtctttattcttttaagaatgttatttgggctgcagaaatttttattttaatgaagttaaatgtgccaatttttaatggtttgtgcttttggtgttatatgtaaaaactcattgmtaaaccaaagtcacctagatgttcttctattttttctctagaaattttatagttctgcaatgtatatttaggtctgagatccattttgagttaatttttgtgaaaggtataaggattgtggcaagattaattttcttgcataatgaatatccagttattccagtaccctttgtttggaaagactatctgcatttaattgccattgcttctttgtcatagttcagttgactgtatttgtgtgggtctacttctgggctcttgagtaatttgtctgtcttagacaataccatactgtcttgatgtctgtagctttatagtaagtcttgaagttgggtattgttagtcttttgaatttgttctttttcttcaatattgtgatgcctattctgggtcttttcctttccatataaactttagaatcagtttgtggatatctacaaaataaattgctaggactttgattttaattgtgttcaacctatagatcacgttgaggaggattgatatcttaacaatattgaatcttcctatccatgtacattgattatctctacatttagattttcatccatttctttcgtcrgagttttgtagttttcctcatagatacactgtatgtattttaagattcatgcctattttatttctttagtgctaatgtaaatgtcactattttaatttcaaattccagttgttcactgctggtatataggaatgtgataatcttttgtatattaatttgtattctgtaaccttactataattgcttatcagttccaagaattttgttgttattgctgatttttttggaattccttcatagacagtcatcttatccactagtgaagacagttctatttattcctttccagtctgtttactctttatttccttttcttaacatacttcataagctggaatctgcagtcagatgttgaataagagttgtaasaggggacattcttgtatttttcctgatttttgggagaaggcatccagtttcttgtcattaagtgtaatgttaactgtaggctttttgtgtatattctttatcaagtacaagaaatttctctttattcctagtttgctaaactcagtgattgttgatttttgttaaatgctttttctgcatctatttatatgatcataggatttttcttctttagcctgttaatgtgatggattacattaattgatttttggatgttgaatcagctttgcataccaggattaaatcccatttggtcatggtatataattctttttatatattattggattttttagtcattttaatatctaaaaacttaattttaaaatgtttgcttttttcttatttatctcatcatgtttatttttttctccaaatcattttacctgtttgtaatagctgtaacttataatagtatttgtaacaactgttttaagagtcttcatttctgggtttctttctgtcagctattttccttctgatatgaatcacattttgcrtctttacctatctcttaattgttgattggattctagacaytgtaaatgttacattgtgtgtttggattttgttacctttatttaaaaggtatagatgtttagtctggcaggtacattaattttgtttaggttaaggccttttaggctttaaaaaagttttcttagggcaagtctagcatagtcctttctcgtgttctgattaaacaagcttgtattatgctgtctctctacccgtcacacttcctgtcctttggttcataatttctatttcattatacgtctatggttttttcgtagtataatgtaaacccatgaaagatgtasgcaggagagagatataatagtatatataccttaagaaaatttcactgaccactatgtggcttggatgggggcaactgtagtagtggggagttctgctagtaggccagtacaagagtcctggactgctggtagtttgtgtaagtattatgattaagtattatgataactgagataaagaaaagtgaatagatttgatctttttaaataaagaatttataagagtttcatactatccagcagttgtgctcttacacatagatccaggaagctcatatacaaagttccagacaacaagtacaaaaatattcaaaggaccattgttatataaatagaacaggttacagtctgaatgttcattcacagtggaatggataatgctgcagtatgtttgtaggtgacatagattacagcagtaaaaataatgacttacagctgctcagattaactaatagatttacttagtaactcttactttgcatgttattctttaggcagtttcagccactgcagaaacaacaaagaagacaggcaaagatctttgtctttatgtttttttaatcattgtgcagtgaacaatgtagatattgactaaagcaagaatcattaaagttcatttttaataatgggtgaaaattgtttggatataggatcatcacagtttcaaagtatcaatctacagattatttgctaagaaaaaatggcatactttctgtgaggaaatttaatggatgccatcttaagtaatcaagctttatcagtttgggataaattgactttttattttacttttgatgcgatrgaagaactcgaggatacaatatcaactatgttgtatttaagatttgttaaacatcttgaatttaatgagtgaataatcaggtatattcaaattgtggaatattctatcaaacaaccaccctgggttcttcagaaatatcatggtcatgaagaactccccccgccatcagcacaaaacaacaaacacaaacccacactttcccttctggggaggctgagggggttcaaaaggcaagtgaactactttacattagaggagcacaaagaaacgaaacaaagcaatgcgtactatctatgtaattctcatgagcaactttcatctggggatttccttcctttctgtcctagttctttctcggagtggggtgtcttttctcttctgaggtcctattacccatatcagggcctattctatccatctagaggactgttcaacttcctgaaatatcttttgttttctttttaccttggacctttccttgaggaaacaaaggccttgtagttaattataggtgttttgcaattggttatttaaagaagatccccattccccatcacatctccttgattcatgagagatttytgattagtaccgctggattaggaataagacattttytaagaaatacttttcttttcccttctttttatttttcctttcccattagtatattctatgaaattttaattcaagaaattgtaggtgagaaaaccacataagattctttattatacagcgtaccactgttgcatcaatagggtgtcattttatcagcttttaagttaccaggttgtgctaccatgtgtggcttgggttttgcttgaaaagtaaggttatttattgtgtcttgagtaggtaaatgtgacattatcagttggtcaaaaaagataattctttttaacttggaatccataactaaatggaaaatctcctaagctcctagaatcttccttcattcatccccttatcttccacatccaaactgtcgctaactctagtctttgtctttctctctatctctgttgctagctggactgctgcaaaggcttcctcatcagctccttgtttctacctttgccctttcaccattcattcattgcacagcagccaaagtgatcttttaaaatgctgtattaggtacttccctttcctgtatcacaccttccaacttgttccttctgtctggactcatcccccctcactgattttcagagtgctcgctctatcttgtcattaggttctcagtttaaatactagttttctcagagaagcattttcaaggagcagtaaccctgtcactctcagttacatttattccctccgtgttatagcagtcatcactatcttacattgtgtataagacatacatgcacttatttatttatattaatatgtgtatatacataaagaaatactgcagccttgacctcctgggcccaagctgtccccccagctcagcctcccaagtagccgggattagaggtgtgagccactccacccgactcagacatatatttagatgcatgtatgtttgtatatcattgtctgctagatagcagggagttttctgaatcgttggcctttgtagcctgcagagagccagataaggcttatagtgtatattcagtaaacattttttaaactgatgaatacaaatttgatagtagagttagaaagaaggctgcttgctttgtggtagaaagtaagacgcactggtagctgggaggtgagggacccagagaagatgtcctgtcctgcacttaaacctgcccttgaaaactgagtccagaaaagtagcaatggaaactttgtagtactttgctaacctaagtttctgtattttcttcgtatattttgtcatatagtattagtagatttcttttcggaagcattagtgcctcttttattgtgcagaagagaataaggagtggagactgtctctgtgttggaggttcagtgtcagtaggggagtcacttctgtgtctggggtgaggtaaggtagtagcagtaagcatcccatgagaggacctggaaggtgaggaaaaacttgggaagggcactagagcctgatttttttttttttttttaaagcagtctcttctactaggactttcacctccttttacgagtagaatttgtattttgttatgctctgtgtattagtccattctcacactgctaataaatacatacctgagactgggtagtgtataaagaaaaagaggtttaatgggctcacagttacacatggctggggaggcctcacgatcatggtggacggtgaattaagagcaaagtcatgtcttaacatggcaccaggcaagaagagaatgagtgccagcaggggaaataccagacacttacgaaaccatcagatctcatgagaactcactcactatcacraggacagtgtggggaaaaccgccctcatgattcagtcacctcccgccaggtccctcccacagcacatggggattattacatttcaagatgagatttgggtggggacacagagccaacgcttatcattctgtttcaaacatatgtcagctgaagaatacaaaattaaacaaatacagtatagacaagagtcaagcacagaagtaagtgctccagtggatgagaaaatgtgagagaacattagtggaaatttcatgtccagatgaggtgaggggtaacaagtaccatcaacttgatcatttctgatttttccaggaatgccaacttttgactaaatatttttttccttccacttcccatttacttatcttaattagagtggcagggacacaagaaagtagggatgagggactgaactgttggatattatttaacattatctgtgtggattattcttttccctcctcttcagatttctaagtattgtttctccatggtgtggtgacagcatatgtactgcctgaaatcgatttggcataagaagttgagtagaaaaccttactgttacattatttcagaatatagctcaatggttaaattaagagttagtatcagccaggttcagtggcttatgcctrtaatcccagcactttgggaggccaaagcgggaggattgcttaaggccaggagttccagaccaatgtgggcaatataatgagacccccatctttaaaaaaaaaaaaaagaaaattagctgggtgtgttggggtgcacctgttgtcccagttactgaggaggctgaggtgggaggattgcttgagtctaagaggtcaaggctgcagtgagccaagatcacactctgcactctagcctgggtgacagagcgagaccaaaaacaaaaaagctagtctaacttgcatcagtttcttccttcctcccaacatttttcygtttggcttgtgagattttggtcagggaatcttgccttcctgggttacatgtattcacaggtctaatgctgtgatgccagcagcactgggagaccacaatgccttattatatattgtcctattctctaatgacttcccaccttttctgagcatctgataattttttgttgataaattgttttatgtatcttgtttccccagcttgttccttgtgagcaagaatgatttccatgtcatattttgaaattcacaaatcactgtatagtccagggtccttagtaaatgactaaaatgcgattagtactggaaccagaaaaactgcaaatttcctaatcgtcagagggaactgaatgtagtggagatgtgggctgtctctcagctcttgtggcttcctgttacatggataaatggtttgtgatgatgcattgataaaatatttttttgagaggatgggggtaaggatctattaagttgttgtaaacagggttttgcaggtataccagtttcaaatttttagattgcgctttttcactcccgtaaaacaggctaattcttctctactgatttcattctgattattttatgcttgttattgtgaatgagacaaataccattcttgccattctcatgcaggattaaaactcgtgcataatctcttgcagaatcaagaatcaaagcatgcacaatcttctatgctttgtccccatctatgttttctattgtgttttcccctaccatcctgcagataactctgtacttcaactgaattgtttcagtcattccttaaacttgtcctataatctccacctctgttttccccactattcctgcctgaaatgttcaagtcctgctcattcttcatagcatcatttaaatagccctttcttttttttcttctttggaaacggagtcttgcgctggagtgcagtggcgtaatcttggctcactgcaatctccgcctcccaggttcaagcgattctcttgcctcagcctctgagtagctgggactacagacgcacaccaccacacccagctaagttttgtatttttagtagagacggagtttcaccatgttggccaggatggtcttaatctcctgacctcgtaattcgcccacctcagcctcccaaagtgctgggattacagacatgagccactgtgcccagcctaaatggcccttctgataatacacttttcttaattatttttctctctacctccctgtgatcctttctgttttgaattgccagtgatagaactatttgggtcctttgcttttctcttcttggatttgaaggctcccagtgtaagagcatgttctttatctgtcttctcagtgcactgagcattgtttcaaaaataccagcccatataaacatcatgaacagaaaaaaattttaattgaattaattataaaacgcttaggaagcaggtgccattttaactaagttgaagttaaagagtgatgttttgtggtttggggttcaaaaggtctatgacatttggccttctcttcccttttcctctaaggatcctatagcttgagttgagtgccagtagagcattacaggccaggaaggatcctgtaagggctcactgagctcttttttcttcagaaaagatcataaacaaatggtcccaaacataggagtatctctaccttgtttttagaaaacatctaaagaaggagacttgtacacttttcttgataaatcgttgtaaatgactcttgctgtcagaagttttactgtataataactaaatacttaatcatgtaactgatgacaattttatgagtttaaaactttagctggaagtgtgctttgttttgaccttactttgtattttcataacaccctgttaatgtacggaacagtggaatagcttctccattgataccagtgagccctggagcttctgctccagcccatagcatcgtagccaggtttggattttccccaataccatcatgtcacttcttgctaataaaagctgtaggggttgtctgtgactcttcagatgaaaataccttaagtacctgaaaatcaccatttttgaaaaaagggaatttgttatgcatgcaaacctcagttttggagatgtttcctggtgctattataagttgtttcttatatctttgattacttaatactgtacttctgtttttggaatccactgttaatttatgtgtgttttcttagcttttattactggggaaagtgttatgtttattggtacaagtaccctttttttcttttaaaatggtcacactctcattttttaaatacatcattacactggtgttactttcctggtgttattttcctgactctaaagaaaggaacttttaaataaattaattattgttttctgcgttattgaacatgtggtcaattgtcatgttcatacatcccaatgatcaaagtctgaacttctgtctaattcttccctgctgttaggctaccctgtcatgatcaaggcctcagcaggtggtggtgggaaaggcatgcgcattgcttgggatgatgaagagaccaggtgagaggctgtccaaaatatacttttgatgaaaattgcagttaccagagttttattaaactgacaggtaaacagataccaaaagcataatggagtaattacagtaaccatctaatttttacacttttgaatgggaaaaagattgaaattatgtggaaaccttccttatttatattttgatgatgattatcttattatagaaagggttttactgttttaaacattaacaaaggattttctttttgtttttaccgtatatttttaaaaattacagtcaggattctattttctgggcataaattactaacatttggctatataattctaaatgtcatctaaagatttaaatcaactatatttaaaagcagttataatttcattgagacttaatgtattacctcaatatgtagttgctttcctttgctagtgcataaaagtagtgaattactttgataattttagagtgtgaaatatattctttttccttgagtttgaaattactgtgtcctttatatggaatgcgctcttattataatttagaatactttttatggcccaatctcagaagttacacaggtttccctccagtgaacacagcttctgctcaaattcaaggggaggggactgagtcttcacttcttcatgagagcgtgggcaagattcttagaagagcacgtggaatgggagataytgttgtggccatctttggaaaagacaatctgccacagcccgttttgtgggaaagaatggtatcataaagaagtcgaatacaacttaatggttttgcaagagatgtgtattttgtggacttcaatttttttctcattgtttttctgttttgcacagtacttacatagcaatttcactgaacgcttagcgcttatttttcattattcatcttaggatctcaggtttcttatcagtcatttctccagggctactgttagtaacttactcttttatggtgcggattactctttatagtttcttggaagtgaggtttgctgtgctgctgttgatttataaattttaatttacagcttaatattttgagaaatcactatatccattcatatattaggcatcattttgtaaataatttagccctttcttgccaagtaaatagcacattgattcaaaatatgtttataaaattaataaaaatacatgaataattttctacttaaaatattactctcttcagcttgataaataaaccrtctcagaaaacttgttgagatcaacacaggcgtgcctattagatttaataatacaagctcctcattttaagaagttgctctatgtcccttatttatttgggaaagtcaaaactacctaaaaagggaaagaacagtactgcaaacatgcctatgcttgtcttttggagccactaaccgtgaacaccataccacaacttatccaccccttcttttcctctctccctctcgaggaagtaattggtttttacataatccacaaagatttcatttttcaggtacaaaggaaaatttggtagcttaattactttattcctttatcctaaggggtgtctttttcttgtaacatctttcctatgttttttggggggaagtagcatctatgacttgtcttggaatctgtaggacatctgaaagattttttttwaaaatgtaatggttttttttttttttttttttttgagacagagtctctctctgtcgcccaggctggagtgaagtagcacgatcttggctcactgcaatatccgcctcctgggttcaagtgattctcctgcctcagcctcccgagtagctgggactacagctgcacgccaccacacccagctaatttttgtatttttartagagacggggtttcaccatgttggccaggatggtctcgatctcttgacatcatgatctgcctgcctcggcctcccaaagtgctgggattacaggcgtgcaccactgcgcccaacctttattatatagtaaatttgggtgagaattatgaagattgttgaaggttcacttagatattttcatagtaatctctggctytcttttccctattcaagtttaaatgaagcgtatggcatgattgggaaactgattgtgtctatatttttgaatatccccactaagacttttggcattgtgagtgcaatttctgttttatttttgtattcctagcatctaaaatatatccaggcacaaagttcagtaaatacttattgaatgaatgtataattgaatgtcaccaatgatattcataatagagtttcccatgagttctaaaataggttgttggcgatgctttcaaacttgctgcttattttattttggtgactttgactttttacttgtggtgttctgggtttaaatgcaaaatgaaagatctcaatcattatagtggaggcaaactgtaaagtgctatattttttctttctgttattatatccaatctaataaaaagttgattatatggtatcgaaaactaattcattttgcttccagtttctttgaagtttgcagcctcctaagattcccctaaatcaacaatgtaatggaggactttattcccctaaatcaacaatgtgatggaggactgagaaaacctaataccttttctctgagacctctgagaaatgagttttttgcaatgttttgaaatttgtcttctagtcagttttacctgcagtgttgtacaaaaacaagcaaattagttgtgtgtgtgtgtgtgtgtktwtttttttttttttgagatggagtctcgctctgttgtccaggctggagtgcagtggtgcgatctcggctcactgcaacctctgccttttgggttcaagcgattctcctgcctcagcctcccaagtagctgggactacaggcgcacactgccacgcctggctaattttttgtattttagtagagacagggtttcaccgtgttgcccaggctggtctctaactcctgagctcaggcaatccacccgcctcagcctcccaaagtgcttggattacaggtgtgagccactgcacttggccacaaattagttgtttccaatattactaggtggactgtaggattaaatgatattattttaaagttgtaataattaaaacgcatcttaagtgtaccaacctggattactatatgacaaggattatcattaaatttttctattagtagtctgtcatcgccaaaactagaagcagcttttgagatgaaaaaccatcctttaaaaaaaaaaaaaaggaagaacggtcagactaacaaaacaaatagagcaatagggctgacatcattaaagaaaacacaaaacaagcaaatcagatagttgttttttatattactagatggaccatttgcaacttaaaggactggaagaatttggtttcagtattgtacattaaatacagacatttagtcttcagattaagaaactttattaaatataaaaggaattaaagcacaaaaataagcaaattggatagttatttctaatattagtagatggaccatttgcctctkaaaggatcggaagaattggctttaatgttgtacattaaatacaggtatttaatcttcagattaagaaactttattaaatgtaaaggaattaaattttatatgctgattatatcaatggatagaaggcaatatatgctcaattacttttaggcaagcaagtttgggttttttttttaattgttttttcttttcttttttttttgagatggagtctcactctcacccaggctgtagtgcagtgacataatttctgcccaccgtagcctctgcttcccaggttcaagcggttctcctgcttcagtctcctgagtagctgggactacaggcatgggccaccacaaccagctaatttttgtatttttagtactgatgggatttcatcatgttggccaggctggtctcgaacttctgacctcagggaagccactgtgcccacccaagtttgcgttttgaaaagattggtcaaatgagccctaaatatttgaataataggcatattttaatagtaatgatttaaattagtttgtaaacaaaatatataaagcaataattaggtccatatttttattttaaaaaactatacttttataattactatttttgatcaattttatagaagataaaattgtaatgatctgtgtgggtgtatgtgggaggcaactgcatttcaagatgtggatttaaaatattaagcagtgttcttaagaatcttcctgttggatgttcaatctcaatgagtgtatttgctgtagttccactccagtcatgcaggtgactagaccctttacatttttctttgcatcttctgacttctgaatcaaacagatgtttttttatatttttgctagtggaattaaggtatattatggttgaagaaatggaattaattttacttgctctgtatggtttattaaaatatcatatttaggctgggcactgtggctcacacctgtaatcccagcactttgggaggctgaggcaggtggatcaccttaggtcaggagttcaagaccatcctggccaacgtgttgaaaccctgtctctaccaaaaatataaaaattagccgggcgtggtggcacacacctgtattcccagctactcgggaggctgaggtggaagattcacttgaaacccggcaggcagaggttgcagtgagctgagatcctgccactgcactccagcctgggcgacagagtgagactctgtctcaaaaaaaaaaaaagtgatacttagcagttggtaaagtatcggcattcctgtttcaatggaaaatctaggatctgagaagttaaataactcatccatggtcacagagttagtgagtggaaaagtcacaggtcaaccaaaattaacttagttatttgtatattgagtaaaggtttttgcttttttcagaataagccaaaataaatatttaatcgattgtgttttcttttataatgatagctctatttgttttgttagtctgactcttcttctccttcttccccttccccttcccctccctctccccccctcctccttcttccttctttttttcacagggatggttttagattgtcatctcaagaagctgcttctagttttggcgatgatagactactaatagaaaaatttattgataatcctcgtcatatagaaatccaggttggtacatttaagatgctttttcattattattttaaaataatatcatttaatcctattggaattatcttttcttccatttagaatgattgtgagttgtgcctttagaatctgttgtactttccgttaaagtgctaggatgttggttgggattgggaatgatacaaaaatctacctccaaaaaatgcattcctaagatagccgaccaggctaatctccttccaagactggaccattatagggcattttttaaaaaagaaaagtgcctgacctggactcctgtgctacttcagtttaccaaatgtccgtgtagcttgctgtgacaggtgttctgctaggagcttgttgtatagagatctgtaaatcatttcttctattcagtttaagatattcatccttaaagtggttacgtaggggcatagattttggcaaaacaaaatgggttttctaaaataaaacggggaagaagacaagtctgttgaagttttcatttgcctgttgaaaatgccttcatgctaattttatacattatgactatgaattgatatgtaatagctaaaattgataaaaacaaatgtcaaattagaaataatgaattttaagtatttttttaaatcttaatttggtgtggagagggaaccagataaataaaaggttatttgctgaccttatattttctgacaggggcatgatacaaaaagtcctagattctgtcagtttattccttaagtttaatggtcactttcatagatattatttatgggtggaaaatcatcatttcaatcctcaaattttctaaagtgagaaaaaatatccaaacttatataatcagttggatgttttacaacattgaacacagtttctttctgaggctagcaggctttgttttttgcctttttaaaaagattttctaaattgatatatcacatataatatctgtatatcatatatacggtatctgtatatcatatatacggtatctgtatatcatatatatggtatctgtatatcgtatatatatatatggtatctgtatatcgtatatatatggtatctgtatgtcatagatacagtatctgtatgtcatagatacggtatctgtatgtcatatatacggtatctgtatgtcatatatacggtatctgtatgtcatatatacggtatctgtatatcgtatatatacggtatctgtatatcgtatatatacggtatctgtatatcgtatatatacggtatctgtatatcgtatatatacggtatctgtatatcgtatatatacggtatctgtatatcgtatatatatggtatctgtatatcgtatatatatggtatctgtatatcgtatatatgtgatatctgtatatcatatatgtgatatctgtatctcatatatatgtgatatctgtatatcatatatatgtgatatctgtatctcatatatatgtatatatatatacagtgaaatccataaatcttaagtgtgcaattgaagacaatttctatacacacacatctaattgtgtaacaaccatccaggtctagatagagaatgtcccatcacaccacttcctagtcagtccctacctgtggccgccaaaagtaactgctgttcctatctgatgtcagagattagttcttaaattgcataaatgaaatccagtgatatagtctgtcacgtcttctttttcacacatcatcatatctttgagattcttccctgaggctctgttgtcctttgcttctaagaattgctctgtgatctcccattatttgactcacctgcagtttatccatattgttgttgatggatctttgggtttttagtttctttatattagaaataaattgctgtgtctttttatgaacatatatacatctctaggatagactgaggagaggtattgttggattacatagtaaggttatttttagttttagtgggtactctggttgtgctaatgtatactcccaccagaaatacatgagagtttccattgatgccacccctgccaacgtgtgatattttcaatttttgaaaacatttaaccatattagtggacttacgatggtatgtctgtttaatttgcatttcctggatgagtaatgatgttaagcatctgtttataagtttattgaccatttgaatggcttattttgtgaagtgacttctcaaactttcatccttgccttcctttttcaaattagatttttaaaaattactggagtgtccgagttctgtatcaattttgtttatgagtcctttgtcagatgtatgtatagtgtatccttctcccttcatgcggcttgcctgttcactttgataataatgtctttcaaagaacagaagttctgaattatagtgaagtcaagtttaagtctactttgtgtaccctagttaggagtttttttgttttaggtatgatatttaagtctgttactctcctttacttattattattttgtttgtttgatgtgaggcagggtcagagtaatttttaaaattctgatatccactttttccagcatcatttattgcagtgaccttttgttgcatattaagtgagacttcgtcattgtcttaactattttgcttttataataaatctagaaacctgattctgtaagtgatctaaatgtattgtttttctgcagatagttttcattctctttaggttctttgaatttccgtgaaaagtttagacttcacctgtcaacctgttccccctacggacacctacgcctacacccacccactcccacctctacctccactcccacacaccccatctgatgggagatttgtatttgggtcgtattgaatctagagattattctggggagaattgacatcttaacaatgttgaattttctttcttccctctctccctccctccttcgctccctccctccttctttctgacagaattttactctctctcccaggctagaattctggatattttgtgaaggtagaccagattttctaatagatggatgttatgtacaagaaaaaaaaaataaggtgattttagggttttggcctaagaaatgagaagaatggagtgggcttttactgagataggaaagactgtgagatgtgcttgtttttgagggaggaaatcaggttataaagttggataaatcaaggttgaaatgcccattagatatctaagtgtagatgttgagtagacagttggctatttaaatctgtaatttaagggagatatttagattgtccttcttgtaagatcgtaggggcagaattaattttgtccttcactgtattccccatctagcacttgttcacactactggaagaccacttaggtaggctgttttatctttaactagttgaatttcgtaacaggccatgaggtccttaagggtagagagtaggtcttactcatttgctgtccccagcaaccagaccattgtctttgacattactaatactcaataaatgtttgttattttgtgttaaataattacatacctagatcagctttttagtttattttatttagccatggcatacagcctgggtgayatttttaaacataagtgaaaatgcctcccagttaataggccacacagatgttctcatatctcatctatacttagaagggtttttaatttacttttctttagttttcacttatttatattaagtaatttatgcacatgataaagggtaattaataaaaagtaagcatcccttttactctattctaagtcctctagtttctgtccctaaatgcaggcaccgttactgtttcttggctattcctccatacatagtctaagaagtatatgtgtgtatgtcacctattatttttcacatgagccattatatactatgtcctttccacaatgaaactgcactggtagtgtgaatggcacctctctttgtggcataaaccagtatttctcaaccagggcactactggcatttcctgggttgggtctagggataccaacaggcttgcattatgtgacattgtctattataataaagctttttcaggaagcagtatagcttagagatttttctacattcagtacgtgtaaacctataaaatttttaaaaaactcatgatgcatttaaggattaacttcccttaaaagcagtatttatttataatgttttctgattacatggcttcctcatttatttaatggaataaataatcagcaaatcatttttgttgaatgcctagtaagtgcacagaatttttaaaaaatgaactgggagactatacagaatttagagaagaacaaactcttgattctgtatatgaatctgatattttatagttggaaatatttctgagaattcttggttattttggctttatttcttggagactgtctacttttactttcttgtcaactagaatttaaaaagaggttgagagttattttaatgatttcaaatatttttagatttacttcatgcagccacctttgagtcttagaaaattccagcttattggcattttattgctgttatgttttccttcattgcttggaatcattcttgagtttcagaaagggtttgttcctaaaaattaactttacagtcatatattaactatttattttacattttaccaattatagccatgatctttatttgatttttttcagaagccatatcaaatattaagattgatattatctgctatttataatgcacaaagaaacagaatgacttgttcagagaagttgcatagctgtttggaactaaaattagtgcctggtctttgggcttctaaaacagatcttacctctgtaaacctaatatatgtattcagaaatataaatcaacaccttaaatctgaaaatagattggtccgtttctgaaaatcagatgttctaggcaaaaactttaatgaagagctgcttttgagtttccagatttagctgaaaaagatacatgttaaatttgaatttcagattaacaatgattttttaaaatcactgttccatgtagtacttgggacatagctagaaaaaaattattcattgtttatctgaaatttaaatgtagctggatatcttgtattttatctggcaatctcagcttattttccattacaggttgaatgtatctcttaactgaaatgcttgggaccagaagtgtttcagatttcagatttttttgggttttggaatatttgcatttatacctgctggttgggtatccctaatctgaaaattcgaaatgctccagtgactgtttcctttgagcgtgatgtcaaaaaatttcagcttttggagcattttggatttcagattttctggttagagatgttcaatgggaaaaactattatgtttgtatattaactccagacctttagcagtttcctagaacaaaaataaaccacagtacagacatccatagatagataacagattacatattgggtggaaatgcatacaatgtcatttcccaatcaayagacatttaataatgttaacatcaagcagatgtttgtaataaagctgcggtggcactcctcagcaacattgacatccagtgtttatccccttcactaacactcagtgtccttcacaaaatttgtacaactgattctgatgttttactcgttgtatttgaaaggtgatatgaacactttttcctcaaatctttttgataaaaatrttttattgagctttggagtaataaatatagttttcctttgttaacatgaatcaaaataatgttttgagaggtatgtatatactatgaagtttgaatattaaaaaccaagagatgttgcatgcggaaaatattaaccatcatctactttgtgggtstggttatatggtttttcaaatggtattgctctttcaggttctaggtgataaacatgggaatgctttatggcttaatgaaagagagtgctcaattcagagaagaaatcagaaggtggtggaggaagcaccaaggtaagtctcctaagaaacrtttataaagcggctgcttttatgcatttcattcattcattcattcattcatcattcactgacgcatgcattcagagacagggtctcactctgttgcccaggcagtggtgcaatcacggctcactgcagcctccacctcccaggctcaagtgatcctcccaactcagcctcccacgtagccgggactacaggtgtgtgccaccatgcccagctaatttttgtgttttgtagagatggggttttgtcatgttgctcaggctggccttgaactcctgrcatcaaaagattagcccacctcagcctcccgaagtgctgggattataggtgtgggccactgctcccagccacatttctttttttatttgtttgctttatcagctacaattgcactaatgttcatgtagactctgttactgcatatttttataattaagaatttgttacttgatttcctcagtgctttaatgtgtaaaagggagagaatacttgaaaaagaagtgggtttttattagaggagaaagttgggtagacagccaactgtgacttctgcaggcttctaggaagtatggaacctgatggtacttcacgggatttctgagatatatgccttctagactttcatgttggtgaagggttcataaagttggtcctgaatttatcctaccatgaaaggcttctggagtgtggttcttggaaattccttgaattatcagagccactttgggtacttctccagggcatctttcatgagtttggtgtatggggcctyatttctcatttgatgctaggttgctatttgtatatactctggtattctctttgttcttaaaaatcctcaggtgagtgttcctagtaatttttaattaccagacggtaagaagtatagcttattgtagctttaatcagcagagctagcatatcttgatataatgcctatatagtttctgaaaatagtaagtgagaatgtgagtatatttttaatcccggagtaatggtaaaaattcaactctattttagttacattggtttttaaaaatatggcatggtgttattagttttaaaacatggaccccaaatcctttgccatttttctctttgagcagtgaggggaaggatcattgttcccttttcttgattctgtgctctgtgaaggcttgacccgtagactacttagaagtgatgctgtgccagtttccagcccaggccttgggaaactgccagcttccgcttcctgttctcatgggatgcttgtgcttacacaccagccagtatgctgtgaagaactgtgtagcttacataagatgtggccatctagttctcaaggcccaggaacaggatgtaagaagggaggaagaagaaaagccaaagggaatcctcttcctgtgtctttaggaagatcctggaaggtgctgaagctaawtacttggtgttgatctgaagttagacacttagctagggagacttgttagtatctttttcttaagaaaccatgtgctgagctagaactagtactgtagtactgtagtatggaggaaggggaaaaaggatacctgtggaacagtaagagtcttcaacacacatgtcttgcaattttctgtttccttgactgattatcaattccaattcaattaacactctgtttttagtaaaaacctactcaagtgttacctgggatagaaatctttcccagactgggaaccttgaatcataaaatgtgtttgttttttctctttgtctagaaatacaaacttttcataatgaataccttatctacttatttagagaaaaaaaggaaaatatacagcagtaggaatcaaaatgaaaaagctagaactcatcattaatactgacctgatatgtatttgtacactgtgaaatgttaaaataaatggaatgtgtagttttcagttcctggagtaagaatcggctgggcatggtggctcacacctgtaatcttagcactttgggaggctgaggtgggaggattgcttgagcctaagagtttgagaccagcctggacaacgtagtgggacctcatcttcacaaaaaagtaaaaaatcagctgactgtggtggcatatgcctatagttccagctacttgggaggctgaagtgggaggattgcttaaccccagaggtcgaggttgcagtgagccgacatcatgccaccagattccagcctgggtgacagagcaagaccctgttctcccccaccccccgaaaaataaaaataaaaaaaagaatctactaatgtgctttgagggcaatgctagctagggtcactcatatctctggatatctagcagggcttttgaaaagggcaagggcaagatcaaataggagaaagatagtttcacagagctgcactgagattctccagatgttatgctattaattgttagttggggttttttttagttgcattaattttgtcagccagttattgttgaaatgtcatctatgtctatacattaggttaatgcaaactatattatagataattcataacacttgaacccattgatttattgtaacttcaccaaaagggagacagtaggaagtacacttcccacctgtgaactcttccccctcccccaccccaatccaacttgaatatattcaaggctctgagtctaactagcaatctatatgaaatagaaatgtaatatgaatgttaaaagacaccgtggggttgcatgcagttgaaccaagaatgtgagaaataagacagtaaaatgaccagatccttggccagaaaatggggaaggggcattacagattaaaagagtcttaagatacaaaagccaatcaaatgcagttttggaccttatttggatcctgattcaaagaaatcagctgtataaagatatttatgagatagagaaatttgaataccaagtggatattaaatgcttttaaggagttcttgttttttgtgtagttgtgttacaaaagggtactttatctcatagaaacagacatgtatgtttttaaaagtgaaatgatacctaatttgggatttactttaaaaacaataaagggtgggcctggtagagaagtgggcaagtagcatagataaagccagagtggctatgtattaataattgctatatattggaggcagcttcatgcaagttttttatactattccataataaagcttttatagcatgtcatctcaatcctgctcatttgagaataattttaatccacaagtagaaaagtagttaatgttttgtttctcagagcctttctttcatagaagcaaaatctgtgaaaatgcaaagtggtttgatgatatttttttcagggtttgttgaagtcattttagcttaacttgcctgcttgaaggtgggtttggtatcttgaagccaaacgtgcaggatttagtggatgtattgctgattcttgttatttgtggcagttatgttctctaaagtcaccttgattactgaattagtgaacactgaataatttcccctaggggaaatacagggttaggttcctgcgagcctttgcttataacattttcctcagtggattaatacataattttgttttttgtgtatttctcatttaatatctgtggttgattcattaacagtgaactcacaatcctggccaacaagactataacacgtgcctgagtaaagcttatcccacacacattttctccagacagtacttcatggccttcttgcacatgggaaccccagacagcacctaaggacaatgcttgatgggccatttcacaccatgaaatgacacacacacacacacaaatgcaaaaaaagtgacactaaacagaccttgaaaaggatgcttgttatagtatgagcattgaaacgagaagggagagcatcaccttgttcagccttagcatactggagtctcaaatttttcacctctctgcacttgttcacaaaggaccatgaaagcgccttaagtattgattttggggttacaaataaatttcagcaagtaggcagmtttgtaaatatggactacatgagcaatgaggattgattgtgtatgttagatactartaagttatttttctcccagtttttggctcgaagcaattctgaatatatatgttaaatattagaagttgaagagtagttatatattttgtgaatggattgaagttgcagagtaatgtgaaaagttcaaatgttttatacaaatctaaagttgacttatttgagcatgttatgcttaataatatagtcaacatatattataaaacatatataaagcacaatattttgaattcttaaattggtatagatgatctatatctgagtaaactttaagaaaatgtttatgtaatgcacacaaaagataacttgatttttgtccgaaatgtagacaaacatttttttgtatatgtagcatttttttggatgcggagactcgaagagcgatgggagaacaagctgtagctcttgccagagcagtaaaatattcctctgctgggaccgtggagttccttgtggactctaagaagaatttttatttcttggaaatgaatacaagactccaggtaayaacaactgttatttattcctctccatgcctctgtactttacccttccttctccacccttttttgttttataaatgttaaaaaattaactccataaagtgttaaataaagatttagtttttatgcttgtgctaagacatctgttaggaatgacggatagtatccctctaaagttcaatgtctagacctctgctttgtcactgttaatactttatgttggaaataccactttgtttttttcttgaacctttctagatgaactgtatttgtcagtgtgtatgtgctgttaagaaaaattactctagatattacaaataggaagtgatacagtgattgcaaaatctttggaaggatggaggaaggaagggtacccagagtgaacttcggtggtgactcccactgctgtaccactcagccaggctcccagaggaaccggcacctctgccacagtgaggacgttgagaatcaagtggctgcccttggaactgttggctttgggggacataacttccttagttctaaccaaatctcaggaagcgactggcgttgtaaccggtggctttatttccttccttcttcccttttttctttcatttaaattgtgaactatacagaaacatacatagaacacaggtgaataattgaatgtattattataaagcaaaaatcaatgtaaacatcaactgggcctagaagtatttacaaaacagccagctctttttacactagcctcattttcttctccttctcaatgattctgattccccctccatcttccctagagctgtctcctatctgactgacttctcagaaccttcagttttcatatcattcttcctttgaattacgcatacctaagcagcattattacttttgtttgttttttaaaactatattaatgggatcgtatagtattcgttcttttgtgcctggcttcttttttcagcatggcatttgtgagatttgtgctatttcatggaactcctgtatgatacattttctaagaaaatgccactatttctttatctgttagatttctgtagatagtttatttccagttttatggaatttgtgttagtttgctaggactaccataacaaatgatcattaactatagcttaacacaacagaaatttgttctcgtacacttcaggaggccagagtctatcatgcaggttccagccgagtgggttccttcctgrggggttggagggagaatccactccatgcctctctcctggttctggtgttgccgacagtccttggtgttccttggctttggcagcataactctaatccctgcctcagttgtcatattgccttctctctgtgcatctctgtgcccagggttcccgttttctgtagggacactagtcacattggattcaggacccttcccatttagtacggcctcatcatacgtgatttcctctgccaagatcctgttttcaagtaaggtcacagtcacaggttgtgagtggatgtgaattttgacacgacactcttcagtccaattcaccattcaaaaaacacatatggcctacagagataaatagattagtacttgcctaggactggggtgggtgagtggggggattatgggctgatggctaaggggtggaataggacaggagagactgaggaaggcatacttatgcctgaaaacagtgtcaactcttcttccgttaggcccttgggggagggggtggggggggagggggtgttgagtcactgcaggcatgagctgggtcgagcttaagccttcctgcagtggttttctcacgtgcaccaagggrccgcttgtgggatttctgcatgcctgcttcatcctgagcttgagggcttgcctctgaccctgtgcttcatgggagccgtgtcttcatgcctgtgcctctttcccagagggagactcctgtgggccctggttagccctaccatgggtgcaggagggctgttttctgttcgctgtgccgtggcggtagaccgtccttgtgtccttgaactttgaggtgagttcagtagtggccctgctgctccccagccgtggggaagctgatgttctgggctccaggtggatttctgcctctttcctgatggttatcttttgcgtgctatggctttcttcatgcttttactctcgacctacctgtttgaagacagttcacgtgtgcctctgtaagcagtgtataatttttcagcccagtttgatatgtttgtcttgtatcttgaccatttgctccttagaaagttgacagaaatgctggtatttttgagtttaaatttctaatttttaaaaatgttttcttcttgtccaatctctggcctttttcctttttttttctttcttttgcagtatttatcatttaattttttcctgtacaagtttgggggttataaatactgctgatcttttggtagaacctctacattacaacacacatccttaatttatcaaaaactgataacagtgtcttttcacctgagctgccagactgacaagggagcttagaacatttaaagtccgtttactgtctcctgacttgggtacaattatcccccgaggccatttctcttattattttagtcatcattcattccattcctcccacatatttacctttctttgtctttgtttctggtagtttcttttagaggtttacttgggacaatctctttttgttgacagccaatgactttatgttgccttgttcatgaaatgcgtttttactcttcttagacgtcttggctgtgggccgtggctcacccctgtaatcccagtgctttgggaggctgaggtgggaggatcccttgagcccaggagttcaagatcagtctgggtaacatagtgagaacttgtctgtaccaaaaaaaaaaaaaaaaaaaaaaaaaaaaaaattagaaatcttagtttggccagtatttttttcaatttattgaaaatattatttcactgtttctggtgagacttccccactcattctgcattctgcttatttggacataattgatttttccttttggtagcatttattaatttctgtttttgttagatttcctttaactttttgctgattcgtgtacatgtatacatggaattcattgaatattttgtctgtagattaatgtcttttaattttttttggaaattctccaccattattacttctggaacaatctcacatacacagatgaataaacctataactttcattttagacctccttaatatatctcttatgtttcttatgctctctttgatatttttcatcttttttggataatttcttctgtctttcttaccttcccttatgctgtatttaattaattaatcacccattgagttcctgatttcaattgtttatatttcagttctgaaatttctatttggttcttttaaaagtatgattcattggtttttatcttttcttgtctcctatttgaattttcaattttgacttttattttttgaacataattaacttatttgttttgtagtacatgtctgataatgttgacatgtgaagtcttatgactacttgtattaactgctttttatgctgtttcttggttctgctgttgagttcctgttgggccttgttattatactgtcatatacagttattttaaaaattgttattaatcaaaacctaagatgatggattctttcttatagagatttttcaaatttttttctgccacatgcctatggacagtagtatttgtgactacggcaatctaagctcaaagtgtaaggctccttgaactcctgaggggatacacagcccggttgcagttctagagaatggttggttttattccagttcagtcttatcttgaggttgcattcctttatggtgcccactaaaagtgggggtagtttatcaaggttctttgataaactgatactttggtggcctcttatcttcgtggttatgcttttgatttgttgatgccaccaaaagtatagcttatattcatagtccttttttcctggaatggcaaatgacgttagggcaaaaatggtgttgagtgttgggtttgcaaatctgtgttttcatcttggttttggctgatcccttcctatattcttaccctgtgatgtttttaagaagacctcccccatctcccattccccaccagttgttttctagtccccaataagcccaagttccaagctgagtggctttagaggtacattatgcctatagattaaataagtttgtgtcctgactctcaacaccccccaaaagcagtgagcgggcagtggaatgacagtctgtgcctcactgctatctcacttttcctttccaaatctcatgcatttgcacatccagaacctcatgcagtcacatggaaacctcagctgtaagggagtctgggaataggctttttaaccatctgtattctgcagtgtaagagtataccctagaaggagtttggagggaaagttcagtgccagcccaccattttcacatgaatataatcaccaaaattttaatctgtaagttatatgtaaaaagttaaaaacattgctgtattttcattgtaaagtataactgtcaaataatgtggctgattttccttaagtatggcaaaagtgatctatctagatgcattttgagactagtattgtaaatacttgtagcattttataggtagtagctcagtagttgttgcttaaaactcatacttcctttgaaatcacctttgtagcctatattttattttgtgactatctttagaagtgacagaattttgccttttgaaggttaatttgattttgattaaaatgtatctttataactaagtatgtctaattagataattagctgggaaatcatgtttttggttaaagtgaagactttattttgtcataatgagaaaaatagcttgtaatttgattctgaagacaatttgagacgactgcaaaatatttgtattctattctagaccaaagagatctgagattttttaattgaggtacttatcagtatttatggaattgacaaatgggcagtttgttattctgttcttgtgttatctttttttccatttgtttctggctcatttatctcaggttataagtttgttcaagtttgtaccatggttgtttctggtataaaacccgatagttgatttttttttttttttttaaacagagtctcactctgtcaccaggctggggtgcagtggcgtgatctcggcctgcaaacctccgcctcccgggttcaggcaattctcctgccttagcctccagagtagttgggactataggtgcgtgccactacgcccagctaatttttgtatttttagtagagacagggtttcaccacgttgaccaggatggtctcagtttcttgaccttgtgatccacctgcctgggcctaccaaagtgctggtattacaggcgtgagcctccgtgcccatcctgtagttgatatttttatcgaataattctatgcagttggtcaagactatctaagtacctatgttttgtgtattggatagcttgctaggaaattatgttctataccctcaaaaaattataaaaatatttcaagaaaaaaaatcaaattcacaaagattttgtcatattaccagatctaatatgacaaaaattgtgaatcattaactcataatgatatgaatcaatgctatagaatgtcatgtccaygttcggcctgaaattgccccacttctcaccggtggtctgggccccacactgtgagaaaatatttcactaatacctgcgcttagcaaacgtcccaaggtctctgactgattagagctcttgttcacgaacagagctctgatagtacctaatgctgttaagcgtgctattttaatagcattctatgatatttaacatcatactttgagacatttgtctcccatgtagtgtttaatcatatttttctctcttgtggtttacttccagtgactgtgatcctgtcagttaccagaataagttaattttaattttttagaatgtatctgtgtgatagggggtatttgatgtggaggatataattaaatgggagcatgaacaaagaattttggacttcatatgtgttcagaaaactattcttacatattccaaagatttctttctgatattgtttaaacaatccaatttgtttttttttgagacggagtcttgctctgtcaccaggctggagtgtagtggcacgatcttggctcactgcagcctccacctcccagattcaaacaattctcctgcctcagcctccggagtagctgggactacaggcgcataccaccacgcctagctaatttttgtttttttagtagagatggggttttaccatgttggccaggatggtctcgatctcttgacctcatgatccacctgcatcgacctcccaaagtgctgggattacaggcatgagccaccgcgcctggcccaagtgttcttttaatagtagacattctctttcaaatttctttactaaccttaaattataatacttaaggcacattcaccaaattctttatctcccaagatatatgttatctctaattagtgtttcagtttgaactagagggctataattttctttgttctttttttattttctttgaaatttcctgattgaactttcactttttccagcttcagaactgtgttttgtttttgtttttgtttttttttttttggtaacagaaatgcatcttcactttctacattttcttaagagtgaaatttgaaataacaatacagtttctccataaagagatgcaacactaagaaagtcaccgcgtttggtgcattaatagttggttccgttgactggttttgttctcartctggtcacagtttatgtaactgaattacctttgctatcttcacatatttttgctttattttttttaagtcactggttttctgttgcttaaagataaaatttaaatgcttttgcatcacaacacaagctttttttttttgtagccctgatttttcccccagagtcctgtttcttgccagtgccgatctctgtgtatgaattgcaagagactcctttctttttcctgaaggtgcctttcagtttgacttctttgtgccttgtatcatgccactcccattgcttggaatgttctctgttcacctctcacagtgaacactgagctatgtatctacctgcacacccacaccacacacacctgtctcccctctctgaccatacttctccctcatctcacctctctccacatttgaaagatggacagctagatggagaactactctacggacactaggattttgttaaaatgctattttattgaagtgtattctagtagtcccccttatccatagttttcctttccaaagtttcagctacacacagggtctacttcatttcaaatatattaaatggaaaactttagaaataaacaattcataagtgttagattgtgcactatcctgagtagtgtgatgaaatctcacaccatcctgctccatcctgcctggtacgtggatcctctctttgtctggcatctccatgctgtagacactccctctccatgagtcacttagaagctacctcactgcaatgagacatgatggtgccactgcactccagcctggacagagcgagaccctgtctctgaaaaacaaacaaacaaacaacaacaacaagaaaaaacagaaggaaaaaaaaatccgcctcggtgatcacatcgactgtatgatacctcagtgcttatgttcaagtcacctctactttatttcataatggccccagcatacaagagtagtgttgctggcaattcacatatgccagagagaagccataaagtgcttcctttaagtgaaaaggtgaaagttctagacttaataaggaaagaaaagagtcatgtgctgaggttgctaagctctgcggtaaggatgaatcttccgtcggtggcattgtgaagaaggaaaagaaatttgtgctacttttgctgtcaaaagtcaaacttcaaaagttatggccacagtgcatgataagtgcttaagatggaaaagacattaaatgtgtgtgtataagacatgaatagaaaagtgttctaattgacagcaatcatgttctatactatccacagtttcaggcatttgctggggacctaggaacatgtcccccaaggataaggggggactactatatatgcaatttgctgggataattttagtttcttattttgttgaatggtaatactcagaatttataatactttgtttaaaaaaatctagtggttcataagagtctacaatggaaaagttactctccataccacacttttatcacagccatttatttttcctctgttgaagcaacctttgttttttttaacatactaatttgggagtattccatgcctaatttaaagcattatctttttcattttaatgacttctaataacctgtcatagggatgtaacagtcatataatttcaccagatctctatcgataatttttccagtattttgctatcccaaataatgcaattatgagtgaccctttatatccactttgcacgtgcagaagtagaattgctgggaatatatgtgcttttataaattagttaagtattatcagtttacctcttaaatgagagcttgtttcttctctccctggccaaaagtgttttttgccttttgatctttgtgygatagtgaaaaatggtatattgttttcattgtttatcatgaatttttctttatagattcatttatatttctgtgaattgactattagatcctttgccctttgggttttcttattgatgtgtaggtatttgcttattgttgggggaaattagccctttgtgatattgtcagaaaggaggggctttgtgaatattttcatagggctacagggcaggtgctttctgagcaaagaccctggcagttgtgagaggtgacagcgtgctggcagtcctcagagccctcgctcgctytcggcgcctcctctgcctgggctccaactttggcggcacttgaggagccttcagcccaccgctgcactgtgggagcccctttctgggctggccaaggccagagccggctctctcagcttgcagggaggtgtggagggagaggcgcaagctggaactggggctgcgctcggcacttgcgggccagctggagttccrggtgggcgtgggcttggcgggccccacactcagagcagccgggcaatgaggggcttagcacccgggccagcggctgtggaggttgtactgggtcccccagcagtgccagcccaccgtgctgcactatggcttggccccaatattttctctctgatggggaaaaatggccacctgagggaagtacaaattacaatactatcctgcagcttgaccttttctgtaagagggaaggcaaatggagtggaataccttatgtccaagctttcttttcattgagggagaatacacagctatgcaaagcttgcaatttacatcccacaggaggacctctcagctcacccccatatcctagcctccctatagctccccttcctatgaatgataatcctcctctaatctccccccgcccagaaggaaataagcaaagaaatctccaaaggaccacaaaaccctcctggctattggttatgtccccttcaagctgtagggggaggggaatttggcccaacccgggtacatgtccccttctccctctctgatttaaagcagatcaaggcmgacctggggaagttttcagatgatcctgataggtacatagatgtcctacaaggtctagggcaaaccttcgacctcgcttggagagaygtcatgctactgtgagatcaaaccttggcctttaatgtaaagaatgcggctttagctgcagcccaagagtttggagatacctggtatcttagtcaagtaaatgatagaatgacagccgaagaaagggacaaattccctaccggtcagcaacccatccccagtatggatccccactgggaccttgactcagatcatggggactggagtcataaacatctgttgacctgtattctagaaggactaaggagaattagaaaaaagcccatgaattattcaatgatgtccgccataactcagggaaaggaagaaaatccttctgccttcctcgagcggctacgggaggccttaagaaaatatactcccctgtcacccgaatcacttgagggtcaattgattctaaaagataagtttattacccagtcagccacagatatcaggagaaagctcgaaaagcaatccagggccctgaacaaaatctagaggcattattaaacctggcaacctcggtgttctataatagggaccaagaggaacaggcccaaaaggaaaagcgagatcagagaaaggccgcagccttagtcatggccctcagacaaacaaaccttggtggttcagagaggacagaaaatggagcaggccaatcacctggtagggcttgttatcagtgtggtttactaggacacttttaaaaagattgtccaatgagaaacaggctgccccctcgtccatgtccactatgccgaggcaatcactggaaggtgcactgccccagaggacgaagattccctgggtcagaagcccccaaccagatgatccaacaacaggactgagggtgcccggggcaagcgccagctcatgtcatcaccctcactgagccccgggtatgtttaactattgagggccaggaaattgacttcctcctggacactggcacggccttctcagtgttaatctcctgtcctggatgactgtcctcaggtcccttaccatccgaggaatcctgggacagcctgtaaccaggtatttctcccacctcctcagttgtaattggaagactttgctcttttcacatgcctttcttgttgtgcctgaaagtcccacacctttattagggagggatatattagccaaggctggagctattatctacatgaatatgagaaacaagttacccatttgttgtcccctacttgaggagggaatcaaccctgaagtctgggcattggaaggacaatttggaagggcaaaaaatgcctgcccagtccaaatcaggttaaaagatcccaccacttttccttatcaaaggcaatatcccttaaggcctgaagctcataaaggattacagaatattgttaaacatttgaaagctcaaggcttagtgaggaaatgcagcagtccctgcaacaccccaattctaggagtacaaaaactgaacggtcagtggagactagtggaagatcttagactcatcaatgaggcagtaattccactatatccagtkgtacccaacccctataccctgctctctcaagtaccagaggaagcagaatggttcacggttctggacctcaaggatgtcttcttctatatttccctgcactctgattcccagttcctctttgcctttgaggatcccacagaccacacatcccaacttaggtggacggtcttgcccaagggtttagggatagccctcatcggtttggtcaggccctagcccaagatctaggccacttctcaagtccaggcactctggtccttcaatatgtggatgatttacttttggctaccagttcagaagcctcgtgccagcaggctactctagatctcttgaactttctagctgatcaagggtacaaggtgtctaggtcgaaggccccagctttgcctacagcaggttaaatatctaggcctaatcttagccaaagggaccagggccctcatcaaggaacgaatacagcctatactggcttatccttgccctcagacattaaaacagttgtgggggttccttggaattactggctttggccgactatggatccccggatacagcgagatagccaggccactctgtacgctaatcaaggacacccagagggcaaatactctggtgggaatcagaggcagaaacagccttcaaaaccttaaagcaggccctagtacaagctccagctttaagccttcccacagtacaaagcttctctttatacgtcacagagagagccgggatagctcttggagtccttactcagactcgtgggacaaccccaccaccagtggcatacctaagtaaggaaattgatgtagtagcaaaaggctggcctcactgtttaagtgtagttgcagcagtggccgtcttagtgtcagagactatcaaaataatacaaggaaaggatctcactgtctggactactcatgatgtaaatggcatactaggtgccaaaggaagtttatggctatcagacagccacctacttagataccaggtgctcctccttgaaggacccatgtttcaaatacgcacgtgtgtggccctcaaccctgccacttttctcccagaggatggggaaccaattgaccatgactgccaacaaattatagtccagacttatgctgcccgagatgatctcgtagaagtccccttaactaatcctgaccttaacctatatactgatggaagttcatttgtggagaatgggatacgaagggcaggttacgccatagttagtgatgtaaccatacttgaaagcaagcctcttaccccagagaccagtgcccagttagtggaactagtgcatcaccctctcaccctccctctccccaccaccaaaagttgagaaggggcagatatgccagcaactcttctacaagctctaattttaatagtctgagctttcctttccagatgtgcatacccctctgcatgtgtgtgggggggaagcaggccattaactacgctgcctcatggggaagtggggtatgaggaacgggactaagatgttctgtgagtaaacaattgcactgatctatgattcagaaacctttttatttttaataaaattttctttttaattgtcagcaaggcaagttatttctatagaagggtgtgcccttacagatggagcaatggtgagcacacactcggacaagggaggggaaggggttcttatccctcacgcacatggcccctgctgctgtgttgttcccctgttggctagggttagaccgcagaggctaaactaaatccaattggctaatttaaagagaatgacggggtgagtgctttggcgggagtcagggcagagcaggtagcaggtgatcggartgagttagggtggagtaggtaattgaaaaaggttgctttacgaggaacttaagtttaaaagtagaaggcaacgaattgaacatattgacatattaattctttgaaacgaaatttagaactcatatctaacaacccctccccttgtatttccttacagctttcttttcaaacttttttttaatgtgtcttggcttagttgttttgcttgattttccaaaagaagaagcttctctggataaggtggaggatagttaagggaggagaaaccttttttttttttttaatgtcttggcaggattaacaaatactcgtatgaaaacataacagatatgatttgtaggtatttttccttatctattgcctttttaactttgtatgtgttttttcttcttgtatagaaagtttttatttgtatgcagtttaatttttaaatcttctctttgtgatttcaggagtgacatacttaggctttctgtgctctatgagcaatcaaactgttttctttcatgttttcatcaaatatttcatctttaatggtgaaatcttcacttcatttggaattcattttattttattttccaatggctacctgattgttccaacaattattgaataatcagtcttttctgtaataattcgaagtgctatctacattacatactgaaattgcagatgtatgcagacctattacttcactcttctttttttaatttttctgcttattcatctcctagcaccacactggtttaggtattatagctatatattatagtacagtatctagtagaactattcctttctcattacttttatttttcatatgaaaaattagcctatagattagcttattgtatttatatttaacagaagaaaaagaaattaaaatgacagaatctctggactattagataaatgtttataactttccacagatatattaattcctaaaatatgttctttttttcccttccagtgacatggaactaaaatatgttcttaataagaaaaatggttatgaaaaacatttatatttttgtcatcattttccttcatatttcaatctgaaagagtatattgtttctcttttacaaaagtaatggaaattggcatacttatatttaatcccgctgtctttacttcctaactcttcatgtttgctagttttattattagttctatgtgattgtagcatttcctttcttttctgtaggcatggctctcctggaggtttcatcttacttgtgtattttatcactttatggtcactgtcagcatcttaccatagcttcatgattagtgagttctttattttgatttgttttatataaagttagggggttttttttaatcaagaatttattttttagagatacctgtgggtagtgtatttgaattcttagatggattaaataaggttacccttatatttgaaattttaactcagatgcaaaccgtttgataccttcacaattgtaggactttaaacatctttctgtggtagaccttcagaattttatgagggagtatcaaaatttaagattatcgattgttttattcaattcctctatatatcttttctttttccctttaaaaattgaatctgtttgattaagaaagagatagacggagtttttatcataattttaaaaacgaactttatttgttagagcagttttgggtttatagaaaatctaagtacacagaattcccatatgcccctccctcatgccacaccatttctctacttaacatctcatattagtttggtgcatttgttacaactgatgagccgttatcgatgcattgtgggttttttgtttgtttgtttatttttagagagaggggtcttactccaccacccaggctggagtgcagtggtgagatcctagctcattgcagccttgaactcctgggctcaggcaatcctgccaccccagccgcccaggtagctgggactacaggcatgcatcaccacgcctggctaatttttgtattttttgtagagacgaggtttcaccatgttgcccaggctagtctctaactcttggggcctctgtctcctaaagtgctgggattatagccccgtgccagggcacccggcgatacattgtttttaactaaagtctgtagtttacactagggttgctctttgtgttacacattctatgagtttggacaagtgtatctaccattatggtatcataagaataggttcattgcctcagaaatctttgtatccaagacacctttgcatttctttccttctttccttgtttggttctttctgtctctcttctttcctttcctttttcccttcttttctttcccttcctccttccttcttttcctttttccctctgtgtgtctgtctcactttcttttcctcattgtaattttcacacatacagaagtacttcagaatagcaacagtagtagagtagagccctaggaatctgcaaccagcttcttatttacttcccagtgttgtttcacgtatgccttcttttcctcagttgttcctctcttggctggagtatcagacattatataaattcacatcatactgaagtatatgtctttaagttttccctacattcctaataatgcatatttttaaatatttatatacagtataatttgatgtatgtgggtttatgactcttgtacatgagttatgtggctattttcttgcctgaatgtttatcttgtttaaatgtttaatctgaaatcctactttgactcatgtcatactgtatctcctcctgttttgtctggtcctttattttaaagccttctttattagttgttttgtttttttagtttagaaaaaattatgtgtgtatgtgtatttgtatagatggggtctcaacatattgcccaggcttgtctagaactcttgggctcaagggatcctcctctcttggcctctgaaagtgctgggattataggagtaagctgctggcgcctagcctgaaaaaattttctaagaacctaatccaacattttcttttagtgtgaaaatttaattcttcccattttaaatacttgattttatttattttatcttatatttaaaaattttttttcttgttttccattttgtttttccttttctgtttgttgcttgaaataatggttaattatcccttttgtttcccattgataatttggaaatcctattgtcctttaaaattttatttatgtttatttttctattcagacagacgttttctctgtcatttgtaaagatgatgtaactagtttccttgactttccaacactgaagatttgctaagataatttaatacttctaagctatttttagtttatctcttcttttttagcttttttttagctcccatgtatacagcccagacacatctttcattatttgctatatcttcagctttcttttttgagatttctgccctagttcacttatttgtgtagcacattttttcatgaaatttcttcagtagaatgtgtggaatatatgctctgaaatgtcacatcctcaactatgtttctttagccctgaacgggggatactgttttgattgaatacaggattcttgattaggattgggtttcggttcttgtctttcaggagcatatgaatttcagctgtgttctagcttctagtattatgtctggtgtcattctgatttctttcccattgtagataatgtagtcttgctgtctgaaagtttgcccaattttttttatttctctctctctctttttttttcttgagacagggcctcatcctgtcacccaggctggagtgcagtggcatgaacctggttcactgcagccttgacctcctgtgctcaagcagtcctcctgcctcggcctcctgagtagctgggaccataggtgcatgctgccacgcctggctaatttttaaatttttttgtagagacgagatctcactttgttgcccagcctggtctcaaactccaggtcttaagtgatcctccagcttggcctcccaaagtgctgggattacaggcatgagccgttgtgtctggctctaattttcttttgatcattggaattcagggacttttttttccaaccaggatatgccttggtttgtgtttgtatacattaaccctgccttttagtccatgccctttttcagtgttcaggtttaagtattgcttcatttcagaggaagtttcttctgttatttaactatttccttccatcagcaattttctcctccttgtggaacttctagtttttgcaatttaggtctactggatatgtttctcttatgataactgtcattttatatttatgctgtgtctcttgacattatttctttattgatcttccaggttactaattcaggttgcaacagtggttatcctctcctataagtaactgactaaattgtgcaattgggaaatcacattattttagctcagaaattctaattgtgcgttacagttagccctccttacctactagttctgcatctgtggattcaattaactgtggcttaaaaatttaaaaataaaatgaaaatatcaattcaacaattaaaaaataccaataaaagcacaatatagtataacaacagtttacatagcatttacattgtattactataagtaatctagagatgatttaaagtatacggaaagggctgggtgttgtggctcatgcctgtaatcccagcacttttggaggctgaggcaggaggactgtttgagcccaggagatcagtgctgtgatgaaccatgatcatgccactgcactgaagctgggatgacagagcaagacccatttcttaaaaaaaagaaaagtgtacgggatgatatgcataggttacatgcaaataccatgttactttatatcggggacctgagcatctgtagagtttagtattcacaggggtcctgggaccaatcccctggggagatggaaggaggactcaggggatgtgtgtgcacatgcacrtatgtgcattgctacttcttaagtttttaagtgcctttactgctttttgggcaaagttgtatttttctcctgtccttcagcagctctgtttcacttggtctgtgtaatcattattctgaatgttttttctttcttgtgctagtaatccccctgctgtggttttttgggggttatcagtactaagttctgcttcttgaaatattctaagtgacagcagcccttcagatggttgaagacatgaccatatctactccagaggcctggaagagcatatgtctcctagcattctcatctcaaggacagaattgagctaatttttattgactacttggattcctgggcaaagagaccacggacccatctggagcctttattgacttttcccctgaggtccatggctctttgcaagccagtctgtctccatgatgtgttcctttcacattcttccctagagttctctgaagctagtctccagttttcgttcagccacagagggagaagagcctgttcccagtttttggctctcatcttctccctagatcttggtgcttcccatgtcctcagctgcttagtaactctgggggagatagacagcatggagtttggagtggagaggtgggagccaggctggttccaggctgtttttgacagcttctcagagcaggaatagctaacctgggttatctggatctctcatgagctttagggaagtctgtgaaccctctgaagtcagatatatagttttttagtgagaaattcagtgagattcaaaattgtaaaatgtttcagaacaactgcagctgactaatggaggactcatttaatcattgtttttgttaattgcaaacatctactgttttcactcagagcaagtaaattctagttctcttccttcttagctgtgtgaccataagcaagttccttaacttctgtatgttttgatttcctcattagtaaaatgacattaattatagcatttgctgtataggattgtcagcattaaatgagtttatatagtttacaaattcaaaatagtacctggtttatactgagcacacattctttctgctaactgtgagtatcttatccataacatttgcatgctgtttattatatattggttgacatttttactcttactgttgtcattattattaacattattgctattactattgtcattaatataaagcctgtctgacatctgaaaagatggcaagccacatattaaataataactttctctcattcttttgtcagttaactgcaaaattattgttacatgtgaacaaacatatttgaaatattaaccacttttaaagagatctcctttctgttataagggtgtttgtgtaagaagagtctgggaggaaaaatggaaactgaaatcttccaaaaatgaagctgatagagaaaagtatttactacatggcttaggcctttgtgttaagattaatattaggaccctgaatacacctttccaaattcgtgtgtgtgtgtgtgtgtgtgtgtgtgtgtgtctgtttgtgtgtgtgtaattaataatttccagatgctaggtttttttttagatttaagtgttttggaaaagcatcctctgtatagtctacaaagtctataggagttagaaaattcccaaatagagaggaataaaatcttaataagtaagtaattaaaaccccaaacatggtcagtcagctgtccatatctttgagaacagacaggtaaactgtcccacttttgttagacttagtcagttgcttatgttgattggtacagtgcaggaggaatctacttttaccatggaaggaaaggtacagtacaattgttgaaattctrtgaaggctatacactctaatctcatcagggggaattctgcatcacagggaacctttatattccagaaagrttttagaaatttttttgtaacttgattttgccctttgccatttgtttaaaaattaagaattattgcaacctaaattctggtttataacaattaactataattgaacaaataccatattctaatttcagactagttttggattaaaaaaaaatttctagacctgccagatgaaaatattttggtcttttatggaattggagtgtttgatagaaagaatgaggagaaattattgggaaaaggatttctaactaattgtaaaatttcattcttgtcagaaggggcattttggatgtgagcaaatgttgacctttttgattgtatttaaaatgatagaggccagggctctcaggctgtttagagtgagccagaattgggatgttttggcatgttttgttctgggaaactgaggatagaaggtaggatgtgttataccctcccttattatttactgaaccttagtagaaaatgaaggaaagaagtttttggtatacagatatgtatagataagcttttcaggcacttagatttggggttttgttttaaagcatattgtaaatgatattgctgtctgagttctggactctttttatctatgtttaactttttaaaactggtctttgtattagtttgctagggctgccataacaaagtatcatacactggggtggctgaaacaacaaaaatgtgttttctcaaagttctggaggctggaagtccaaaatccaggggccaacagggtcagtttcttttggaggcctttctcgttgcttgtgggtggccatccactccctgtgtcttcctgtggcctctcctctgtgccttgtgttgtctgggtcctgatcttctcttatgaggataccagtcatgctggattagggcccactctgatgatctcattttaacctgagcacttctttaaagaccatgtctccaaatacagtcacattctgaggtggtggggctaggacttcaacatacgaattttggggggtacacaattcagcccataacggtttccttatcatttcttcatgtgattattattcttggggtcaccaggggaaccctataatagaatctgttccgttttcgtggtcactcttttttttttccatgtatacatagcatataaaaattttaaacaacttactagaatatgactggttctaaaaatcctatctcccatccccccaaaatgaagacttgacaccggttagtctattctaaacattctgatttcagctccaaagtgaatttttaaggacaagttccagaaatgaattggcagtggtgatattaaatgcatatttagttttccaagatgagctggaaaactaaatttttagtttttagtgctgttggactatttaggaatagccagtrctcactttgatgtatagttctgatgttattggcaaaaataaacaaatcaaaagcacaaaacaggcaactgacaatgtcatgtctctgaagagcacatctgtatataatcctacacaggtatacgcaccttcatccatctattctaagcacgaagaatgtatcagagaaaaggggagaaaaattggtttctaagccctgcagtccaactcttttttttgtttttttctgaggtagagtctcactctgtcacccaggctgtcactcttgaatataaccattgtttccaaggtgagtttataggagtgatgtgttggggcttatttcccaacatgcttttcatccttgagtgctgtggatcaaaatctaataaccttagatctttattttgaaatcctgtattctcaggaggtagagcttcagaattttagtaggtacatgctagattctgttccgtgaacagaaagagcagaatctttctgaacagacagagcagaaccaaaaataatggcattgaccatcctttcaggctggaatagcaacaaactacaaagacagaggcctattatgccaaacacttatgaaactgaattttatgtaatgggacagtttcctyatatttcagtgggtaatcatactaaactactttgctaagttgaatccaacaagttctgcttacaaaagatagctttcgaaaaaacaagtctttgtaatacctgtcagtttagacaggatatattgaataaaaatgtcacttaaaattttgttaatttaaaagaacattattttgataacaaaaaatttcagcattctctcaccayaccatatcttgagagcaatctcctatgccttctctattaaatgacagtgatgtattgaagaagtttgtgcatgtgtggaaggattttgtaaatttcaaagtgccacactgatgttggttatacttaggtatggtgggccttacacttttaggggcagtttctgctttgactaagcaactgggccactacttaccagctgccaaataattagagctgcagatatagcactgttgaaggaattttaatacttctcatcagcctcctcctcataatggccaagttaacacacactgcgtctttctgacttctttttacatgttgtgacttttccccttttcccttaaaactgattttcctcagttttaattttcatttcaagtcaactcaggtatataattaaaatttccttgaatcttgctcaccttcaggatgacttgcctgttattcagttactgatcctgaaagttttagaaattattaggtaaatatcacagtaaaatatttaaaagtttaggtcagaggaaacatatcgcacaaactatctgctattgtataactatttttatttaacatagtgggaggattctgacaagaatgttggtcaagtcagatgtctttatttttaataatgttttataatatgaaaaacaagtctttctagggacactatttttatttttattaacttttttattttttatttttttgaggcagggtctcactcccatttcccagactggagtgcagtggctccatcttgcctcactgcagcctcgacttcctgggttcaggtgattctcccacctcagcctcccaattagcgggactacaggcatgcgtcaccatgcctggctgatttttttgtattttttttttttttaaatagagacaaagttttgccatgttgyccagtctgctctcaaactcctgggctcaagatatccacctgggtttttctcccagagttctgggattataggggtgagccaccgtaccctgacgtatttttcttaactttaaattttgaaatgatttcagactcacagaaaagttgtaaaaatattacaggtaatttctgaatacacttcactcatatttaccacatttactttatctttctatctatatctgtatttactggaagcatttcagagtaagttgcaggcctagtggccctttactcctaaatatgtctgtacttcctaaaaacaagtaaattttcttatgtaactatagcaccataatcaaaatcaggatttggacattaacatattactgtcttccaatttagggactatattcaaatttccccagttgcctcattaatgccttttgtggtaaaagaaaaaaaaatctggttcagcatcctgcattgcatttagttgttgtatctctttattctctctcaatctggaataatccttagttttttggtcagttgtgatcttaacattttttaagagcataaaccatttattttataaaatgtcactcattttaggtttgcctcttttctcatgtactagattcagtctttgcattctgggcaggaatagaaatgacactgtccatctatgagcaccatgttggtagcacgaagtgcctctttatcccattattggtggtgttggctttgttaaggaggtatctctggcgtttctacactgtagactttctattttccttttgtccttaataaagtatcttatagggagatactttgagactctataaatagccagcatactttcactcactagctttagcatacttcctagtttgtatttagtgaggaataggctgaagatgacaatggcagtgtcagagtttattattataatttttagaatcatgaggtaggtaacaacacagtgccaaggagatttagttttccctaagcttattctgctaccgaaatgagatacattaagcactcagagatgaagcacaacctaatttacctcacagttgcatttgacaagcttggttatattttgggaaataaatttgaagcaacagatgagtaagagggagtggtaagaggtattagacacgatgctaatagtgacagcttggtggtgattaagaatacaaaactaaaaatagcaagtagatctataaaaagctagccgattgttaccatctagcgtaggtgtatggagctaaacatatttattctagtccatgagggtgattatggcatgagatgttataaggcacgattatgtcctataatatggcatttgataattttttgtacctgtttgaacaaaagattcatggtgagctagggatataaccaatacaaataaatttatcaacaactgttagactctgcagtgtggcactcccttgagaaatttgtctttgaggattcaggtattataacttggtagggcttactccttttttgtgagtgtgaatttttttttttttttttgggttcgggcttactcttgctcactaaatcccaagatttatatattcacatgctaatacgttaacaatgcaaaacagtgctgtctggtggatccctgatttgtgtgctttttagaaagagcacattgctgttgggtaggaaaaacatatgaagccaggttctcaaatatttgtgtggtaaggatggagtaacaataagggaattccaytttgtattttgaatgtttttgaggcattgtttccaaaagtgtgttccatggacttggcaactcataaaggtactttgcaaaaggaggaggaagtgctgcgcaaggcccttctctaggagagtcacaggacatatgggcatcctaatgacaagagtctttcctaaacaatctgttgaactgagattaacccggtgtttcccaaatagaagtgacacagaaaccttttccccccacataatagccctcaaaacagatgcatattagcatcagacttctgtagttacatttttcttctaagtgggacaagatgaacttgttggtttaccagacaccaatttttgacttttttgtttttttatttttataaccttttgatcaagttaaccatcttttccctccctccctccctcccctccctccctccctccctcccctccctccctccctccctccctccctccctccctccctccctccttccttccttccttccttccttccttccttccttccttccttccttccttccttccttccttccttccgtccttccttccgtccttttgttcctttatataaccctgttctatcacttaagtattgagcttaacttgcagagagaaaccattgctaagcacttgggaatagggggatatttgtgattatttaagcaatgttgtgcttataagatttctggtaataacacagtctaaaggaaatgcttcatatcctgtggagtagctttggaatcctatgtatttagaaggatttctttcaaaaatgtttaaaattataagttttactttaaagaagttaatttcttttacctggaaaattgaagcaagttagactattttgtggacttatgcagtacttgtcaaaaggtaaatgttttttaaaatttctgttagtaaggattttacctttagcagcttgttattttagttatctgcttagttgcttctaatttgaattacttgtagctccctaatttagattgtaaaatgttatggctctgttatatgacttaagtttagaacacagtgggtccacttttggatcccattcaaagtggatctgatgtacttattttcctacacagttaaagatccctcttcaaaggtgaagcagagacacaataaatttggatcttgaaaccttcatagtaatatgctttttaaaagacatgtatacataattgtatagccattgcatatacttttatacatacatttctttcatatacattactgtcaggaagatcaggaagataatgtcatctctttagtgagataaattccaactccatcgtgaccacttaccatagatgtgactctgtatttgctgttcattcattcaatatgtatttatttgccttgtatatagtatgtacttatatgggcrctggtcatagaaagaggaaactgaatggttcacttaacttttgaaattgtcttttcacctatcagggatgtgtgaatagtattgatgtaaagcacttggcacgtggtaggttcacctcttttttttttcctgagatggaatatcgctctgtcgcccagactggagtacagtggtgcaatctcggctcactacagccttctcctgggttccagcaattctcatgcctcagcctcctgagtagctgggactacaggcatgtgccaccacacccggctaattgtttttatttttagtagagacagggtttcatcatgttgaccaggctggtctcaaactcctgacctgaagtgatttgcccgtcttggcctcccagagtgctgggattacaggcgtgaagcgccacacccatccaggttcacctcttgagtagagtgctgagatgctttctcacatgagattggtttctagtaataatagagggtttttttgctagttactttcttattgtatttatcttatagagtcttggttcttacaaaatcataatttgctttcaaaaatacatattttaaactacctaataagatctttatttagtgtcacatttacgaagggttgatgcttattttagtgatgatttgtcattaaaattatgtcaaaatgtcttaaaatgttgttgaaactgtaagcaaactcaacacgcacaaagctaattatgggtgccatctgtttatttttacaaagctttttttttaagactatggcattgtctgcttatgataagcttcaagattattataatgactaagtcctgtccttcaattagtgtagttgaagatgggaagataattcgtttgttcactgaccttttcctgtgtcagagtgtatgaaatatgacatgtcatgataaagaaactattgtgaagtgcatttagaagatacttaatttttatgagaaaaaaatgacatcaaagcagcagatgtggccaaagttttgtttaaattcttagaacttattcaaggttttagatgaacggtagacttttccagtgacttaagtggcttcattttaactcaaggttaagaatttctaagtgatcgaccaagtttatgttgacatgtatccctgtttgtgtacctatatgtcagcacatgtttttgtacatacatatctcatgtgttagtgcagaaggccaggtacatgcatgacagcatcagcccaagtagttatcagcaatctgctgagagagcagagcgatcgcactggctctgttttgcaattgtgcatgctaagcattacccaagtcagtgtggagggaaagcaacctgaaggatccatctgctcccttctgctacactgcctcgatgcaagattacactaatctggctgcttgtcaggacaggttagtgaaagcatgcaagtgggtgagacttagggtggactagtgctttggaaaatcataagctgcccctgtagatgccacgttaagtgcagcagaataggttgattatcggccacattgaagattgccgtgaaataaatatatagctttttggttaagaattagtttcaaaattaaaattcttaaatattgttggaccacagataaatcaaaattgagaaaaataatacagatagtttacaaatacttttaggccttagtttttcttatgatttgtgtattgtgtttattctttcattttattcccctagctcaagagttttttagtcaaatatgttcaaatgttacattcgattaacttcattttacccaaaaacttttgtgatttttcttgtttgtttctatttatttacccttttctacacctactgactggcagaccttggccttgcaggttgagcatcctgtcacagaatgcattactggcctggrcctagtccaggaaawgatccgtgttgctaaggkctaccctctcaggcacaaacaagctgatattcgcatcaacggctgggcagttgaatgtcrggtttatgctgaggtaaaatgaatggtgttgggaggaaggatggtggttatgtccagagtcatgagacctggtatagccaaacaatgaggtaaagttagggttttataatgttgccaactattggattacgtaatccataattaaatcagaaaaaaattagataattttgacctaattccagatagttttaaagaattgggcttagttaattgtcatgtatttgtagatggggaaatagctaccaatcctttaagaggcaacagagcattggttaaatactcttgagcttgaatggaccatggtttttgttttgtttgcattttctttgtttattttcaaacaacactaacaagaagtagcatttatttccatgggttttttaaaaaaatgcccaccttgggtacacattagttgttgatcagatatttacttaaaatttttcccaaccttttttttgtataattttctcctttattattacataaaaataacaatcaaaatttaaattgtaaagcttttagtaaaacatgtactcttaatttataattttaattttgggttttactcataaactctcagttcagtacttctaaatgctttttttcaaatgactaaaacaagaatgcaaggtaacatttgtactatttttacttttcgacatcaaaaatgtctgtcaagattaaaaataaatcagtgtctgtgtttaagaatactgagagctggtttgaaatatttttcaaggagttcaaaaatatgttttggcgtgactgtattgctcttgcttttttcatattttaagtagtattactttcattcttatgacactgaacctgtttattctgatgatctaagatatttacaaatgaagtgcatatctagtagcgtgcaaagttttttttttcaggtctttatttgaagaacccaaattctcaagttttaccatatgtgaactgttttgagaagtaagaamaacaaatatctttagtataccacatttgttgttctaaacttgagtatgttttgatgtagggcctaggttattttattttttgcccaaggcattctaagaagttttataaaatgttggaattttaccaatttcaataaagtatgaacaaggtcaggctaaattctgcttacagttctgtttgatttttaagtacattctaagttgtctagcgtaaaagacaataatattctgaaatctgtgatttggtaaataccatatgttgaaaatagacctataaatggttcttcattgtgtaaatatttaaccttacttgtgctgatttatatttcaaagactgtgcttcctttcctttgaactttcaggacccctacaagtcttttggtttaccatctattgggagattgtctcagtaccaagaacygttacatctacctggtgtaagtcattaagctgtaataccagctgaagggttaaaatcgtgatttatgtcatacttttatgttaaagcatgtcaacaccaaagggtgtaaattgaaggacaagtgaaattcatgggaatcatggtttttgtgttgaaaacaaatttttttcagtattttgtggtgttcaagaaagtcaggattcactggacaggggaagcctggggacatctgatgatataaatgatagcttacagtgttcccaattctttcgaaaattataataaaaaaggctgtgaatcctaagaatgagaaatgatgttttgtgttacaatttaatcttttcaataaatcgagtccaaccctgctatatagtcacttgtcaagaaattcaagcacaaaatcagctccttaattgaaatttaaggagattgaattaaggcaaacaaagtgtgcctcagtctattaaacctcatggactttaaagagtaataatatttatatcagttaaataaaagtgaccactgtccattttattccatagctcttctgtatttaatagctattttgaaaatagtttttgttgcagaaaaagagcaaggacataccctttttcttaatcaaggtaataagtgcatatatatatatatatatgacattatgttagctagtagatgacaaggctgtaccatctgtgaatattcaaattattcattttgattactggcatgaagatggtgaaagattacaggaagaattctaaatctgaagatattattggatatatgatttatttcactttttaaattgtttttgcccatgtgctttctaaagggacttgaccctttctgtgcttggagactccatgctgtgttcaaagccagaaggcagaaaaaaaattgtgaagatttaacaggcattatgtgacgttaaatagcacatgagaaaacaagtatcatagggacatatctaaacacttttttaatcaaacaaaagaagtattaaataagaattcataatgattactctagttgttagaagttttcaccatgttgtaatagctaacaggatgtcaaacattttgccctcgcaagtttttgcaatttgcaattttcaaacgtgagacctgttgaaagtacaagtgataatggacaaactataccccctacagtcttcatcccaccaaatctttcttcaattaatgctgcagcaggagttttatgtaataacatttgcagttgtgagccatccatagaaagaaaaaacaattaaaatgccttaaatgttctgcttactgctgttatttgcttgtgtgaatgttgcatgtcagctaaatggaccaaggagtagataaagtgattgggtgcaggagagtgcacactaagctttgtctatcattattgctgggagcaatcaaattgatgtcagcaggacagtagatgcgttgacagctgtaattatgtatctccatggtgatcacttttggcctgtcatggaggcccatgagtcccctcccttggaagcatttaatcagattgggctgtcacttgtcaggtagacatggcgggctgggagttgtgcttagggggagaggtgaattgagaatgaagggtgggagatgtctgatagtttcacagagtccactgtggtactgaagacagaaattttaattrtgctagaggtttctgagcagtggtttgagaatctcgtacagaggtgcttgggtgttttgttgtggttgttattgtttgtttttcttccttgtcttattaaaactagagcagtcagtttaccttagaaaacaatttttggctcttaccttttttggtcacaagaatgcatacttaagagttaacttatggtttgtacttttcacatgcttcattaagcctgagatttattaatatggcagaggtgaagatttccttttttatttttgatcatcatgttttgtaaatttgttattttcagaccacagttttgttctgctcagaaatttggttctgatttcatttgaattttttcttaaagtttttagtgcaaatttgtatagcctttcattgaaggaatggagacttgatctgacttcagattggttgttaagaaataaaaatatagctgattattacttggaaaaagcagcataaatagtaaattataaagcagagttttcatactgtggtacagtttttaattgggaatactgatttgcttatacaaagatacgtgtttatatatatcttgattttatcgtatgtattttaaagttaagatgacataacttctgtgatcataatattagtaaataacaaagacagttatatttaattaagatctgtaggtaacaccttataggatgatattattcaaggcaactgaagttttaagtaaggaactgtagaagaacataataaatattctttattgtctatgttattttatttgtgggttgaacatctaagttcttcctagctttgtagcagtttatgtagcaaatgataggatgtagttaaagtcagaagttttagaacttgtatcagtctcgtttgtaaacacagcattagcaagcatgctgtggttttaaagatgacatagtggtcaaattagctctttcactttttagtactaaaattaagaaaatgaaaactcacagatatattttctgttatgtaacccgtttactagttgccattttggggctctttaatgtggggaaaaggtagattgtgattttattgcttttaaagctgctccattaatttttttctagtttttgtcaacactgtgaatttcatagaacatcagtttatgtcctgaaatatgttttcagaaaatagaaagccaagtatatttcgtaagtgtgctgaatgatttttgtttataattaagatttttgtatatgaatgtgaatacgaatacagatatctatatttttgtttgtgcttgcaaatacagaaataaaagcccttcaggtatgttatagtgttccttttacaaccttacaaagagaataatagtagtgtgaattttaagaaaatgaaactatcgcttstcttctgatgtcaccgtataataaagccatcattataccctcatgtggatatcctagacaagaggttctacatgtggtcccttgataattgcctaaattaaaatattaaaggcctaacagccgctgtgttgacctttttctgccttgctgcagacagatgagctgctgtttattaggaaggcttcttcccacaggtggaaggctacgtgagcttccgctcttctcttcccacccctttacaatgttgggcatcaaagtcctgctgttccagcagctttgattcagttcctccatcctcaagacccctaggatgtgcctgacagtctgaagtattttgattagcttttaaatacttcagattccaaaacttctttctaataatttaataaatgttctgtcctcagtaactgctcatttttaaagttttgcatggctaacctccgtgccttgctgctggtatcaaactgggaaatgaaaacaagaatcagtgatgtactaactcactcgttggctggttaacagcaatcagcctcttcaaaagaatattttgaacttgtgctatccccctaccccccaccccaagaaaatcacaaaatcagaactctaattggggctttacaaagcaaagccataggaaaagctgtgtaaacatgaaagcctcaggggagcaacagtaacagaaaaatagtgttttacagttgagagggtgaggcagaaaaggaaagtgttacagacatgaaaggcccaggcccacattcctatggagctgaggaccaggcttgacgaggggcctcactggtgggctcagaagggtctggcagggagtgcagttagcaagggcatcgtccatgccatgcttcagctggaagacaccatcagagagccacagcatcctggcatagtgatgtaggaagtcttcattttttattttttatttttgctgttttttagtttcgtcattcagtggcagaacaaaaaatgtgttgcattacatattaacggatcaagattttagattgttttcctattttccagaagttgaaatgttatttgagattgaaattctctatccattttctccatggaaatgaaattggtggttacaaaaaaatatctacacaatatgaattacttttctttttttctttttttctcccaggtccgagtggacagtggcatccaaccaggaagtgatattagcatttattatgatcctatgatttcaaaagttagtttaatttctcaatggattatttgatttcttcgaaaaatcaatgatatttaaagagtctgaaactgggcctttatctgaatcataagctataattaaacaactaattatgcactgatgtaaatgtgaaagcagagcaggttttttctcttgagagaaaattcagcgttatgttagtttgtagtactcctcctccccaactaaatcatgccacaccatcacacacatgcatgaacaataataataataaacatctaaccagtggtgccagcctaactcattgccatgagaaggaattaaggttttttttggccattggcagaaattacctgagatggaagtatgaatgaatggcaagagttgggctgataggcagtgtttgttagagtactttttgatcttttctcttcagtttttacaaattaccaattatttaagtagatgtgatgtaagagtataagatttgttttgcccacctgtctttttgaagtttgactttccagaataaatgaattgaatttttggatctttaaacccttaaaaccgtataaagtgtaaaatgctgtaataattaagattgtggattttatttttattttattattatttttttgagatggagtctcgctctgtccgccagcctggagtgcagtggcacgatcttggctcactgcaacctccgcctcccaggttcaagcgattctcctgcctcagcctcctgagtagctgggtggctcgtgccaccaagcccagctaattttttttgtttttagtagagatggggtttcaccttgttagccaggatggtctccatctcctgacctcgtgatccgcccgcctcggcctcccaaagttctgggattacaggcgtgagccacaatggccggccagattgtggattttattttgaaaattctgtgttctctgaaatgatacatctgtattgaggaatgatttgtttttcaagccttgtttctcaagatggcttttccccaagtgtcctttttaatgttatagttgcagtaaacaaacacttttttatctgtctttcttcagttagggttttagtgcttttttttgggatagggtctccctttttcacccaggctggagtgcagtatcatgatcttggctcagtgcagccttgacctcccaggctcaagcgatccacctgccttagccacccaagtagctgggactacaggtgtgtactaccatgcagggctatttttttatatcttttgtagaaatggggcttcctcatgttacccaggctgatctcgaatacctgagctcaagcaatccacccgcctcggcctctcaaagtgctgggattacaaacgtgagccaccgtggttggcctaagttattagtagtattaaaataaaatttaggtcttttgtttattagagaaccaccatttaatttaaaaataaaactatgtaaaaatattatacgttgatttttaaatattccatttttagatgaatgtttttctcttcagaaaaatggcctacaaattaattttcaaatttgcttgatattgaagagctagtaaaacctactaaaataatcacaatctatagattggctaatataactgccagaaaaatctttaatgaatagttaaggtcttatttcattgccaaattatagagatacatataagtaggcactaaatcatgtagaatagtaagacttttctgtttttttgatttctgaaaaagtaccatttgcttctgtgtatattatatgtaaaactgcaaatgatttctaagatagtcgtcttctttctttatacttttatttttgaaactttactttttttgttagttatgaaagtgttaagggctggacgcagtggctcatatctgtaatcccagcactttgggaggctgaggtaggtggatcacctaaggtcaggagtgtgagaccagccaggccaacatggcaaaaccctgtctctactaaaaatacaaaaaaattagctgggcgtggtgacacacgcctgaaatcccagcttctcgagaggctgaggcgagaggatcgcttgaacctgtgaggcggaggttgcagtgagctgagattgcgccactgccctccagcctgggcaatagagcgagactccatctcaaaaataaaaaataaaaagaaaggaaagtgttagctattcagggtatcaaacttggaaaccacagaaaaatagggaaaaaatgtcttatctaatcctcaccactacccttggtgttcaaatcctatctcatatattcacgtttagctgtatctccttttaaattttttctgtacttacttttgttacgtttttgtttttgtaaaatcactctttactatgataatgaaatgtaggagaagagtctgaaatagcttgattctaatatttatatacttaaaaaatcataattgacatgtattgaaaactgaactatcataaaatttcgagatatatttagaaatctgttatgaaatattttaatttttactaaaatgaatcatttaacatarttctaaatatatatatatattgggttttttgtttgcttgtttttagctaatcacatatggctctgatagaactgaggcactgaagagaatggcagatgcactggataactatgttrttcgaggtaaaaacaaagatttgcactcgttggttattgtatatggtgtccagttccagagaacagcctgggggtttaccaatgagaatatggcacagcacatttgctcactatgtgcttaaagagaaataagaaaaactcaaatccatcaaaccaccataccaagtatagccgtttccactgttttaagcaaatgcatattttctctatatgcctaacatatatattactctatataaccagtacacattggttacacaggccttcaggagggcgtcttttttcttacagaagtaatattgctgtggagaggtctttagtgcgtatttgggacacacgttcagtttatgtgagtttatctatgtttatctatatatgcgagtttagatagacataaataagttacttgggaagattattcctggaagacattaaagtatttgtaagcacattctatggggattttctccctttttatctctgcatttttattgtggtaattgaaatactagattttggttaatttaatttttactctaatgtgcttgagcagtaaatccatgaatttgagagtctgaataagaatattttgtcaaaactcatttctgttaaactgtgatataatacgacataggggcatggcatctgggcagtttgtcaaaatattagattagttttggtcccaactagaagttatttatctactccatctggcttctgaaaggagtactcttttgtatttacatgaataccatttcatgttttayacttaaatgaacattttcccactaatttgcttactctatatatgtatatataggttcaccagttactacagtttttaagtgactaaaatacaaagtaggcttgccattattctcctaactttatatgtgtcacatataaaaaataaattttgttgtataggtagatttttccaggcttagtctgaaattttgcctttgaattactgtgatgtagtagacagaaaccagacaaagctaggttcatagcccctgtcctgacgccatttaataattatgtgatttttggccaagcacggtggctcacacccgtaatcctagcactttgggaggctgaggygggtggattgtgaggtcaggagttcaagaccagctgggcaaagatggtgaaacccagtctctactaaaaatacaaaaattagtcaggcgtggtggtgggcgtctgtaatccccgctacttgggaggctgaggcagaaaattgcttgaacccgggaggcttagtttgcagtgagccgagatcacgccactgcatgccagcctaggtgacagagtgagagtccgtctcaatgaaaaaaaaaatttttttttaaataaataattacgtgatttttgtcaaatgactttgtctctctgaatctcatactccacatttgaaaaatggagtgatagtctctgccttataaattactggtgaggattaactgaggttaagtatataaagggcttggcaccacactggcttatgttgttcaataactttagttgtcatcctttcttcctctttcctcacacttaataaaaccatatatttaagaatcaaggccaggcgtggtggctcacgcctgtaatcccagcactttgggaggctgaggagggcagatcacttgaggtcaggagctcaagaccagcctggccaacttggcagaaccccgtctctagtaaaaatacaaaaattagccaggcgtggtggtgggtgcccatagtcccagctactcaggaggctgaggcaggagaatcgcttgaacccaggaggtggaggttgcagtgagatgagatcgygccatcacactccagcctgggtgacagtgtaagactctgtctccaaaaaaataaaaataaaagccatgtgttataaatcacattatcaatccattagtcatatgaaatttactaaatcatagataaacaatattgaaagaccgttttatgtaatttctaatactgtgtgcggaggttatatgctttcattgcaccctgttcaaatacttctccagagaatttaccgtcactgtaaaattaaagtattaattgtgtaattamctgtgaaatgttgggttatcctataagattattaggcacatgaggacactgatgatctttatcttgtttgtatgcatattgctggtgcttagcagtgtctgacacatgctagatgattaataaatgtttgttggatgaatgaatgagtgagcaagtgatactatccctgatttcaaggagttactaatatacttggtgtgaaaacatatgaaaagataagtataatattaatatagctttgtaggtgccccaataggggattgaaaaagggtagtgggagtttaaggaagaggctagcatatctttcttttctcgcctctcttggtcctttgaaagtaactagtactgctttaggactcatagtgtctctgtgtctctgtcgagagtacctcactttgttctgctttcaaatgatcctcagagtggcaggatttttaaaaagactggtaatgtcctgtgtaggtgaaataaaggggatgggcacgctcaagcgtctttgcagtatcacttgttatagtattttgggaaaataatctggtgttagatgttaaaataaaagtgcataccctctgacccagctattcmtcttttgtgaatctttcctatagagttaaaaaactgaattatgagcatgttcaccatgacatttacaacaacattgtttgtagtagccaaaatgctgaccaaccacagtgtccgctaaatggatgaatgactgaataaattacaatgcattattactataaaatactatgcagctgtgacttaaagacctgtttgtatgaatcgttaaagtagaaaagcaatttgtagtcatgtgtagtacattctcatatcacttgaaccatcttctcatcctaaaatattttaaattgtgttggatgagcacagagaaaggtgtggacatctacatatcacaataatttttttaagctcaaaggatttatgagagaggggtttttcttgacacatttctcttagactttttaattttaggtattttcaaatctatagaaaagatgaatgaatagtactgtgcatgcctgtgtactcttcacctagattattatttaataaacttttttttgatatttgctttctctatttctccctttctttgccttttcctcttcctttctcacccttcctctttcctttcctccctccattctcttctctgtttttctcctgatccatttgaaagaaggttgcaaacatcatggcgcatcactcctgaatactttaccaggcttcttaaggggaagaccatgttcctgtaactggatttttcttgcctgctgcacagatagagtctatttattgagacagcgttattgcaatagagaaagagtttaataaacacagggctggctaaatgggagactgaagttttattactcaaataaatttctcccaaaatttggaggctagggtttttaaagaataatttggtgggcagggggccagggagtgaggaatgctgactggttggtttggggatgaaattataggtgcttgaggcagggtcttcttgctaccttcagttactgggtaagatcacagaactagttgagccagtttgctggtctggctgcatgactcctgagccttaatttctaatgttagttttacaaatgcagtctgttccccagacaaggagggggtttgttttgggaaggggctgttttcattgttttacagttaaagtataaattaaattcctcttatagttagcatggcctacacccaggaatgaacaggggcagcttggaggttaaaagcaagataaagttgrttaggtcggatttttctcagtgtcataatttttgcagtggccatttcattcctgcaaaaaagcacaataccatcattacacccaaggaaaattgacagcaacctaacagtttcatctcatgtattgtccatatttaagcttgtccctcggagtctttttttattgttttttaatcccatctgtggcccaaagttacacagtgtctttgattatgtctctttattatcttgccgtctttcatatttcatttcattaattttcaggagagtccacggtagttgatttgtagaatgtggcacattctagatagaaagtgttaacgttggttcactaaaggcacttgtgaagtgattccaagaatgagggttgtaggtgataatttgcactatcactcacagaactcgcagaaactctttgcttactattatcggtttattataaagggtacagcttgagagtaacccagtggaggagatgcacagggcaaggtgttaggaaggggtgcagagcatccatgccctctccaggtgcaccaccctccatcacttccgtgtgttcagcaacccacaagtcctctgatccttgtccttgggtttttatgaaggcctgactaggtaggcatgattgatcctatcaatctgccattagtgattaagtcattcttcagtccctctcccctttggagggtgggggtggggctgaaagttccaaccccttaatcacatggttggatcctctggccacctgctcccatcctmtaagagtcatctcattagcataaactcaggtatgattgaaaggagcttgttatgaataacagaagacattcctctctcaacagtcatttctatgatattcttgccaaaaatgtacaacctgagtataatcatgaggaaacatcagacaaaccaaattgaaagacagtctacaaaataaatggcttcttctcttcaaacatgtcaaggtcaggaaacacaaagaagagttgagcaacttatgtagatcaaaggaaactaaagacacatgacaactaaatgcaatgtgtgatcctggtttagatcctggaccagaagaaaaatgtttttcttttgtagtaagggtcataagtgggacaattggtgagatttgaataaggtctggagatgaggtgatagcaatgttagcagtgttaggcttgtctgattttgatccttgtactgtgattatagaagagatataccttgcttttaggagatgtacactgacatatttagaagtaaaatgacatcttgtctgcaacttaccttcatatgtttaagaaggaaaattatgtatctgtgtataaatagaaaaaattagtgacaaagcaaataaatgtgataagatgttatcatttgtagaacctccatatatagtaattctgcttactatttttttgaaatttttttaaattttgaattttgaaattatttcaaaataattttgaatttttttattttgaaataatttcaaaatttaaaaaatttaaaatttaatttcaaaataaaaagttaaaaaaatagggaagagcaagaacccccactctccactaatatttaaagaataaaagcagagatgcatttgggattttgaacttacatattactcatctggctaattctgaaggataggcaggtttaaaaacttgctttatgaaaggcagaaaagggaagacaatctactgtcttgtttggtaactgcttaattattcaaatatgaatatttttttcctgtgctgattgtgaacttttgttaagatagagaaactttgaagcaaaaatgtaattcggttaaaatgaatttcaaaatcctcakgaaataagagtgcttttggcctctgtttgatcctggcagcatgtctagctgatgtctgggcagtgttttggaaccagcaggcagtcaggggaaggccactcctaggggcctcttctctgtggcctggtggtgatttcccatacagatgggacctggtgaactctgccagaggtcatccttgactcccagtccacacctcccagtcataatttttatgagtatgtgattaataatatccttgaagttgtaaactaactctcaaagaatacctctactgtccccataccatttaaacaaggatctgttcaaatagtgttgtctttcctgggatgtgaaaagaaagaaactaaatgcaaaatggtaactttcaaatctgtatgatactgtttagtgcttcagtgattcttcccatctagctgatcttttgagctcttaggtataaaatacttttctgattattaccctcttttggctttaggattaattaatggacagtagtttcgggaacagttagtcgaggcatagatgtttgttgtctgccatgagccattatctcaccatattggccttaggaaagaaaaagagataacgatttagttttgcatagtcatatataatattttatttagaaaacattaaagagaaaatggttttgtgttttaattttgtttttaaaatatcatttagtgagataaaagtctgtgtttttatgctgtatttactattcaagtagaaagatttttaaaattccatgcttcatttacgtgcttgatggctctgttctttgatatccaaaatgtaaattaatatttgctttcaattcctttgagttagatttttctaaaattaacacctatttttcagctttggatatagaggacaaatacaacatatgatttatcctgtgaaactgcaagcatgttaactttctgaatattatcagtcacaaattttgggcatcagaaaataatctctttttttgttcaaattgtcattaactatttctgaaaactatattgtattttactgatgacagagtttggttccacctattttaacattggccacacagggagctaaaaaatttataccagcagtaggctataaacatgaaagccagtaaagttaaatatgaaatattaaatatatatgttaatagtattctttttttttttggagatggagtctcactctgtcacccaggctggagtgtagtggcatgatctcggctcattgcagcctctgcctcccaggttcaagcaattctcctgcctcagcctcctgagtagctgggactacaggggtgcgccaccacacctagctaatttttgtatttttagtagagacggggtttcaccatgttggtcaggctggtctcaactcctgacctcaggtgacccgcctgcctcggcctcccaaaatgaacaatactatttctgtttaaccagggcagggaagttcaaaaatcctgagactgcctgctaacttacttactgttttgcaaaaacacttgtaaattgaaatattctgaattatttatttgtacataagatcaatatttttggtaaaataaattgttgatgtaccttggtctaatacctttcatcccttccagtccctcccttagagtcttattttttccagaactttatttatttattgtaatatatgagcgatttgcatattgctggttttatttcacgtttctctgtctcaccctgttttggattccttcacatatgggagatgttcccccataagtaggaacgtctgttttctgatgtataccatcgaatctgcctgcttttctgaaccttaatcattcagacatcatctcacaggcatctcaaatttaacttgtccatgaatctgctattttcctctcaacctgtttcttctctgcaaatggcaacttctctcatgttgcagagccagaactttgggtgttgtgctcatctccccattctttgtaattgtggttgttgttttgagacagggtctcactctgtcacttaggctggagtgcagtgatgggcccagggctcattgcagtcttaacctccarkgttcagctgatcctcccacctcaacctccctggtagctgggactacaggcacaagccagcacacccagctaattttttgtatttattgtagagatgggattttgccatgttgcctagactggtcttgaactcctgacctcaagtgacccacccacctcggtttcccaaaatgttgcaataacaggcatgagccactgcacctggccctcatctccccattcttgccatcagtccctgcctgcctcctgaatatccgtcaagtccagctgcttctcccatctgtattgtcagtgtcctagctgtggaccccagccttgccatttttcagcatatctccgcaattgtcccctaaggaatttttccatcttccctcttgcccttcctcagtcccttttccgtatagcagcctaagtgattctggattgcataaatctagtcatacctgccctgcttcccattctagttgctctcatgggaatgtggaatctgtgcatggcctatcacacgctgaatgcctattggccttttcactgcacccagcaccgttctctcctttgctcatactcagaccatggtgttttcctttcattcctctccataggaatacctggtggtaatcatttgctttttgcaacagtgaaatctctctctgtctctgtctctctctctcttttaattatactttaagttctaacaacgtgcaggtttgttacgtaggtattcatgtgccatgttggtgtgctgcacccattaactcgtcatttacattaggtatatctcctaatgctatccctcccccctccccccaccccatgacaggccctggtgtgtgatgttccccttcctgtgtccaagtgttctcattgttcagttcccacctatgagtgagaacatgcggtgtttggttttttgtccttgggatagtttactgagaatgatggtttccagcttcatccatgtccctacaaaggacatgaactcatcattttttacggctgcatagtattccatggtgtatatgtgccacattttcttaatccagtctatcattgatggacatttgggttggttccaagtctttgctattgtgaatagtgctgcaataaacataacgtgtgcatgtgtctttatagcagcatgatttataatcctttgggtatatatacccagtaatgagatggctgagtcaaatggtatttctagttctagatccttgaagaattgccacactgacttccacaatggttgaactagtttacagtcccaccaacagtgtaaaagtgttcctatttctccacatcctctccagcacctgttgtttcctgactttttaatgattgccattctaactggtgtgagatggtatctcattgtggttttggtttgcatttctctgatggccagtgatgatgagcattttttcatttgtctgttggctgcataaatgtcttcttttgagaagtgtctgttcatgtccttcgcccactttttgatggggttgtttgtttttttcttgtaaatttgtttgagttctttgtagattctggatattagccctttgtcaggtgagtagattgcaaaaattttctcccattctgtaggttgcctgttcactctgatggtagtttcttttgctgtgcagaagctctttagtttaattagatcccatttgtcaattttggcttttgttgccattgcttttggtgttttagacatgaagtccttgcccatgtctatgtcctgaatggtattgcctaggttttcttctagggtttttatggttttaggcctaacatataagtctttaatccatcttgaatgaatttttgtataaggtgtaaggaagggatccagtttcagctttctgcatatggctagccagttttcccagcaccatttattaaatagggaatcctttccccatttcttgtttttgtcaggtttgtcaaagatcagatagttgtagatgtgtggtgttatttctgagggctctgttctgttccattggtccatatgtctgttttggtaccagtaccatgctgctttggttactgtagccttgtagtatagtttgaagtcaggtagcatgatgcctccaggtttgttcttttggcttaggattgtcttggcaatgtgggctcttttttggttccatatgaactttaaagatccaattctgtgaagaaagtcattggtagcttgatggggatggcattgaatctataaattaccttgggcagtatggccattttcacgatattagttcttcctatccatgagcatggaatgttcttccatttgtttgtgtcttttattttgttgagcagtgttttgtagttctgtttgaagagatccttcacatcccttgtaagttggattcctaggtattttattctctttgaagcaattgtgaatgggagttgactcatgatttggctctctgtttgtctgttattggtgtataagaatgcttgtgatttttgcacattgattttgtatcctgagactgctgaaattgcttatcagcttaaggagattttgggctgagatgatagggttttctagatatacaatcatgtcatctgcaaacagggacaatttgacttcctcttttcctaattgaataccctttatttctttctcctgcctgattgccctggccagaacttccaacactatgttgaataggagtggtgagagaggccatccctgtcttgtgccagttttcaaagggaatgcttccagtttttgcccattcagtatgatattggctgtgggtttgtcataaatagctcttattattttgagatacgtcccatcaataccaaatttattgagagtttttagcctgaagggctgttgaattttgtcaaaggccttttctgcatctattgagataatcatgtggtttttgtctttggttctgtttatatgctggattacatttattgatttgcatatgttgaaccagccttgcatcccagggatgaagcccacttgatcatggtggataagctttttgatgtgctgctggatttggtttgccagtattttattgaggatttttgcatcgatgttcatgaggaatattttagggcctctctgtattgcctaggctggagtgcagtggcacaattatagctcactgcagccttgaattcctggattcaagtgatcyccctgcctctgactcytgagtagctgggactacagatgtgccaccctacgcggctaatttttaaattttttgtagagatagggtctttgttgtccaggctggtcacaaactcctggcctcaagcagtcctcctccctcagcctcccaaagggctgggattacaggtgtgagctaaattcctccctaatgttaccatagccttagctacttatctttgggtccttctcatctttctgttttccttcccagccaggaaaatctgtgtaagtctcaaatactttcctcttcccggaacaccaaagctgtcatttcctatgcaggtgaacctttctggcaagtgatacctcttttctttttcaaaagcactctagtttgtctctttgtgaaacatgatcaagggattaatttcccatgttttatttagcctgatctctttcaaggagctttttacatttttgcctacctaattgatctttctaagcatcctagcatattgccttcagttgcttttcactttcatctaaacaaaagcaacgccacattttttcaatgatttcttaggtatattgatgtcattagaaatttcatctgccttctactatgtttctcattaaaaaaacttattaaagccctctgaaacatagttattatgtatgggccaagtaaatcattacccacagaacaagcatgaaatagctgtgtagatctcatgggcatgcgctatagaagatctgtgtgtgtgtgtgtgtgtgtgtgtgtgtgtgtgtgtgtgtgtgtacataaagcaatctataatatatatatatgtatatagtgaagaatatgatcgattctgatatatataactttttccatggaatttttgtgtagctaaaggaatagcattaatttgaatttgtgaatgttttctaaacgtcttgaggcagttttgataaattgagaattggcctttataaaatttagatacatagcatctcttgagtcmggaacagaaatgctcaggattttccatatggttgtggatatggtctagtataaaaggatgcataggaaaatgcctgggagggtatacatgttaagctgttatcattggctagcttagagatggaaagtcatattgaaaaggtgtgccctgctcgctcaaacacatgcactagggtacagggtaacctgctgtaacaaagatttctaaatacagtgggataaataagagagacgtttatttacctctcatgtaactgtctggtccatgctgctaggaggcaagtcagcctcatgaggtcattcaaagatacacacacccatcctgatgtgccactccgtttgaattgccaaagctgagtttctgccatgtcaggaaacccayagtaagacgagaagaaaggaagctcaagcaagcaatgagagagtcggaagttgcgtacatcactttagcttaccttcctttgtctaggaattagtttgtcatgcctacctacaagctagatgggaaagtggagtctgtgtctgggtgtcttttgctcagctaaaattctattactrtggaaaaatgaaaagcaggttttaggagaaactagcagtctgtcacaataaactgtgtcttaaaaattgtttatatataattatatatatgtaactattgtgatatataatstgctaatcattaggtaaactattcagtctctctggattgcaattttcttttttttaattttttttttttcttttagagatagggtctctctctgtcacccagatttgggtacagtgatgcagccgtagctcactacaacttcgaactcctgggctcaagtgatcttcctgcctcagcctcccaagtacctgggactataggcacatgccaccattcccagctaattttctgtttttattttttgtagagacagggtcttgctacattgcccaggctgatcttgaactcctggtctcaagtcatctcccaccttgacttcccaaagtgctggaattaaaggtgtgagccactgcacccagcacaattttctcatttgtaaggtcccatttttctctgtagtttacttattctataactagttgcgcagtttcccaagagcaggtaccatattgtgtgctctcattttccttcccatgatatctaatggctgcatgagtaatagtgtagaatacatgttgatgcatatagataggtttgctcagattaaagggctagatagtaaatgttttagactttgtgggacacaaggtttctgttacaactgcttgactctgctgttacaacatgaaaacagtcatatgtaagcaaaccaggctggctgtgttctaataaaactttttttacaaaaataggtaggaggctagatttggccttcaggccatattttgccaaccattgtcttgtaggaaagttacactttccaaatagatacaggtgtaaactcagatttcaggagctccattctttttttttttgttgtttttttgagacagagtctcactctgtcacccaggctggagtacaatggtgcggtctcggctcactacaaccttcacctcccgggttcaagcgggaggcctcagcctcaagagtagctgggattacaggcgcctgccaccacgcctggctaattattgtatttttagtagagacggggtttcaccatgttggccaggctggtctcgaattgctgaccttgtgatcctcctgcctcggcctcccaaagtgctgggattacaggtgtgagccactgtgcctggccaggagctccattcttaacagaaaacagaactagaagttaggtaggtcagtgctgaagcttaggatgcaggaaaacttctgtctgatgttttattaattacattttgtctcatgctctttgtatattcccatataacaggatagtaatgttcttttttgagagcccagcattgcattaagcattatatcatttatacctgataacaatcatgcataataggttctattattgttaatttacaaatgaggaaactaaagctttgagaggttaactaacttacctaaggtaagggatagacctggtatttgaacttgactatctgattctttgcttactttatggttattgttgcaaaagtggggattctgtgagacttgaatagtaaaatcagaatcatacttcgtaggtttcttatgcagcatgatggtacagattagaaccatacaagagtggactaaagtaataggaaggaatgaacaaacctctgtttactttgacttcagctgtcatgctgcagtcacctgctcttcttgtggaagcctgatgtaatttctgccttccctggatgtaacatgcttcctcccacttgctttcattcctgtgtaacatctttgtaatctggatgaccaagattagatacttcattcttcacaaaaccttcctgcatcctagaactctcccaatactattagtatcctcttgtggcagttacctattttgatattacagttgacctttgaacaacactggtttgaactgtgcaggtccatttatcttggattttttttcaataaatatatcctaaaattatttgaagatttgtgacaatttgaaaaagctttcagacaaactctatagcctcgaagtaccaaagaaagaaaaaggtatgtcatgaatacataaaatatatagagatactagtctgtttcatcatttgctattataaaatttacacaaatctattataaaagttaacatttatcaaaacttacacaaacagagaccatacctggtgccattcaaagcagagagaaatgtacacaaacagtaaagacgcagcatgaaatcataaccacattaagattcactgtagtacatactgtactactgtatagtttcatagccacctactgttgctattgcagtgagttcaagtgttgcgagtatctgcttaaaacaccatgtgatgctgatcaccgctgtgtgatcagttctctctccagtaaattgcatatggcagtaaaaagtcattgcttatggttctggaatatttttcatcatgtttagtgcaaaccataaactttgaataacaggacagaatccatacaaagtgctactagtaatgctggaggtcctcccaagaagcagagaaaagtcatgacattacgagaaaaagttgaattacttgataatatatggtagattgaggtctgcagatgtagtttcctgtcatttcaagataaatgaatcccatgtaaggaccattgtaaaaaaaaataaaatgaaatttatgaagcatttgctgcagctacaccagcaggtgtgaaaatcttgcacttttttgtgaaacacctttcatttcatattgaagatgcagcttttatgtgggtacaggattactataagaaaggcattcccatagactcgaatatgactgtctatgggaaaagtgaagttgttatatgacaacttaaagcaaaaggaaggtggaaggatataaagctggagaatgtattgccaaccaaggatggtttgataattttagaaagagatttggctttaaaatgtgaagacaaaaygtgaaggggaagctgtttctgccaactaagaggcagcattaagacaccattaagaaaatcattgaagagaaaggatatctgctgaacaggtttttaatgcagacgcaagtgccttattctgagggggaaaaaaaagccacaaggaacatttcttagtagggaaaagaagcaagcatgaggagttaagacagggaggaataggctaactctgtctgttgttctgtgcaaatgcaatcaggtttatgatctgcacttatctgtgaagctgctcatctcctagccttgaaggaaaatgataagcaccggctgccagtcttctggttgtacaacaagaaggcttggacaatgagaaccctttttctggattgactccattgatgctttgtccctaaagtctggaagtactttgtcagtaaggggctgtcttctaaagttcttttgatatggacagagccccagccacccagaacacatgtgtttaacatcgaaggtgtcgaagtggcctgcttctccccaaacccaacaagtctaattcagtctctagctcagagtactgtaaggtcctttcaggctcattatacacagagctgtatggaaacgatcgttgacactgtggaagagaaaaagtctggaaagattacaccactgaagatgcattgttgtcatataaaaagctgtgaaagccatcaarcccaaaatttgtgctggagaaaactttgtctggatgttgtgcatgacttcacaggatttatgaaagaggcaaccaaggaaatcatgaaagagattgtggatttgacataaaaggtggagtgggggttgaagggttttaaggtacggatcttagaggaatccaagagcggatagacaccacacccgaggaattaacagaggatgacttgatgtagataaatgcttctgaattggtgccagaggatgaagaagaagacatagaagaagcagtgccagaaaacaggatcacatcagacaatgcggcagaaggattctgattattcaagactgctattgacttattttacgacatggacccttctgtgatactggcagtaaaactaaaacagtggaagaaggattgaaatcatatagaaacatttttagagaaatgaaaaagcaaaaaaggcagacaaaaattacaaagtatattcataaagttatacagagtgtgccgcctctcctgcctccccttccacctcctccacctctcctgcctctgcaacccctgagacagcaagaccagcccctcctcttcctccttctcctcagtctactcaacctgaagaggaggaggaagactgttatgatgatccacttccacttgatgaatagtaaatgtattttctcttatgatttgcttcataacattttctttagctttattgcaagactgcagtatttaatatatataatatataaaacttgtaattgactatgttttcagcaagggtttcagtcaacagtatgttattagtatttacttttttgtagcatcaaaagttatatatggatttctgtctgtgcaggaggcacccctaatcctcatgttattcagtcatcacctgtgctttgaaattgtcattgtgtactaggctcaatttttttctactagattacatgcatctttaaaaaaatgacttattgaggtatacttgacataataaatttctgatatttaaagtattcaatttcatgagttttgacatacgtatacacctgtgaaaccattaccacagccatggtgttgaacacttctttcacctctggaagtttccttatggtctttgacatttaccctccctctacccctttcccagtgtaaccacatgatctgctttctgtcactgtaggctcgtttgcatgtcctaaaattttatattaatggaattatacattattatgcattatttttggtcttgcttttttaactcagcataattatttttaggtttatccttgttatttaatgtgttattgactctgtgtgtgtatgtggaatagaattccattgtatggacaagcccagttttgttaattcatttgcctcttaatggagatttaaattgtttccaggttttgattatagtaaataaagctgctattaacctttgtatgtaagtctttgtatagacatatgtttttatttaacttgacttaatacgtaggagtgagttgtctgaatcagtgaatatatgtttaacttttccagaaactgccaaactgttccaaagtgtgtgtatcattttatattgccaccacagtgtgacaattcttgttccatatcctgactagcacttgctattatctgtcttttcactttggccatgtaaatcggtatattgacggcatctcattgtgtttctttaacaataatgatgttgaacaatttttcctatgcttagtggacattttgactgtgtttttttacttggtgtgttttttgtcttataattgtgttgtaagtgttctttatatgttggtagatacaactcccttgttcaatatatgtattgtgggccagacacggtggcttatgcctataatcctagtactttgggaggccaaggtgggtggatcacttgagcccaggagttcgagaccagcctgggcaacagcaaaaacgtgtctctacaaaaaatataaaaattagctgggtggccgggtgcagtggctcacgcctgtaatcctagyacttcgggaggccgaggcgggcagatcacgaggtcaggagatcgagaccaacctggccaacatgatgaaaccccgtctctagtaaaaatacaaaaattagctgggtgtggtggcgtgttcctgtaatcccagctacttaggagactgaggcaggagaatcgcttgaacctaggagacagaggttgcagtgagccgaggttgcaccactgcactctgacctgggcgatagagtgagaccctgtctcaaaaaatatataataataataataataataataataataataatgatgataataataatatattttatgtgaatatcttctctcaggctgtagtttgttattttattttcttagttgcctcttttgaggagcagacttaaattttgatgaagtacagtttgtcaatatttttatagttcatggtttctatgtactaagaatccgttgcctaccttaaggtaacagattttttcctccatattttctactgtagttatgaaaataggtttgtgattcatttggagttaattttttgtctatgttgttaggtgttagcgttgaggttaattttttttttttttttttttttgagatgttgtctagctccgtcgctgaggtgggagtgcagtggtgtgatcttggctcactgcaacctccacctcccaggttcaagygattctcctgcctcagcctcccaagtagcggggattacaggtgcctgccaccacgcccagctaatttttgtatttttagtagagatggggtttcactgtgttggccaggctggtctcgaactccttacctcatgatctgcctgcctcggcctcccaaagtgctggaattacaagtgtgagccaccgcgcctggacttttttttttttttttttggtccaaatggttagctgtttgttctagtaccatttattgaaacgacatttattaggttggtgtaaacataattgcggtttttgcattgctgaaatttgctgtttgatattggaatacattcttaaataaatatggttatgttatacatcattttaatgtacatttctcgctttgtttttttgctaatgacttactactggctgtttaatttatatttagagtatggaaatgatgttagacaaaaagcaaatctgagcaattttcttatttgagtttaaaatgggatgtaaagcagcagagacaacttgcaacatcagcagcgcgtttggcccaggaactgctaatgaacgtaccgtgcagtgatggttcaagaagttttgcaaaggagatgagaaccttgaggatgaggagcttagtggccggccttcagaagttgataacaaccaattgagagcagtcatcgaagctgatccttttaaagctacatgagaagttgctgaagaactcagcgtcaaccattctacagtcgtttggcatttgaagcaaattggaaggatgaaaaagctccatgagtgggtgcctcatgagctgactgaaaataaaaaatattatcattttgaagtgttgtcttttcctgttctacaagacaatgaaccatttcttggattgtgatgtgtgatgaaaagtggattttatatgacaaccagcgatgatcagctcaatggctggaccaagaagaagctccaaagcacttcccaaagccaaacttgcaccaaaaaaaggtcatggtcactgtttagtggtctgttgctggtctgatccactacaggtttctgaatcctggtgaaaccattacatctgagaagtatgctcagcaaatcgatgggatacaccaaaaactgcaatgcttgcagctggcgttggtcaacgagaaatgtccaatttttctccataacaacacccaactgcacgtcacataaccaatgcttaaaatttgaatgagttgggctatgaagttttgcctcatccggcatattcacctgacctctcgccaaccaaccaccacttcaagcatctcaacaactttttgcggggaaaacacttccacaaccagcaggatgcaaaaaatgctctccaagagttcgtcaaatcccgaagcatggatttttatgctacaggaataaacaaacttatttctcattgagaaaaaggagctgatgtaatggtccctattttgattaataaagatgtgtttgagcctagttttaatgatttaaaattcacggcccaaaaccacaattacttttgcaccaccctaatacagcccgttgacttgacttggcaataccaagcttcttaaatttatatttagtgttttattgataccacaagttcagatattttttgttgttaatagaattcaaggaaataagtaatcttgaatggtttctgctaggtcatagaacagtgatgataaatttctccagattatcagaattcaatttttcactgattcattgttcttcaatttgatatcattttacttttaggtgttacacataatattgcattacttcgagaggtgataatcaactcacgctttgtaaaaggagacatcagcactaaatttctctccgatgtgtatcctgatggcttcaaaggtttgtatgcattaaaatattttagtgttttaaagttgttatttttatactttattgtaatacataatttcactctattttgaaattaaggccttttggcttatattatacttcatttttagaacatgcaagactgtttacattcatgattttgagtatttatggatgactcatgagtgtgataatctgcagtcttgtggagtgcagaattcaaccatgtgaattgttctatgagtccagtgttttggagcaaaacatgtagatagatcattagcctacctgacttcctggtttctgaaaatcaaatcagatttgtattttctactgaggtgagtatataaggaactcttctaaagtgatttttaagagatatattaatgaaaatagcactgaaaatttcagaaaaccagattctggtcctattaatgaaaatctaggaagatgatgattttattctgaaaaatgaagttttcaataaagtaatgagtggaatgtgaaatttaacacagcaaagttatcagcaagcatttccaggtagtagaaaaattgctcatcaaatgggagatagagaaaaccctttagtgagcattcaaaacatagttaacataagatattgagagataaacaagatttagactgagacttaatagaaatgttactcaggtgaaagcctctacctacatttttaatgagctagtgaggtatgaaggttagatagtctgtcccatatttcaagtgttctttgtatccrttaaagtgttttaatgtaaaatgactcacattcatattaggagctatatatagattcaggtcaagttgatgtcgttgagttgttgggtgcatttataaagcagttttcagttcagaatttacaatacagagttttcataagactcaacagagataactgatttgaatattgttttaaaactttagtgttatagagttttatcattagtattaaggcaaatgaagaatggctctaagttgggatcttaaaacaaaaactaatgatttattaggttgtttttcataaacttttgaatttttaaaaatacaaaataaaatacaactaggatagtagttttatacttttgtgactattcttttaatatttgttggtttaatgaggctaagaaccccttacgtcattgcttttcattttatccctagcacaaaacatagtaggtactaagtatttgttgaattaatgaaaaaaaaaaaaatcttagccataatattgatgagaaaggattactttggatttttttttttttttttttttttgagacagagttttgctcttttgcycaggctggagtgtagtggcacagtcttggcttactgcaactctgccttccggtttcaagcgattctcctgccgcagcgtcccaagtagttgggattacaggcatgtgccactacccccagctaatttttatatttttagtagaaacggggtttcaccatgttggccaggcttgaactcgaactcttgacctcgtgatctgcccgcctcggcctcccaaagcgctgggattacaggcgtgagctaccgtacctggccgctactttggatatttttaatcatttatacatgtatccagataaccagttcattctattttgatcctaacatttagtttcttgtccttcctaaaattttaattaaaagttgtagtacgttttgaagtggacttaggacttccatgtttttatgtctgcctggcaattcagtgatggtgataagataggaaacagtgggcagraggagaaaacagggaaaaactacagagaacctttagaacaaacattatatgcatgtatgggtatttatatatatatacacacacacaaatacacatttatatataagtttgtctatatgtatgtatggtgaagtatcccagagaagaagaaaatggggcatttaaattttctaatcagagttgattagtatgtgctggacgtttagcaacaatagagaatatcccaaattctgtagagaagggatccccttcaaactcagaaatgtacttaaacctagatattgcagttttctgtgatgcatataatatattacatttctttttttgtaaggaattaacagcttggacaccacaattttgttttttatgcttagaccaatttttaaaattggcatacattgcttttagcaattatttagttgcagccttcattttacatgtgaggaaactagagctcagagatatcagtaaagctaaatgaccagtaagataataatgccaggaattgaacctaggcttattcaactcctatttgagtagtctttgagttatgctggggttcaaattcataaatcacaaatgttttcaatcagggtatgctacatgttgttatattgcctctaaatactttagaaacacactcctatatttgccattcttaatgtctccctcttgttttattttcttattttcatatcagttcattcttctttgagtggttactgtctgtcattcttcttcagattgctgtattttccccctaaatcaggtcttagatattttaaactgtatcgtcttttgactgtttgatatatgtgcccaagagactgaaggaagtggtaactacagttaatccaggatcctctccatatgtttggggccaggtcattttgcccctttggggtttcccatctgcttcccatctgttcagctatcctaggcactattcacaggcaagcacctatttttatgactgcattaaaattttctattgtatatgtttattatcccacatttatttgtatgtagactaagccagttttactagagattcttagagttaaactttgaaatgattgcttctaaaattaaaaaataggatacatgagaaattattcttgtcatctctttagatgtggatgttgaaaagcggtttcccttgattctgaaaaataaatggaacatgaggaagaagatattttaagaactataatttcatttggcctataatgaacattttgggcttatttctctgataccttcctatacttcaaccccaagccccatcgaaagaaattgtcagaattatctcattcttttaagaagttacagatcttctggtaaaaatttcactcaacacaaaaagtatataattaattatacttctcttttttccactgaatttagtcaagtatatctacactttaaaaaatactactatgatatttggactgaattcaatcattaaagtcattcaacaaataattgatataggctctagaagaaaatcaaagatgggtatattttacctgctcttagtgagctgacatcatgagagaaataataatgtaaagtacccactatactacaggacaggataaagtaagtgcctggtaaagatgtaagcaaagtatcttgacagaagagaaacaaaacaaaacaacaacaacaacaaaacaccggaaacccagttccatttgagggaataaagaaaggctttaaggatgaggtagcatttagactattggaatacctctccggggactctctccatgggagctgggctgcacttgtgagagccatgtgtgcacatctttataagccatcctctttgaagttggtagtttgtaatcagccatgaagaaagtatttactgtaargaaattggttgtaccctgcggcttttctccttcccccacaccccagttgtttgttaagcatttaccagcaaaccactgcctaactctttggcctgcatattgagcagagtccctgatgtaaaaaggaaaagaattactcatctagggaggaagacctagaagactcactaaggacaggtggtgctcagttttagagctgctgttgtaggaggcagatgactgtgcttactgaaaaatgggaagaacacttaaaaatactgaattagaggagaaagacttaatgaactaaaaaactgtgatttttctaaataaaacaattcagcagtcaatgtggaaggtaggatggtcactactaagatccaaattagtgactcaaaggaataaatggaagtatctcaaaatatgcagcaaaaaggtaaagagaatgaaatcatgtggaaaatgatgagagatatggagggaagatccaaaagattttacacataagtgcatactaggagtttcatgaaaagaaaaatggaaatgaaggataactttgaaagaaataatagagatttttttctcactgttcttaagaaagccttaggtattcttggaaagactcactgagattcagactggattaatttaaaaagtaactccactaggcatataaaaaacaaatactttttwaaatcttctaaaagaaaagaaagaagatgcaaggaatgtacagtgagattatgttcatactctataaactggaagttagaaatcttagaatagtgtctgctacataggaaagaatttgactcaagagtactatacccagctaagatatcgtcatcaatataaacaaatttgttttcagttaaataaggattcagaactattttaccatatatactccttttgaggaaattgctaaagaaagtactttaaccagttttdaggtaagatgatagcttaaaaatatacatatttttccccctacccccaaatccactaacttgagttttttaaagacacaagcccactaggaagaagaaaggaaatagcatttggtaaaatgaacagctgaaagatgattcttaactgacttagtaacctaagaaagttgaatcctaagctgacaatgagagaaactgagaagtagctcattaccactgcagaacccttcagaagtctcaataattattagctccagataccctgggaaattcctaaaggtagcactactgacctaaaatatctgtaaaattttctccatatcacttccctcactcttcagagtaaggcgactctctttccctcatcctggtgtaagctttcagattcttctctgcagaggataaaaaccaggggacaccaggcacagttggacaaaggatcgagggaacatggacataataaatgtggtgacactctctgccccagctttgttcctcagttggttcccaggggactggcaggcagactggtactcacagacatgaaagtagacgatccttgaaaaatctaaccccctggtgagatgacctaaagattccccaacaaaacagtccagccagattaccctacagacaaagctgccagtggtcaacaaagccatagcccacgaagagagaacgggcctggattagaatcaggacctctatctgcattatttaatacaacactgtggccgggcacggtggctcatgcctgtaatcccagcactctgggaggccgagtggggcggatcgcctgaagtcaggagtttgagaccagcctgactaatgtggagaaaccccgtctctactaaaaatacaaaattagccgggcatggtggcatgtgcatgtaatcccagctattcaggaggctgaggcaggagaatcacttgaacccaggaggtaaaggttgtggtgagccgagatggtgccactgccctccagcctgggcagcaagagcaaaactctgtctcaagaaacaaaaacaaacaaacacacacccaaaaaacagaaaacgctacatgtaatgggaaccagcgcgtagctgttaaaaataaatggtagacctaaaaccactcgggaaatacacaggtcaggcttcttgaaaactgcatcatgccaatgagggtggccagtagcatgagggtcatagtggcatgtcacaaagcttgtaggtgctgttacatggttttgaactccagtaattagtggcttaatgaacaaggagaggagataataaacattgtttaggggttgggacttttgcatgaaattatccccccaaaagtttaagaaggtaagagttcgttgtgaggaggaaggtttttcttctttcagtcacaaatacttatagagcctgttgggtaaaagattgtgctctaggctctgggaatacagaggtaaaactgtcaaaaagcctaaggcttttagaaccaagagttgcagctttttccagccatgtcttcactgaagagcccactgtgcccagcctcgttgacttcgcagtagaggctctaagcttgaatgttgtgaacgttccaaggctgggtttaagaaagccttagaactccatctagacctgtaacragtacaagtgacttgctcctctgaagagtgcttgaggctgcatgtgtcctgcatgtgaggctggagctctcagtccttctgcctcctcaccacctgtattccacatgcacccagcagcacctctcagtcttctctgtcggggttgggggagagggtaaaccaagtgtcagattacagcactcttggtttacgttcacactcgctaaaaggggtaggaagaattggagagcttttaaaatacttaccgcgcccccaagttttaggtgtgtaggattcatcagtaaacagaaaaaggagctgccctcatgggacttacattccagcaggttagcaggcagcatgcattcccagctcccctcatggcagccaggcagggtttacacattagaagctgctcagaaaagggaatgaggtacattcaccttagcttactagcccagaatgcagtgtcagtgtgtctgactcaacaccaagctggtctaccacccccagagggcaaacagtggagaccgttcaaagggagctcaaggtcagagccagggaagacatgccttacttagtatcaggccgcaggggaacttgcagaagtcaagtccactctggcctgtgatcaggagtagcattatgctaaaatcgttgtaagaataggtcagttatgatcagacttcttatacagagcctgttggaactgagtaccccccttttgaagtggaatatcagtaaaatgcttgaagttgatgtgcatcatatcagtttgcctgggagatgtgatgaatgatggtccattttatttgggagacctctctcaatattgcctgagtccatgcactaatagttggttagaccagatgaaatactgattgagcatcttgcagtgaatgggttcccctaatgcattgcctcctcccttgctgatggtatatacggtgcatatgtgtctaaagaactgacttgtaaaggactttgattgtgaaccaccatgagaaatacattttacatcctgacatagtatgcacatataaacacacacaacattttcatgtaaaatactgtgtttaaagtgctatgataatttgtcttcctgcacatgacacattaaactggcttcatgaactactaaacagtttctttacacagtttgataaatatcagtccagaacagttgtattcaaagtgagatctgctgactggcagcatcggcatcaccctggagcttgttagaaatgcagattattaccccttgccctcataccttctaccagtcagtcygctggtgaagtgcacacagcatctttaatccargtgattctgatgtttggtgaagtttgagaagcactggttctttttacactccagagagcttttgtgattatatatattgatatttaccacattataaattaaaactgaggaacttgaaaatatttattcattcattctgaaagtaatggtaataaatccattacgtgttgacatgcatgagagcagtgatgtcatcacacaatatgtgtcccttggatctgggaacctctgcagtatactcttgagaaaatgagagttaaaaaagcaaatatattttagtagtactatgaaaatcatttgaccttgcaaggactcctggggactcccagttgttggcaggtcatgctatgagaactgttcttctcaactgtatgttttgacaagactgagagcaaatttttgtaatacttcttatatagagtaattatgtaatcatatggkatgttttcatcactgcttaggtgtcaggggaaaatgaggaactttccaatgcccataagagtatggtttattaggctgttgtgaggatctagtatggaattcccagaaccagttggtagatcccatatttgtattatgttttatgtaatgtctaggtttgtctcaaaagagggtggattacctgtgctctccctgcccttcagggagcagatagattacttccctgtggaaaattgtgctgtagatattggaagtatttgtatcttaattttgaatatttttagtcttatttgtattttgagtgattttttagacataatgtttaaattacttcatttcttccaaataagtttaggcaactagtttttttctttttttgaattgtacatttgtttcttggtatctgtgggtgattggttctaggaccctttcaggtacaaaaatccacagaagctcaattccccagtgtcgtatttacatataacttagacatatcctccctgcactttaaatcatctctaggttacttataatgcgtagtacaatgtaaatgctgtgtaaatcattgttatactgcattgctttgaggaaaatgacaagaaaaaaaagcctgtacmtgttcagtacagacaacaatacattttttttctcaaatattttcaacctgcagttgtttgaatccatggagggtcgactgtaaaagtagcaccttatggctgacgagccagcattcaagttgctcatactgtcccatttaatactctactatctrtatgtagtactctggtaaataaatagttttagatttgtggtgaagttacagagctgtcaarggatgtgttaacctatagaccctggagtatttgaatcctaccttgactcacaaccttcttgaagaattacgcaaattcttcaatcagtcactcaccccaggcctttgcggccagccgactatcccaggtccagctgtgtaatggtaggaagatactgtgagtgagaggaggagagagattggttggttgattgggattcatgcagagaagcagaagaatcacggcgtgatattctttggatcttcgcaccagaaagcatggcctcatctgtgtccttgaccagccgctctccttttctccagggacaggggcttcttgcacgctatcctcacttccctcagcagggaagctgggctgggaaaggacagagagaagcagatgtgaggagcttatgcttttcctggagatctctgtgtggatggttttttctttttaattgtctttgttctgtgcatctgttgaatatcttctttcccaaattaaacttctttcccaatataaacttcccgtgagcaggattttgttgtcttatttgaatggtcttgcttcctcaatgtccgcacaccccagtgcctagtacaatcctagctgcataatagatgccctataaaatacttgtttgaatgactagtaattctataggagagaagcacagatgttaaaataaatgattgattgattgattggttgattgatttccctcargacacatgctaaccaagagtgagaagaaccagttattggcaatagcatcatcattgtttgtggcattccagttaagagcacaacattttcaagaaaattcaaggtatggtagatcatttaaaacagaataaatgagcagaacaatattgataatccagtctacataggaaatactaataaaagatgtggctgatctcagttctagagatcttatgggtctttggagaagtataataaagtcacactgtataaatatgatattgcttacattttgtttaaacaagtttttttaagttcagaaaggataaaaggatcttggcccttttaatttggacataagaagatagtctgaaatccgatgggaaatccattcgagtagtttgtgtttatgatttctgttttatttacttatcttgaaaaacgtttggagaagtatatttaaatgtaggaatgaatctgggcagttaaaaaaatatatatcagaaactagtgaacacacaagaaggaattaacaccaggttgagttagtcatttgtgagacacaagtgtgccttttagcttcctagtgacccaggtaaaaggagaacatgctttatatcagggtaagtagaaacaaaacctcaatgccattggtgcttctagagagaggattgtttattatgaatgtgtgtttacttgctggagcaatccctttaaaggaatcatgctgttgataaattgttacttcagtttcttttcctttttactttttcacaagaggaagaacaaagtttaaaaaaaagaaaaaaaaagatggaaggtgatgaactagctttgaaaagcacaaatcagaaactgaaattacttctgaagaattaggtagaggagaaactaaattggatttaggctgtatcttagtggctaatgtggttttattcaggaaatctcagtgtagttggtactcttcacttgttctctttacctagaaagaataggaagcttacagtgtatctttttaaaagttatgatttggtagctaccagggagagatgagargatatagaatatcagtaaatgactgaatgactggacggaggaggaaaatggtcaatagaaccgtgaatctgcttgtgcatctgtttaatatcttctttcccaaattaaacttctttcccaatataaacttcctgtgagcaggattttgttgtcttatttgaatggtctttgctcccccgatgtctgtacacctcagtgcttgttgtttggttgtttcccccccacatagttgtgcggtctagtatgggaggcactagccatgtatggcaattaagattaaagtgaatggaagaatccttttcaaagttaccggaaacgtggctacatttcaactgttccatagccacgcgtggttagcagctcctgcactgggcaactctaagaggctttccaccacagcaggtgtgtttccatcaagttctgttggacagcatttgtctggagggatatgtgtgtaggagagaaygttgcttttgttttaaaacctgaatttcatattttttattcttttgataaatgcagtattcagatcctaattcctttaccttcagatgttatttggaccttgattatttcagaagttctgagtgtagctaaatatgactggtttgatttttaagaaatgtatgcaagttattttcagagagtgctgccttactgtgtggaagaatctgaaaagggcttaaaaagatggagaataaaaattacctgtaatcccataattattcaataattacttttaatgttttggtagaacccttcaaagtatatatatatatatatatatatatgtatttatgtgtgtgtatatatatgtatttttatatacatacatgtagcatttatactttgcataattagagtcataaacctgggaatatggtttgaattacttgtgcaagataaacagcagtatattgaacacccatgcacacattatctagcttcaatgactgtaaaaaatctatcttccttgtttcatttttacctctacccactccacactttccccatttgttaattttttaaggtaaaatatacaaacacacatatacacttcttacctgtacagtttttgtttttgttttttgagacagagtcttgctctgtcgcccaggctggagtgcagtggtgcgatctcggctcactgcagccttcatctcccgggttcaagcgattctcctgcctcagcctcctgagtagttgggactacaggcatacactaccacatctggctaatttttttttgtattttcagtagagatggggtttcaccatgttggccaggctggtcttgaactcctgacctcaggtgatccacccacctgggcctcccaaagtgctgggattataggcatgagccaccgcgcccagccttacctgtacagttttaacaaagggatgcttgtgtgtaactcagacgactctatctttacatcgtctcttccagtgcactccctgcctccttttgcttgtggtgctacctgcggtgtgatttcttcagattgcttttttggtaaactttttttttcttttctttttagagagatgaagtcttgcttttgtcgcccaggctgaagtgtagtggcacagtcataactactccctgcagccttgaattcctgggctacagcgaccctcctgcctcagtgtccctggtagccaggattacaggaacataccaccacgcctggctaatttctgtattgtttgtaaagatggggtttcaccatgttgtccaggctagtctcgaactcctgggctcaagtgatccagtccaccagccttggcctcccaaagtgctggaattatagacctgagctgggcgaaaccttgtgtctgctaagtacaaaaattagcgggggcgtggtggcgggtgcctgtaatcccagctactagggaggctgaggcaggagaattgcttcaacccaggaggcggaggttgcagtgagccaagaatgcgccactgcactccagcctgggtgaaagagtgtgactccgtctcaaacaaacaaacaaataagctaaacaatctaataaaaaacgggcagtaggtttgacttagactttttatcagagaagataaatgaatggcacataagttcatgataagatgctcagcatcatcggtcagtggagaaacaaaatcacaaatctataccactacacacccactagaataatatgcatcaagtaatgagtgggtaaataaaaagtggcatatccatactatgagcttattcagcagtaacaaagaataaacagctacattcactaatgtgtgtaaatctcagaaataacatgtgaagagacagaaaccagataaagaagactatgtaatgtatgacttcatttatttgaaatttctagggaaggcaaaaagtataaagaacaaaagaaagatcagtggttgtctgggtctgggtatgggagcaagattgactgcacatgagttttattgttctaaaactggattggggtgatgggtgtacaactgtatgaatgtattacaatctcacttgatcttagccaaaaggccgagaagtgatataaatgtattacaatctcatcagactatacaattaagatgtatagatgttaytggccaggtgcagtggctcatgcctgtagtcccacactttgggaggccaaggcggactgatcacatgaggccaggagttcgcgaccaacctggccaacatggcgaaaccctgtctgtactaaaaatacaaaaattagccaggcttggtggcgcatgcctgtagtcccatctactcaggaggctgaggcacgagaattgcttgagcctgggaggcataggttgcagtgagccgagatcacgccactgcactccagcccgggtaacagagcgagaccctgtctcaaagtaataaaaagtaaaatgtatagatgttatacaagtaaattatatcttaatgcaacttaaaaaactgtaaatgtggtaccaacaaagggcttgaaagaggtgggaagtattatgagaagtgttaagatgatggaagatacatgtaaaaataaattgtattcgaaacttgagtagaagcagatattaaggagtcaggttactgacttggaagacctggtggatggtggtaataacaaaagtgcaagagcagctttgaaaagaaaatatgagaagttccatttaggcagttgagtttgagatccttgacaggcataattgtagctcctaaagacttagcaatatgatatattcctatccctttgactgtttcttctttaataataatatatatgcccctttgagcccattaggaaatacttggggcatgcttttgtactcattagttccatgatttttttgtaataatcaaatgcacacagttttagacttcaacggtgttccttaatgtgtgctccatagagcgctagtttgggggagtattaaaatgcattacttaagaaaatgtttctgtgtttaaataaaygtggaaaatcccttgttaagttagaaacctcttagagactgtcatacaggcacacctcatttcattgtcctttgctttattgcacttctcagatattgcattttttacggattgaaggtttatggcaaccctgcattgagcaagtctttttgtgctgtttttccaacagcatgtgttcactgtctctgtgtcacattttggtaattctcattacatttcagacttcatcattattatcatatctgttttggtgatctgggattagtgacctttgatgttcccattgtaattgttttggggtgccacaaaccatgcacgtgtaaggtggtgaacttaattgacaaatgtgtgtgttctgattcactgacctggccattcccagtgtctctcactctccttgggtctccctattccctgagataaagtaatattgaagttagactaattaataacaaagcagtggcctctaagtgttcaagtgaaaggaataagtagcacatctttcactgtaaatcaaagggtagaaatgattaagcttagtggagaaggtatattcaaagccgaggcaggctaggcctcttgtgccaaatggttagccaagttgtgaatgcaaaggaaaagttcttgaaggaaattaaaagtgctattccagtgaacacacaaatgataagaaagtgaaacagccttattgctgatatggagaaagttttataggtctggatagaagatcaaaccagccacaacattcacttaagtgaaagcctaatctagagcaaggccctaactctcttcaattctgtgaagggtgagagaggtgaggaagctgcggaagaaaagcttaaagctatcagagcttagttcatgagatttaaggaaagaagctgtctccataacataaaagtggaggggaagctgcaagtgctgatgtagaagcttgcagcaagttatccagaagatctcactagcatcatcgatgaaggtggctacactgaacagcagattttcaatgtagataagacagccttctattgaaagaagatgccatctcatactttcatagctagaggggaaaagtcaatacctggcttcagagcttcaaagaaccagctgactctcttggtaggggctaatgcaactgatgacttgaagtagaagccagtgctcatttaccattycataaaccctagggtctttaagaattatactaaatctattctccctgtgctctagaaatggaacaacaaagcctggatgacaaaatgtacatttacagcatcatttactgattattttgactccactgttgagacctacttctcaaaaaaaaaaaaawttttttttcaaatgattgctgctcattgacagtgcacctggtcacccaagagctctgatggagaagcacaaggagattaatgttgttttcacgcctgctaacacaacgttcattctgtagctcatggatcagggagtcattttgattttcaagtcttattatttaagaaatacatttcacaaggcgatagctgccataaatagtgattcctatgatggatctggacaaagcaaattgaaaactttctgggaaggattcaccattctagatccccttaagaacatttgtgcttcaatgggcaaaataaaagatcaacattaacaggagtttggaagaactggstttgaggtgttcaagatgtcattgaaggaaatagctacagttggggtggaaatagcaagaaaactagaagtggaacctgaagatgtgactcagttgctgcaatctcgtgatagaacttgaatggatgagagttgcttcttatggatgagcaaakaaattttgcttaaaaagcaaagtttttaagatggactctgcttctggtgaagatgctgtgaacattgttgaaaaggattttagaatattacattaacttagttgataaagcagcggcaagttttgagaggattgactctaattttgaaagaagttctactgtgggaaaaatggtatcaaacagcatcacatgctacagggaaacctttcatgagaggaagaatcaattggtttagcaaactttattgttgtcttattttaagaaactgccgcagcctccccagccttcagcatccatcagcctgatcagtcagcagctaccctctatcagcaaaaagattatgactcactaaaggctcagatgagggttagcatttttttagtaataaagtttttttttttggagatggagtctcgctctgtcgcccaggctggagggcagtggtgtgatcttggttcactgcaacctccgcctccygtgttcaagcagttytcctgcctcagcctcccaagtagctgggactacaggcacatgccaccacaccccactaatttttttgtattttttagtagagacggggtttcaccgtgttagccaggatggtcacgatctcctgaccttgtgatccgcctgcctcggccatccaaagtgctgggtttacaggtgttagccaccacgccagcctaaactactttttaattaaggtttgtacattgtttttaagagctatcgcacacttaatagactacaacacagtgtaaacgtaacttttatacacattggaaaagtaacaaattcatgtgacttgctttattgaaatacttgcttcattgcagtggtctggaactgatctcacagtatctccaaggtattcctatatactaaaatgcattctgaaactcttaagagcaggatatagttggactcttacctacactctttttttcttgtgaaaacctttttcctaaaagctctttgaaaaattaatattccaatgaatgcttttgggaaacacagagtatgttatattgtgatttgtagtgttttagatagtttaaacacaacattccttagagattgttgaaatatttagggcaattgctttataaagtggaggttaagaagcaatctttatagtctttgctaatttctagctaaaattgtaaatgtgataattgctacattaaaaaatttaagtatcttattttttaactcattatcttttagaagttagaaacaaaatatgtatttatgaaatatgtagactgcaagttcacttatccagataattgcacatttattttctatacaacaagcaattgttcatttttggtgagtttattttctgttgaaaaaaaggtactatcacttatttagtattatcagtttattgtaaaattgctacaccctataacagtgtagagctgtaacatttagtaaatatagtgttcttcttcaggaagcataatcttgtgtagctaagtgaagctatgtttctggcttgcttactgaggaggtccttgacacctacatcatgaaagctgatgtacggtgtttgaaccttcacattttggctttagagtcatgttttcacaatcggcttgggaatggattctaagagtcaccctccaggtgtggctctgtattgctttgtcatgggtgtgtccgtgaaatgtttttccttccaaaccagtagcccacagcccttcctttgtgttgcttgttttggctgctgatcttattttcccaatttctctatgggcttcactctttcatcatttatgacttggaaaaacacattaataatacatacccctagtatttggatagtaaaacaatagtggttcattttagaaaaaaagaaaagttaatgtcagaaacaatagccattttttgggggatgactataaaatgaatttgatgagctcaatctttttctgacttaccatgaaggcttctttttaataattattcttaaacacttatattgacagaaatgaatcattaaaagctagttatattaaacaaccactttttttaaaagctaaaatgattttgttgacattgtagtttgatataataatttgtttcactaactggtaatgattggaagaaaaaatagtaaaggtaacattttaatcatttttagtaatctttatttttgctcaaaatgtctgttttttcttggatctggattcagctttcttgagaatcagcttttactttccgttttttttcctttctttctttctttctttctttctttctttctttctttctttctttctttctttctttcttccttccttccttccttccttccttcctttctttcttttctctctctttttctctttctctcttcctcccttcctccctttcctttctttcttttctttctttccttccttccttccttcctttcttttcttttcttttcttttcttttctttcttttctttctttctttcctcagtcttgctctctcatccgggctggagtacagtggtgtgatcttggctcactacagcctctgcccgctgggctcaagcagttctcctgcctcagcctcccaagtagctgggattacaggcatgcaccgccaggcccggctaatttttgtattttttgtttgtttgtttgttttgagacggagttttgctcttgttgcccaggctggagtgcgatggcgcaatctcagctcaccgcaacctccacctcccaggttcaagcagttctcctgcctcagcctcccaagtagctgggattacaggcatgcaccaccatgcctggctaattttttttgtagttttagcagagactgggtttctccatgttggtcaggctggtctcgaactcctgacctcagataatccacccasctcggcctcccaaagtgctgggattacaggcgtgagccaccgtgcctggcctaatttttgtatttttcgtagagactgggttttgccctgctggccaggctggtctcaaaatcccaacctcaggtcatccacctgctttggcctcccaaagtgctgggattacaggcatgagccaccacgcccggccactttctggtttctactttatcctcataatttccctcttggtatttgagcaggggttaaagactcagaaaaagaaacaacttcactatggcctataatattaatggaaatacttcagcctgaaaggttaaaataaagcactccctttggtggaggatgactttggctgcatggaatcagtgtactttgtgctcaggcttaggagaacatatcaagttatcacggctggctacacagcctggtgtcagtttaactctttcagccacagtagcataacgggaaattacttcctcttgggttctttgtatgtgcagtcattgtgtctgcatttgtattgtattatctttcctcatctggcttcctgataaaatggagaatcgattttttagtgatttctgcctagcagagacaattatctgtttatttttctttgcctttcctggtttcagatatagaatttattcacctgttattaaattttcaattagatgataaaagtttaaggtttttgaaatatgatcttaaccactgaaagatgagtggggtgagaaacatagaaaaaagtaaccgtgtgaaaataattcccaaggaaaagccrgtattgttgaacgggtacatactggctcttttactaagatgtcttctgaattaaaagagcatgtgaaattataacacatttatacgtcaatgaaaataaaacaacttatcataactcgtttcatactctcagataagccacttcactgtgacaatgaaggtgacgtgatacctaactatacaataaaaaaaaatagcactttaagtatatatttacaaacgtatgtatacactctttgtgtttggaaatagctacgttcatttgagcaaataaatcccctaaaagcaacaagatgggagaaaacattaactcaatcattatcacttaagcttgccttactttttactgtctctgttatgatattttcagttacttaatatgactgtgttgaagatggtttagaaatctatgtgagattaagtacaagatactaagtggataagaaagcacatttacatatttttgcttactattacattgtaaaatatttttattttgatcctactakaagagctgagggaaaggcagaatagcctgattattgctggagaatttctctgttccctaccatgattccagaagctcttgcacacttcatcagtattattgtaattctttggctgcaggatatttggcagctgttgcaccccactggcaaatcctattcatacttctttcccattcaccattgccaytggagaattgatttctctctcctctactctaacctttcccaattcattttggattgttcaatgtgaaacattttaatttcatatcatacagctattcagcttacaatcccttttttaacctgtcaccagggtaacagcatagcatgctttctttaggcaatcaagtttttatttcacatgcttaatgttgcattaaatgtttgcattttgtttaacccccttaaatagtttgaactctggatatgttttatagggtaatgaaatccttgatttttgaattgaaactaaatcaacaccatcagtgcatttataataaaatgtcaaaagattaatttccataatacaaagattattattaaaaacgcaagttagctgatctgtgtaaggcaattttctgtaggtaatggaggaatatttgtatatattatatttgtgttcagccttgttccaaaaaaagatttaaaagtggtttagagattgtcagtgagataagtaaaaaacttaaaaaaggaatagatttggtgcaaatgggaaaatatatcttttgaacccattatttgatttttcagtataatgcttttttctctgttcgtatatatgaagatttgattacttgatttttcagtataatgcttttttctctgtttgtatatatgaagatgtgattacttgatttttcagtataatgcttttttctatatttgtatatatgaagaccataatgatttatgcatgtggagatgggtgaagtaacgagatgtactagaatgagattagacatcttttctaggagaccagtgtgggcattgtgtgctttaatatctcttcatcagtttactttagaactaccttttccttaaaataagtaatttaataataatagattagtgaagataaaaatgcatatgtttagatattgattatttgacttgaattggatagacctcagtttccctttacagaactacctagtcatcttttcagccttatccccaataatatgttcaatgaaatttgttctgtgaataaatcctgtgatatttggaaaatactaagaaatgtgtaagacaaggtagagcagagactagcaaaccatgttgcttggaagcatggttcaaattgtaatgcccggggtaaccactaagaaaataactttaaaaaatagtattagtaaaagaaaagtcaagggaattaaaataagacaatagaaaacgttgatttaaaacaagacaataataaaggaatagagggagaaaaaagatatgacatatagaaagtaaaaagcaaaatggtagatgtaaatcctacctgatgggtaattaattatattaaatgcagatggcttaagcctatcaagagcagatactgacagaatagatttaaaaatatgatcaaaccatatgctttacaagagacacactttagagttaaaggcataaataggtcaattgtaaaaggatggaaaaaagtatcagacagacattgtattcgtaatattattatcagtattttattactaataatgctgatgtcaaacaaaatagccttttttttttttttttgagatagggtcttgctctatcacccagtctggagtgcagtggcatcacaggtcactgcaagtttgaactcctgggctcaggtgattctcctgcctcagcctcctgagtagctggtactagagtgcatgccctaacatttggctatatatatatttttaaatagagatgaggtcttgctatgttacccaggcaagtctcgaactcctgggctcaagtgatcctcccacctcagcctcctgaagtgctgggattataggcatgagtcaacacacccagcctttttttgtattttttttttcttccagagacagggtcttgctctgtcacccaggctagaatacagtggtgtgattatagctcattgctgcctctaattcctgagctcatgtgatccttctgccttagcctcccaaggaactaggactacagatgtactccaccatgcccagctaatttttaaaaatctctttagaggtaggtttttcctatattgcccaggctggtcttgaactcctgacctcaaatgcctggactcaagtaatccttmcgcctcagccttccaagtagctgggattacaggcatgagctgccaagacaaaatattgttcaagacaaaattattgctagagacagaggggtattttataatgataaaagggtcaatccatcagaaagctataacaagtataaacatatatgtacctaataacacaattcccaaatatgtgaagcaaaactgagacaaagagaraaataggcaattccacaatacatcactttgaaaaatggatagaacaactagagagaatatcagcaaggaagtaaaagtgtcggacagccctatagaccaaatagatctaacagacatctctagaataatctctccaacaacagcagaatatacctgtctcaagtgcacgtataacattctccaggctagaccatatttaccataccatatactaggccataaaacaagcctcagtaaatttactagaattgaaatcatccaaagtatgtttctgacaaattaaatgaaattagaaagcaacaaggaaaatttgggaagttcatacatatgtggaattaagcaatgtactaccaaataaccaatagatttacaaaattacagaggaaactagaaaatattttgtggttaatataaacatcacaacatctaaaaacgtgtgggctgcacataagcagtgcttagagggaaatgagagctgtaagcacatgtattaaaaaaagaagaggccaggcaaagtggcttacatttgtaatcctagcactttgggaggctgagacgagcagattgtttgagcccactagttcgagaccagcctgggcaacatggtgaaaccctatctctataaaaaatacaagaatatgctgcgcatggtggcacgtgcctatagtccttgctacttgggaggctgaggttggggaattgtttgagcccgggaggcggaagttgcagtgagccaagatcgtactactgtactcctgcctgggtggcaaagtgagaccctatctcaaaataaaagaagaaataaagctgggtgtgggtttggtggctaacgcctgtaatcccaattctttgggagattgagactggaggatcacttcagcctagaagtttgagaccccatctctacaaataataataataataataataataataataataataataataataaaataattcgctgggtgtggtggcacacacttgtaatcccagctactaagaaggctgaggtgggaggatcggttgagcccaggaagtcagggctgtagcagtgagccaagatcatgccactgcactccagcctggctgacagagtgagaccctgttgaaagaaagaaggagagagagagagagagaaagaaagggagaaagaaagaaagagagggggcggtgggaggagggagggagggagggagggaaggaaggcagtcaggcaggcagggaaggtagggagggagggagagaaggaaaggaaggatcaattaccttatcttccacttcaggaaacatggaaaaatagagcaaacaaaagcagagggaataaaatactgaaaactagagtacaaataaatgaaatagatactagaaagcaatagaggaaatcaataaaagcaaaatgtgtttgttggaaagatcacagaaatgacaaacctgtagataggctgaccaaaagaaaaaaaactgaaattgtaaaatcatgaataatagggggtatgcctactgaccttacagaaattaaaatggtcataagggaatattgtgaacaattgtttaccaataaacaagataacttagataaaatggagaaattcatagaaagatacagactgccaacactttctcaagagaaagtaggaaatccgaatagacttatcataagtaaagagatggaactaatcgttgcaaaacttcttagaaagaactcaggaccagatgacttcattggttaaaaaagttaaaggaaaattacttaatactaatcctcacaaactcttccaaaatcccaatttacaagaccaatatcatcatgattccaaaaccagataaagtcattgcaagacaaaaactaaaggctgatatccttcttaagtattaatgcaaaaattcccaaccaaatagtggcaaactgaatccaagaatatatacagtgatatacatcataaccaaatgaggtttctcctagggatacaaagttggtttaacatacaaaagtcaatcgatgtgatacatcatattaatagaataagagaaaaaaaccacaggattatctcaaatgcaaaaaaaaaatctgacaaaatccaacagcttttcattatgaaaaacactcagcctactcggaatagaaggcaacttcctcagactgatgaggagcatgtgtaataaacccacacctgaaaataagggcatctagattggagagaagtcaacttacctctttttgcagatgacatgattttagatgtagaaaatcttgaggaattgacaaacaaatctgttagaactaatgagtcctggaaggatacaggatacaagaatgatatgcaaatatcaatttttgtttttatacagtggcattgtacaagccaaaaatgaaattaacaaaacaactctatatagcaccaaaaaatatacaatacttaaatgtaaattttaaacaagaaatgcaatacttgaacactgaaaactataaaatgttgttgaaataaagatgacctaaatgaaaaacaccctatgttttgaatcagaagacctaatattgatcaccaaactgatctacagattcagcacaatccttactagaatcccagctgcattatttttggaaaaatagacatctgattccaaaattcatatgaaaatgcttttgcattgtaaaagaggaatgaagttcagaggctcctacttcccgatttcaaaacactacaaagctacaataatcaagacaaagtggtactggcgtaagcatagacatgttgatcaatggaatagaatcgagactccagaaataaattgttatatttacagtcaattgagttcagtaaggataggaagaaaattgaatgagttaagattaatcttttcagtaaattctgcttgggcaattggatatgcacatgtaaaagaatgaagttggtctccttcctcacaccatacataaaaatgaactttaagaatcatagacctaaatgtaacagtgcatacaacaaaattcttagagaaaaacataggagttaatctttgttacgtttggttaggtaataatttcttacataagatgtcaaaagtacacgcagcaaaagaaaaattagataaattggacttcagaatttaaaacttgtgctttaaaggacatgatgaagaaagtgaaaagacatccctcaaaatgggagacaatatttgcaaatcatatatatttaatagtcttttgtctagtatagggaattcttacaacttaataataggacaaatgatccagttaaaagataggcaaaggacatgaataaaaatttttcaaaaaagatatagaaatggccaataagcccataaaagatgctctgtatcattagttgataggaaaatgtaagtcataaccacaatgagataccacttcacacccatgaagtggtgaagatgtggaaacatgggaaccattacatgttcctggtgggaatttatgactacagtgatatgaacttgggaataatttgacagattcttaaaatattagacgattaccacatgacctagctattccacttcctggtatatacccaagggaaatgaaaccatgtgtgcacagaaatgttgtatacaaatgtttatagtggcatttttcataatagccagtggaaacaaccctaatgtccttcaaatgatgaatgagtatataatagtaaataaaatgtgatacgttcatagaatggattatttttcagcaataaaaataaatgagstattgatattttctgcaacatggatgaattttgcaaaaatgctagatgaaataattcagtcaaagtagatcacaaattttcccagaataagcaaagctatagaaatcgaaagtacataacagttgcttagggctgaggaggggaatgtagagtaactgctctcgtatctaatgtttcccttatgaggcaatgaaaacgttttaaagttgcttgtggggatggttgcataactctgtgactatactaaaaaccattaacttgtacacttcagatgggttaaatgtatgatatgtgaayttcatctcaaactgtttaaatgtatatagtctgttacacattttatatttaagaatttgttttcctaatggtataatagatgttcaaattttaggaattaaatgaggcatttcttccttctagtttgatggagtctttgagaatatttcttttcaaattgtaaaatatgtttctatgtctgctctcaatttagtgcaagagtagctcttgggggtagcaatatcaagtgttcctgggctrccacctggaaggtggaagtagtagatgtatgtgaacccgcgttcttccatcttttctttcctcttctgccttgaaatgcaagtgacataaaattaaaacaacacggaaaagtttcagttcctacaatggcagtgtagtgtattttcaatgaattcctttccagataaataattataaactctggacaaaatataaagcacaactatttgaaggctgtcgatgtacaaccaaatacgacccctaaaagaagaaaactacaccagtgagatgcacatttatgtggcttttcctctgaaagcagtcactattgcatgcattaaggcatggctgtaactcagttattggttttaggtctcagagaatgatgttcagtgttgtcagaactgctggaaattaagcagggatatcatggcagaaagggagcaacagagtgaagagttccatatgtgaattcaggttctctcaaattgttggttgaccctggaaatgtgcgtaacaaagaccccagggatcccagaagatcccagaactgctggaatgctgaatgaactgagctaaaatttcagttgcctaccatggttatgataatgttggaatctgaatctcatcaatttgaggtacttgtaaacaccttgagctttccattaaaaccctggaaggaccatgccttgggagaaaagactgtttctggaataaatggtttggactttttatttattgagagcaaaaccaaatagttcctagtacaacataaaagtgagcctccacaacttcaggactggtaactagcaatgtaactgcctgctgtaataaaaatcagtacttttcagagggagataacatgatgagtgaagtctgacaacatctccacaatacagtttacttggcatgcaatctaagaataaagacaactataatccagaggaaaagcagtcaacagaaatcaaccgtgagattactaaaatgtttgtttcatgggcaagagctttaaagtagctattaaaatcattttcaagtattaaagatgaaaatgagggaaaaatgggaactatcagcatagaaatggaaattaaaacacactactaagtggaaattccatatctaaaatgtcctatatctgcaatggataatttgctggataggctgaaaagcatactggtgatggcagaagaaggaataggtaaccttgaagatagaagaatagagattatgcaatctgaaaaaagagaaagaaaaatgtgtttaaaaaattgaagagacacaaaaggacaaaggaaacttttggaggtaaaacatgtttattaccttgattgtggtgataatgtaatgaccgtatgcatatgtccaaactaatcaacttgtgtgcattaaacatgctgttttttaaaatgtcaaatacacctcactaaaggtgtttagccgaggtgggcagatcacctgaggtcaggagtttgagaccagcctggccaacatggtgaaaccctgtctctactaaaaatacaaaaaattagccaggtgtggtggtgcacgcctgtaatcccagctactagggaggctgaggcaggagaatcacttgaacctgggagctggaggagcttgcagtgagctgagatcgtgccactgcactccagcctgggcaacagagcaagactcctcaaaaaaaaaaaaaaagaaaaagaaaagaaaaaagctgtttaaaaaaaaatggaagacagcctcggtgacttgtgggcactataagttatcaggaagcatgtattaggaaggacaaaaagaaaggcaagagagtgaagaaacttcagaaaaaatatttaatgttgtcttcttaagattgggaacaagacaaagttgtctgtttttatcgtgtttatacagtattatcctggagatcctagccagtgcagttggaaagaaaagaataaaaggcatagaaatcagaaaggaagaagtaaagtcatttctatttacagaggtcataattgtttgcatagaaagccttataagaatctataaaacaattgctggaactaacaaatttagcaagattacaggataaaaaggcaatcaaatgcaagttgtatttgaataaactagcaacaatgggaaagtgaaaattaaagttccacttaacatagcataaaaataggcaaagcagacaccgtcactagttagagtatgaaggcatgcaagaaataacggagcctaatgattgcaaaggaagctttccacaccttaattggttacctaagaaaactctaaggagtctgccatacaatgaataaaactaaggcaaaaataggcataaagttaacaaaagagattcatgactaccacactttatgaaataaattaaaaatcagaagaagtaagagttatatcctgctcatggactggaagagaaaatattaagatgtcacttctctctacagtaatacagattcaatgcaggcccgatagtaattctattgggattgtatctcagggaggatgtggaagaaattggcacattgattttgaaatttctatggaaatgcaaagggacttgtattagtccattttcaccctgctgataaagacatacctgagactggacagtttacaaaagaaagaggtttaattgaacttacagttccacatggctgaggaggcctcagaatcatggacgaggaggggcaagtcacatcttaagtggatggcagcaggcaaaaagagttttgtgcagggaaaccccccccttttttttttctttaaccatcagatctcgtgagactccttcactatcatgagaacagcataggaaagacctgcccccatattcagtcacctcttactgcgtccctcccataacacgtgggaattcaagatgagatttaggtggggacacagccaaaccatatcagacctagaatagctaataggaacaaagttgcagtacttggtctacaaattttcctgaaatgggctcacccctgtctcctaccacacaggaaagttagagatgcatcatagacagatctacatgtaaaacatctaaaacatgtgagtatatcttctgaaactttgtatgtaggcaaaaaacttcttagcaaggacacaaagcactaaacataaaaggaaaaattagtgagttagattttgttaatattaaaaacttccattaaaactgtaaaaagataccactacatacctattagaatgtctaaaatccagaacaccgaacaccacgtgctgctgaggatgtggagcgacaggagctctcatgcattgctggtgggagtgcaaaatggtaagccactttagaagacagtttggcagtttcttacacagcataaccttaccatataatcaaggagttgtgctccttggtatttaccaaaatgagctggaaacataggcacacactaaaacctgcacgtgaatgcttacagcagttttattcataattgccaaaactgagaagcaatgtccttcagtaggcgagtggataaactggtatgtccgtacaatggaatattatttagcaataaaaagaaatgagctactaaggcatgaaaagacagtggaaacaaatacatattggtatggggaaaaagctaatctgaaaaggcagcattctgtatgattccagcgctaagtgacattctgaaaaaggcaaacctatggagatggtagagatcagtgattgccaagcattcgggggagggaggggraataaataggtggaacaggggacttgtaggcagtgaagctactctgtatcatactgtaattctggacacatttcattagatakttgtcaaaacccacagaatgtataacacagtgaaccttaatgtatggacttcagttaacagtaacgtattgatattggcttatcaattgtaacaaatacaccatacaaatgcaagatgttcataatagaggaattcatgtgggggaggatgtatgggaaattgaaattctgttgagtttttgtcaacctaaaactgctttaaaaaataatgtctttttttttttwwaaatctgctgaaggaaagacattgttaagaaaattcataagcaaaccacagaagagaatacttgcaatacataaatctgacaaaggccttgtatccaaaataaagaactttcacaaatcaataaaaataaggccaatgacctaataaaaatgggcaaaaacttgaatataaatggccactgagcaccataaggtcctcagcattactagtcatgggggaaatatacatgaaactatgataagatgcggtttcccagcctctagcctggctagaattagaaagactgacaatgccaaatggtggcaaggatgtagagtgactcattgcagtggaaacatggaaatgttgtaatcttttggaaaacaatttagcaactcatataaaattaaacctacatttagcctacgacctctactccctagattttttaccccccaagaaatgaagacatacctctttaaggggggaaaaaacaatcaagtacaaagaatatctacagtggctttgtttataacagccccaaactggaaaccaccaaaaatgtccatccacagaaggatgaacttattttggtgtgttggtacagtaaaatacttctcagcaagaaaaaaaggatgaactattcaacaacatggatggatgcacctcaaaaacattatattggtcaaaaaagccacagttttttttggagtctgttcttgtgaagctcagaacaggcaagcataatctctggttgactgttagtggcaggcagagccaagcgactggaagggtgaatgacagaacttaagatcttggaatttgactgtatgttagttgtatgcgagtaaaatttaaaaaaaaataacagttgctgaaacaaaagagagggatttcagatatttctgcacccaattatggtaacaataataactaatttagcatttatgtgccaaacactactctaagcattttacaccttttatctcatgtaagcagcatatgggttaggcattcttattatctttgtcttgctgatgaggaaactgaggcacaaggaggctaagtaagttgtggatggaggtcacacagcttttgtaggtctgcacttggtcagtgagacatggggtctgctggggtgacagctgtgccacagtgcctttcctggctaatcatgcccagtgtctaaattgagaaccttaagcccttatcggtggaagaaggaaagggagtatgcataatatttaaatatatgagattatgagtaacattacgtattctatcctagattcagatgtcatttgtgtaattatttgtaatgctaataacaccaaacttgggggtgttccctgtttctcagcatgattatgtgatacagactcttccacacagtctcatgtatttgaacatacacattttcaattgcatgtaggcagaattctaatcctcctctatgccaattcctagctttgaagaggttctctgaaaatgctgcttttatctttcttctgcagtgatgaactttaatgttggagtgttgtaagttctcacataataaggctcagatttttgtttggtttggcagtagacttctgtttaaaattcctttaatctgttcattctatgctttttatattcattttaataactgatggctctgtaaagaattttttttgaatttattgcactagttaaaaaactactaaaacttgtacttaactattcctccatctcaacgttctaaaagtgagttttccagtgaattgctgaatttttatcttccctgggagttgttcctccccttccccaaccctggggaaataagaaacaattcatatactagatctaaagtttcattaaaattgcttatgccctgtctcaggcattttaagtgggccatctgtctaaacatctctctctccttttttttttctgatcatttcctcgacttattcatgagccatgggagggctcctttgtagtctccatgtagctggttctgtctacccccactgaatacatctatgtgcttgcataacatatcttttcaccgtgctggaaattctctgaacttggttcagatgaatggcccactttctgaaggcctttttcttcctgcaaagatttgtatgcagaaactgacctcagtggccatggaatgcagcatattattctcgatcattttacagcccacccactgtgaaagttatgatgaagcatttcttaatgattccttgaccattagcattgttttaactcagtattttacttctaaagaggtgatggcacaacaaaaaccagcttttttgagtgtctgataattatggtttaaaatgcttataatcctttctaactgaagatgctgagagtttttatgtttatacagtcttcttttagcaaatgacttgtaatagcaaagtatttactcaaaagcacccttttgagtaaaatattccagtaagttaaatgtattagtattaatagtgactatcagctgacagttcttcaccatcaaatataaaaaatttagttatgtcgagcatattcatcctggctggctgatgataaagtggacagacctgggttagagctattattttatttgctttgtgagtcactgtttatgtgagttcttttttactggggtttttggtttttgtttgtttgttgaagaaataacttaattggtatcagctttgcaggtgactaataagttgcacagattaaatttttggtcagatgacagcatctttcactagaaatgtacttcgttaaaggaaactgtatcattactatggtgagttgaagttctaagaccttttccytattgtcagagagttgttcataaaaatcttctttgagactattttgaatttaatggatctgtgtaattcttttctaaacatttagcacataattgtaggtaattgttactatcataaatctgtctgtgctggttaaattaataagaatgtttcaaagtaagtattataaatgtattttcagtgattttgcagaaatagagcatgcattctttcaggtttgtattttttaaaatttatagcttatttctattgcagagcatatttatatctgccagttaactggcatatatgcccaacccatccattttatttaaaaacccaaacaaaactagtttcaaacttatgtcaagccagaaggaatctttgcaaattttgtttgtagaagagtgaacttacaaatagatttcacagtttcgactctkttttggtatttagaggtcttgcacagtgaagcctttttcctatatcctgttaacatatcaccctgaaagaaattgttagaaaaaggctgggtactgtgactcacacctgtaatcccatactttgggaggacaaagcaggaggatcccttgaggccaggaattcaagaccagtctgggcgtcatagcgagatccaccccatctcttaaaaaaaaagccagacctggtggtggcgcacacctgtaatcccagccactcaggaggctgatgcagaaggatcatttgagcccaggagttccagactgcagtgagctatgattgggccactgcactccagccattgtgacacagtgagatcatgtttcttaaaagaaaaggaaaaaattgttagaaaagtgccactgcaggagttaagtttgtagaagaagcagtagcttcctatcacttgcctaactctgatacacttttacaggtgtagaaatattggttcaaacagattgaataagttctcaggtacattgctagtagaacaggctgagatttagacctggatgttttaactcgaaaccctgtactctttccataaggcccctcctgggacaaattataatatatatgaaacagatgtgaatcaaaataaaacaatggaaaaataaatagtacttaggttttggagagtggcaactgtatctcatcaccatctataaggtccctttctgtgggaaaatgggttctgggttggaacaggatgtcaggatcagcaatgttccaatgcctctggaagcagagacttgttacgtgatagaagaaattctcaatccctactccatcaggctgctacagtttgaaaaatattacagcatatgacatagattaaatggaagaaagatctcttgagtttatgctataattaaggaacaatttgtgagggaggcaatattttccttgaaggatctgttagtgtgagaagcagagagatgagatgagratccaaagtttctataaagaaagaggtttcagttataggggaaagtaagaatataggccgagagccgggacaactactcataataaaagctatagcatgtatacacctaatttaatcaacacctccctatcaatgcagatattgttacaatcttttatacatacataaggaaactgagacagacagtttgctccgggttttgtgtcagcttctgtgactcatcaaggcctgagttcaaaaccactgtcttgctctctgcctcatggtagcttggtttaagagtctgtcctaaccaaatagacaaatcagagaataagcagaaataaaattgaatgcaaaaggtgggttcttacttttaaggcattgaatggtagttaggttaataaagatgtaacttggtgtggggtagaaaacgatcaaatgatcatgagcaagatagtgacataattcttgaggaaagcacagattcaagaaagccaagttgcacggtcatctagatgtgaggctgtttctgcaatcacaatacccctgtgaaattggagtattgacctcattcgaagtgagcaaaatgaagtcttagtgagatgataggcgtagtccagggacacccagggagtatccaggagcttggggcacacagtcctgtcacacctgtgctcttgctctcctgggcaagtcagcctccccttctacacgtgcttggtgcatagtagacactcctcacagtcttttctacttatccctcatctctttgtctccatcctgtgccaggagctggagatacaaaaataaggaatgattttggtcttttaggagcccacaggacactgggagacaaacatataaacaaataaatgccctgtagaataaaggtgctaagaaaaaaaagaggaatactggcacagaagccctttcttcccttcttcctttctgctcagacctccttttctttccctctcctcctcccctccccactgtgtgttgtctccctcaactcccctgcacccccattcattcatactcttctgtgtgaggctctatcccctgaaacagttcttttcacactgccagaaagaatcgtcaaggcctgtgtgtacagtgtgcattattgttgatgcattttttttttacttttatttttacttccatggtatttaaaacatatccttatcttcagaataatgcagatcaagaagtggtaggtcaaatacaaatatgtatttaaattaataatattaatcagatattgaatctagaggtgattggattagaagcatagtttttgtgactctgatttttttaatgctgaatacacagagacttcttttgaaaatttggtgggtttaaatgaaaacataacttggaacattttttcagaactgtggtttaagctggagcccagatactacaaaatgctgatgtttagtacttggtaaatattacttcacaagtataaatatgcaatacctaaattaggttaattctgaaatcattaaattttgttactttaaaaagtcgtgggaaacatttatattctaaaaacacttttgtctttggctgcttgatacggattttctgaaccatgtaatactgataatatgcaagaaaagacccgtatgataagactaacattgttcatagatatggagtcctttctggggggttttaggtgatggggaaaaccagggctagaaaagaaataatgtgtaagtttccaagatgaggactgtgttttatttctctgtggtgccccacaatttagagccaagtgcttagtgtttgttgaactcataagtcatttagggttttgtgtgtgtgtgtgtgtgtgaatgtgctttattttagcaaaatttagatgttgtcctattatataataacataataagtgggtatctgagtaatgtttaaattcgttttttaaatttcgtgaatttttagtaataacattataaaataagtatagttttttttttgtttttttttttttgcaaaaaataattatatcggccaggcgcggtggctcatgcctgtaatcccagcactttgggaagccgaggcgggtggatcatgaggtcaggagttcaagaccagcctgaccaaaatagtgaaaccccatctctactaaaaatactaaaaattagccgcgtgtggtggtgggcgcctgtaatcccagcctctcgggaggctgaggcagaagaatcacttgaacccaggaggcagaggttgcagtgagccgaaatcgcaccattgcactccagcccgggcgacagtgcaagattccgtctcaaaaataataataataattaaaaaaaattatatcctagctaatgtactaagatatttctcttctaattgacatcatgaagaaacattctataagtagaataatgtagagaggttcattgtttaatacatttttagtctcatcaccagtaaagaacaaaatgattctctaggccacatcatgctaactcagtaattcattttatgtctctgaagtttaaggcatggcatacttacttatttcattgtaatttttttttaaaaaaaccattttgaatagtaaccaaatattgaaaaaaactaatactgcttcaggcagatgaatttgtgaatgactgtaacaattaggcaattcaaattcatagatacatgatgattcttagagtaggtgtttaaaatgttcgcaaatacattcaatggcagttttagcctgygcattttatatcaaagggaaattagtttattgagaaataataatataaaattrttaactctttttcttttcattctacttcagaatgcctgttattaaaccagacatagccaactgggagctctsagtaaaattgcatgataaagttcataccgtagtagcatcaaacaatgggtcagtgttctcggtgagttttctttctttattttcttggtaatcttgatgttatctatgaatatttaaagccatttttaacctgttcagtgactctcgtcttttgaattwgtagtacctctatgtatttttcatcttctttaggaagctgaatggaaatggaaatttttgttctcttatgcttattaggaaatacatttctagatttagccacatcctaaactcactttctgatacttgattcatttttcttttatgctgtgagaagtaatacttttgcctttgttacagagaagagcattttgaattacagttccaaatgtatgatagtggtggtaggtaaccatccttttaaaacaaataatctgaagcctcacataacattatctttaaatctcatgctgcaagacactcttgaggctaaatttaccttgtggtgacactctttttgttttgaagaacttaaaccccttggatatagggtccaagatagaactgccacagttggaattctagtctatagtgaacaagattacagtaagatttcagtgtttatactgtagtatgagtgatatgtttaaaactgtgatccgagtgtgccagaaaaataccattaagagttgctgttttaagtcgtatgccttcgtgttttcagcctgaactcaaggaggttgctattaatatatagttagtataatgaatattctgtttatctacatttctcttcttacggctaaattgcattgaaatgtcattttgttttggggaaacaagtgaatttttatcagaatattgaaataggatatgaacatcaaaacaatataatttcacacaaataagacctggtgtggcttgagaggggtacggcagtttcttgatctcagtgagaaaatatcacaagttgaagattcatgagaattcattcattccacaaataattgttgcatgcctactgtgcaccagatcagttccaagctgttgccctggagaagctgacattcttgtgtggtgtcagactcacagatcaatgatgtcagtccatgaactaagggtagtctccttggttttctttaaatgttgtgattcactgtatacgccaaaattgctgaaacgttagatactgaaagatacttcactcagctctcttaaaatgaaagctatgatggagttaaacagctgtctcatgagatcttgtgtgactctctacattccacctattgacatggtcatttcagaaaaacagctttgtaagtgcacatttaaccagagatcaggttgagtagcaaattataggaattgaatagtaaagagtatcaatattacaatgtagcatttttttttctgggggaagattaactttacaaaaatgtagagtttagcataattttcagttctatattgagtcaccactgaagccttactgtaatctgatattctgatacaatgttcttttaagtagtgccttaccttaataaagaaaactgtctagattacttttcagagctgttacttctttttttttttttttttttttttttgagacagagtcttgctctgtcgcccagaggctggagtgcagtggcatgatctcggctcactgcagcctcttcctcccaggttcaagtgatttctcctgcctcagcctcccgagtagctgggactacaggtgcatgccaccacacccaactaatttttgtatttttagtagagatggggtttcaccatgttggccaggctggtctcgaacacctgagctcaagtgatcctcctgtctcagcctcccaaagtgctgggatcacaggcgagcgttgcttctttatgtttgttttagattccatgttgaaaagtagagacctctggcctgactgcatacgtggtatctttcaaatttttttctgtagaattatctccagcttcactttttagcttatgaggaaaacagggctgtttttaaaacacatcaaaattagtgcattaaaaacttccctggaaaatatccaccttagtatataatatcagaaatgatttcctatatttattggcttagctactgtcagagcatcaatagcccaatgaaaggcatgtgcacatgatagtgtagccctttttcctaggcatatttaaatttagctactttcatttgacatcagtattatgaaaggaggcaggttgaacagcgtggcgaagtaaaggctcattggtagaaatatttcaatagtatggcactattgtctgcttttagggtcatagacgggagaactgtgattgttaacttagtttcccagatcacccactgtcacatcaagaaaaaaattagcctacaggtgacaagccaggtctgggttaatgactctggagatagtgcaggcaaaggctttactgagcacacagtaaagctttaggtgccctacatttccagagttcttctgtttaatttttaggagtttaaattataagatatttctaataaggaaagtacagcagatgttgcagattttccatacaggtctcctatttaaaaagaaaaatatatagattaaactaagtcctttctttacatcatcctgttccactttctcccaagtggtggcagctaacctgatgatgctgtgtgtcctttctgtatgtgttgttaagacttttggtacagatgtatacaccacaataatggtaaaaaggaaagttgcaacaatatacatacttaatggcaccatttatgtaaattttaggcaaagcaatttcatttacaatagaatgaaaaggactaaaatacttaggaatatatttgaccaaggaggcgaaaggcttacacactgaaaactataaaatgttgctgaaagagcttaaaaaagacacaaatatatggaagggtatcttgtgtcagggactagaagacttaatatggttaaaatatcagtacctctcagctacttggaaggctgagacagtaggttcacttgagcccaggagtttgtgcccagcctgggcaacacagcaagactccatctctggtgaacaaaagaaaaatgaaagaaggaaatgtcagtactacctgaagtgatctacagatacaacgccatccctatcagaacccccaaatacattttgttgcagatatagacaaatttattctgaaattcatgcaatttcaagggggtcccaaatagtcaaaacaatcctgaaatagaagaagaaagttgaaagccttatacctcctcatctcaaaacttattacaaaaccacagttttcaaaacagtgtggtactgcacatatatagaccaatggactaggatagagagcccataagtaaacccttgtatgtatggtcaaatggcttttgacaagagtttctaaaatattcagtggagaaaagacagccttttcaacatgaataaatttgggtccttttcttactctgtatacaaaactaaccaaaatggatcaaagacctaaatgtaagagctaatgctataaaattcttagaagaaaacacaggggaaggctgcgcacagtggctcatgcctgtaatctcagcactttgggaggccaaggcaggtggatcacttgagctcaggagttcaagagcagcctgggcaacatggtgaaaccccatctctactaaaaatacaaacattagctgggcttggtggtgcatggcacacacctgtaatcccagctactcaggatgctgaggcaggagaagctcttcaactcagtgggcaaaggttgcagtaagctgagatcgtgccactgcactccattctaggtgacagagtgagaccctgtctcaaaaamaaaacaaaacaaaacaaaacaaaaaaaccagtagataacataggggaaaagcttcaaggtattggatttggcaatggtttcttagacatgacaccaaaagcacaggcacaaaagataaattggactatgtgagagttaaacacttctatatatgaaaggagaatattttcccagaattttcatccctcctttaaaattttccattctaaacactataaatatataaatgtttcatgcaaatattttctcccattctgtgggttgccttcttactctgtttttttcccaaagtaaccactctgtcagagtacaatcaacagagtgagaaggcaacccacagaacgggagaaaatatttacaaatcacatagatgataagagtttgtttgtttgtttgttttttgagacagtctcgctctgtcacccaggctaaagtgcagtggcacaatcttggctcactgtagcctctgcctcccaggttcaagtgattcttctgcctcagcctcccaagtagctgggattacaggtgcatgccaccacacttggctaatttttttttgtatttttagtagagatggtgtttcaccatgttggccaggctggtctcgaactcctgacttcaggtgatccacccacttcggcctcccaaagtgctgggattacgggtgtgagtcaccacgcccagccctcccgataagagtttaatatctggaatatataaagaaatttttcaactcaataacaaaaaacaattaaaaatgggcaaaggactttcatagacacctctccaaagaagatatacgcatggccaataagcacatgacaagatgctcaatatcactaatcattagagaaatccaaatcaaacctgcagtgagatactacctcccacccgttagaatggctagtatcaaataaacagaaaataagtaccggtgagggtgtggagaagctggaacccttgtgcacagttggtaggaatataaaatgatgtggttactttggaaaaaacagtatgatggtccctcaaaaacttaaaagtagaattacatagtaaccttagaaagttggtaattctgatatgtgctatataacacagatgaatcttgaggacattatgctaggttataagccaggcgcaaaaggacaaatactgtacgattccacttatatgaggtacctggagtagtcagactgatagagacagaaactagattggtggttgccaggggcagagaggaaggggaatgaggagttattgcttcaagaatacaaagtttcactttttaagatgaaaggttttctggaggtagatggtggtgatggtagcaggaaaatgcaaatgtatttaataccactgaactgtacatttaaaaatggttaagatggtaaattttatacgcgttttaccacaagtaaaacatacacaaaacaaatcagtatttataatgaaaaacttaaaaggagggttgtggccaggtgcagtggctcacacctgtaatcccagcactttgggatgctgaggtgggtggatcacctgaggtcaggagttcgagaccagcctggccaacatagtgaaaccccgtctctactaaaaatacaaaaattagccaagtgtggtagcacgcgcctgtaatcccagctacttgagaggctgaggcaggagaatcacttgaacacaggagatggaggttgcagtgagctgagatcacgccactgcactctagcctgggtgacagagtgagactctctctcaaaaataaataaataaataaataaaataaaaaaggaggtatgaaaattctgggaaatgaatgcatggtaaaaatgaaagttaagtgaagtgttaatcgtaggagaagtgaagtattttatgtattttaggtctttattctgatttctgaatacagctgtctgaatgaatgacagaattaattaatagtataaaacctgctagacacaaagtagaaatattattcagcttgtcatggtgataagccgaaaagtacccaataacaaactgatttttattataattattttcatgattcccttctggattcccaggatgttttccatttctgtcttgctcartataacacaaaactggtcaaaatagtttttggccaggtacagtggtgcgcacctatagtccatccactcaggagaaaataagtttatgatgaattaaaatattaacacagttaatatcttaaagatggtgaaaaactaaattcatattgaatgtgattcacttgaaagaaagagttgaaagaagagtgtcagagtagtcctaatgtataagaaaattagttagaaatttggccttcctagcgatggaaaaaggagcactatacatgcactttttgaaaaattttgcctgatgtttcatgtttactactaataaactagaaagcaattgtatatgatcctgtatattgaattgttacagtgggccaatgatagaaaattttgtaaggacctaagggtttttcgtgtctctgtctccttcagttcggctctgatcttagttatttcttgtcttctgctaggttttgaatttgtttgctcttgcttctctagttcttttaattgtgatgttagggtgtcgattttagatctttcctcctttctcctgtgggcatttagtgctataaatttccctttaaacactactttagctgtatcccagagattctggtacattgtgtctttgttctcattggtttcaaagaacttatttatttgtgccttaattttgttatttacccagtagtcattcaggagcaggttgttcagtttccatgtagttgtgcggtttcgaatgagtttcttaatcctgagttctaatttgattgcattgtggtctgagagactgtttgttacgatttccattcttttgcatttgctgaggagtgttttacttccaattaggtggtcaatttttgaataagttccatgtggtgctgagaagaatgtatattctgttgatttggggtgtagagttctgtagatgtctgttagktctgcttggtccagagttgagttcaagtcctgaatatccttgttaattttctgtctcattgatctaatattgacagtggggttgttaaaatctcccactattattgtatgggagtctaagtctctttttaggtctctaagaacttgctttatgaatctgtgtgctcctgtattgggttcatatatatttaggatagttagcccttcttgttgcattgatccctttactaccaggcctgccttacaagagctcctgaaggaagcactaaatatggaaaggaaaaaccagtaccagccactgcaaaaacataccaaattgtaaagtccatcaacactatgaagaaactgcatcaactaatgggcaaaataaccagctagcattataatgacaggatcaaattcacacataacaatattaaccttaaatgtaaacgggctaaatgccccaattaaaagacacagactggcaaattggatagagtgaagagccaacagtgtgctgtattcaggagacccatctcacatgcaaagacacacataggctaaaaataaagggatggaggaagatgcactggtttttcctcatctttatggatttatctaccttttgtctttgatgttggtgaccttcggatggggtttttgtgtggacctcctttttattgatgttgatgctgatgctgttcctttctgtttgttagttttccttctaacagtcaggcccctctgctgtaggtctgctggagtttgctggaggtccactccagatcctgtttgactgggtatcactagcagaggctgcagaacagcaaagattgctgcctgttccttcctctgaaagcttcgtcccagaggggcacctgccagatgccagctggagctctcctgtgtgatgtgtctgtcaatccctgcgggggggtgtctcccagtcaggaggcattggggtaagggacccacttgaggaggcagtctgtccgttaacagagctggagtgctgtgctaggagatctgctgctctcttcagagccagcaggcaggaacgcttaagtctgctgaagctgcgcccacagctgccccttcccccaggtactctgtcccagggagataggagttttatctagaagcccctgagtggggctgctgcctttctttcagagatgccttgcctagagaggaggaatctagagagacagtctggcgacagcggctttaccaagctgccatggctttgtttattctctgaggggaaaaccacctactcaagcctcaataatggtggatgaccctccctgccaggttgacttcagactgctgtgctggcagtgagaatttcaagccagtggatcttagcttgctgggctccgtggggctgggatccgctgagcaagaccacttggctccttggcttcagccccgtttccaggggagtgaatggttctgtttcgctggtgttccaggcaccactggggtatgaaaaaaaactcctgcagctagcttggtgtctgcccaaacagccgcccagttttgtgcttgaaacccagggccctggtggtgtaggcttccaagggaatcttctggtctgcggggttgtgaagaccgtgggaaacgcttagtatctgggctgaatagcactgcccctccctcatggcacagtccttcacggcttcccttggctaggggagggagttccctgaccccttgtgctgcccgggtgaggcaatgccccaccatgctttagcttgccctttgtgggctgcacccactgtctaaccagtcccagtgagatgagccgggtacctcagttggaaatgcagaaatcacccaccttctgtgctgatctcgcggggagctacagaccggagctgttcctgtttggccatcttgccagccacttgagaaaaatgtctttttactgtttttgacttaaagctgttttatgtgataacagtatagctactcctgcttatttttggtttccatttggatggaacaattttttccatccctttactttcagactatttgtgtctttaagggtgaagtgtgtttcttgcaggcagcatatatttgggtcatatgtttattcagtcagccagcctccatctttttattttattttattttatttttttgagacagagtctcgctctgtcacccaggctggagtgcagtggcgtgatctaagctcactgcaagctctacctcccaggttcacgccattctcctgcctcagcctctcgagtagctgggactacaggcgcctgccaccacgcccggctaattttttatatttttagtagagacagggtttcaccgtgttagccaggatggkctcgatctcctgaccttgtgatccacccgcctcagcctcccaaagtgttgggattacaggggtgagccactgcacctggccaccagcttccatcttttaagtggagcatttaatccatttacattcagggttattattgatatatgaggttttgttcctgtcatatcattaattgctttctgtttgttttatatgttccttgttccttcctattttatattgtttatctttgtggttggtgttttccttcagtggcaacattagagtcttttctgttcctcatttgtgtgtttgccttaccagtaggttttatacttgcacgtgttttcatgatggtgtatattgtccttttgcttccaggtttaggactcccttgaacatttcttatagggcggatatggtggtaatgcattccactggtcaaattcggcgtttgcttgtctgggaaagactttatttctccttcattaatgaaggatattattactgggtatagtaccactgagtggcagtgtttttctttcagccctttgaaaatacgattccattctctcctggtatgtgtggtttctgctaagatgtcgactgttagtctgatgggacttcctttatagatgactagatacttttctcttacagtttttaaaactctgtatttggctttagatagtttgactataatgtatcatggaagagatactgttttgcattgaatctggttgaggatttctggaccttctgtatctggatgtctgtatctctcactagacttggggagttttcagttattatgtccttaaatagagtttcaaatcctttcattatttctttgccttttgggatactgataatcttgatttttggttactttattgtgtcccatatatcatgaaagctttctttatgttttaaaattactgaaaaatttttttgtgtgactgcattatttcaaaagacttctcttcatgctttgagattctttcttctgcttgatctagtctgttgaagcttttgaatgcattttgcatttcattcagtgaattcttcattccagaatgtgtctgattcttttttatgatacccatctttttggtaaatttctcatttatatccttaattgtctttctgatttttttgtgttgtttttcagatcactcttgtgtctcactattattagtatcaaaatttttagttatttttctggaatgtgaatttcttttggatgggatctgttgctgcagacttattgtattcctttggaggtatcatattcccttgctttttcatgtttcctgtgtccttacgttgatatttgaacatgtagggtaatattcgcttcttccaattttagaatttgttttcataggggaagactttttcctgaagatgtatccatgctgttggttgggtaggaccctttggctttgattctgggtgcatgtggtagtcactgtatagtgtagtcactgtatgatttctttggctgtaaacagtatcggtggtatctgtgatttctttagtggcttagggtactgttattagtagaggctgtaatgaggttttctggggacaaggatgccacatgggccactctttgggcctaatggtggtagtggtgggctgagtatgtctgtccttgggccccggggttgcatgtgctgacactgatgttagtgggtccaggtgagtaaatttaacaaaagaagtataaaacttgtattgtgaaacaaaccattgaaaaaagaaattaaggaaaatccaaataaatggaaagtttctaatatttgtgaattgaaaaacttaagatggcactgcttgcctgtattagtctgttctcacgctgctaatgaagacatatccaagactgggtagtttataaatgaaacagctttaatgaactcacagttccatatggctggggaggcctcataatcatggcagaagatgaaggaagagcagagggacatcttacatgcagcaggcaggagagcgctcttgcaggggaactcccctttataaaaccatcagacctcctgagacttattcactatcacaggaaccacacggggaagacccacccccgtgattcaatttcctcccactgggtccttcccacacatgtgggaattatgggagctacaattcaagatgcaatttgggtggggacacacccaaatcatgtaattcccaaattagtctaaagatgcaacacaattcctgccgaagtccaagctgtatttttatcagaaattgacaagctgatcctaaaatttggaaaatatggaaacttaagggacccagaatagccaaagtaatctaaacacacacacacacacacacagacacacacgaaaaaacaaaaaaacacgccagtcacattggctcagacctgtaatcccagcactttgggaggccaaggcaggaggatgacttgagcccaagagttcgagaccagcctgagaaatatagtgaggcccccatctctacaaaaaagttttttttagctgatggtggtagcatgtgcctctagtcccagctacctagaaggctggggttggaggatagcttaagcccaggaggtggaggttgcagtgagctctgatcacaccactgcactccagcctgggatacagagcaaaactctgtctcaaaaccaaccaaacaaacaaacccacaaaaatccagaattggataaatcatatttccatctttcagaagttactacaaacagccttgtaatcaaatacagtgtagtacttgcaaaatgattgtcatataaatcaacagaatagaattgagaatccagaaataagcccaaaaatatatggtcaattgatctttgacaaaggtgccaaaataattcaatggtaaaaagaataatctcttcaacaaatggtgtcgaaacacctgggttcacatgtaaaggaatgaagtagaaaccctacctcatattgattagtatacaaaaattaatccaaaatggattgaagacctaaatataagaggcaaaacatctttaaaaatagatgaattgttcaacatcaagattaaaatgtttgcttcaaaggacactaacaggaaattgaagacaaaccagagaatgggaaaaaatatttgcaaatgaaattttcagtaaagcacttgtgtttaaaatacataaagaacacttacaacttaacaataaaaaacagcccactctaaaaataggcaaaagatctgaatagacgtttctccaaagaatatatgcaattgccggtaagcacatatagagatgttctgcatcataaggcatggagggatccagatgcaaatcaaaaccacagtgagattgtcctttgtacccactacatagctctactttaaaaagtcaggtaataacaagtgttggtaggccaggtgcggtggctcacgcctgtaatcccagcactttgggaggctgaggcaggtggatcacgaggtcaggagatggagactgtcttggctaacacagtgaaaccccgtctctactaaaaatacaaaaacaaaattagctggggcatggtgatgggcgcctgtagtcccagctccttgggaggctgaggcaggagaatggcatgaacccgggaggtggagcttgcagtgagcygagatcgccacactgcactccagcctgggcgatagagcgagactccgtctcaaaaaaaaaaaaaaaaaagtgttggcaaagaggtggagaaattgaaaccttcaaatgctattggtgggaacgtaaaagggtgcagctgctttggaaaacaggatggcatttcctcaaatggttaaatatctgggttattcagaaccttggctctgttgtatcaggagtatttaatcttgaatatttatataagtatttatgtatttctttattactatggtgaatatatcttacctttcaaataatattgaagcaagttatttccctgacccctttgcgggaccgctttgccacggggtgcctcctttaatcagcctatagctctcaactccttgtgggagggagcacacgagcgaaggaggcgggaactgtagtgcaggagcactggaactgaccagccgttttggcgccagtgggatcaaactccactcatttgcacctgttgccttccacacctcgtaggagggagtgcacaggtgagtgggtgcaggaaccagagcaagtgcttttgggcgccagcaggagcgaactctgtgcaggccccatggcagcatccaggaggggtgcctgtgactcccaaagccccagagggcatgttacagtgctcttttagctctgctctccacaggcggcttaagtgttaacagctcagttggcctgctgctgccctccaccagcgagggcaaagggccagcgtaacaaccttttgtatccacacacatggctcctgaactcttgtctggtgtccaggaaaaatgaggtcacacgaactaattgaaggatggtaaatgcaggaatgattttattgccgatgaaagtggctctcagtgggaagagaggggagctgaaaaggggacagaggaggggtaggtgatcttcccctgaagtccggctggattttctccggttactccatcaagctgtccctctgaagtcaagtcccttctctccaacattcagctgcttctcctctctgctgattgagtctggggtctttataggcacaggatgaggtggggtggggccatgggtagtttaggaaaaggcaacatttgagctggaaaacagggagagaagttctcactttgggccacggtctcaggcttttcagcttgagggtggaacttcaccagggacccacacctgtctgcctagaatttctctgcctcctgtctctatcattgtatcaatatcaaacaatagttgttggcctacatgtcagtaatttaaagatgaattaaatggttatatatgataacatttatcagagacctttagaaacattcatattctttggtctactatttttacttctagaacatattccaagcaagcaatgaaaaatcgctaattcaacatataatattttgtcagggaaaaaataaattaaaggcagttgggcttggagatatccatgtaaacaatctgtacttataagggaaggcagagttggaagtaattaaaataatgtaataaatgcattaatagaggtgtcatcaaccagttaaatctatgagaaagaaagaaaggcactcaactgcttgggggaagggaaggatctgggggaagatgaaagaagttcctcttgggggagatgactgatgagtcacagcttagaacatattttttagtatatataagccagaacttgcctcaaaattattgtataaataaatgaggaaaaacattagaatgtggtagcatgggggagagcacctcagtcccccaagtagctgagactacaggggcatgctaccatgtctggctaatttttatattttttgtagtgacagggttttcgccatgttgcctaggctggtcttgaactcctgggttcaagccatctgcccaccttggcctctcaaagtgctgggattacaggcatgagccaccgtgcccagcctgtgatttcaagttttatccaagcaatattttttgagagcaatataagatttgagactgggtgcgtggctcacgcctgtaatcccagcacattgagaggctaaggcgggaggatcacttgagcccaggaggtctagaccagccctggcaacaaaaaaaattttatatgattagccggtcatggtgatacacgcctgtagcctcagctactcaggaggcccaagggggaagatgctttgagcctgggagattgaggctgcagtgagccatgattgcaccactgcactctagcctgggtgagagtgaaatcctggaccccgtgtcgaaaaaaaaaaataaagatttgagataggtaagcttttgtgtacaagagagtttgtgctacattttgttttctttataatgtttgttttggttgatgcaaaattgtttcatcttagatgcttgaggtggaaggagggaattgttttgtagyattcatatmattgaaattaccaccctatatttttctcctcaaagaaagaatatggtgatgaactaagaatagaaaataataactacatatggatgcataataagaaataattatatacgcattgtttgacgttttccttctctgctataactcaccctttttcctttgttctaccaccatatgttttgttctggatttcttgactaagaaaacattccaccatagtttattttaatatttaaagagcactttgaaagtttgattttttttttttttttgagacagagctcactctgttgcccaggcaggagtgcagaggcacaatcttggctcactgcaacttccacctcccaagttcaagttattctcatggctcagcttcccgagtagctgggattacaggcacgtgccaccacgcctggttaatttttgtagtttaagtagagacggggtttcaccctgttggccaggctgatctcgaactcctcacctcaggtgatctgcccgcttcagcctcccaaagttttgggattacaggcgtgaaccactgtgcctggccaaaaattcaattttaagtaaatctgtttaaatgtttttgtgtaacgttttcataaaaatgaaaaattcgatgaacttagaatatgccaagaatcttctgcacaaaataataactttgtgttctcaaatagtaatataaagaatctgtaatgtatcttcattaagaatttatacatgcattttacmtcataatctcttttattctatgaatagagcataatactaaattatgaagttactggaatttttataggaacatgataagaatcatgtggttcttttaaagagttaattttggaacatcttttgttcaaaaaatagaacattattatatgtattcttttgcctctattgtcagtttttaggataggcttttaatcttgaacatgaaaaggacatcagtaaacaaggtgagttaactattacatttatgcctattataggcttttagtttaaaaattacctatggcttaaatacagagaaggcagacagaaaaagaacctttttttccctgagcattttaaagagaatactacagtaccattaggggtttataataaaggactataattctatttagaaaactgacttacagtacatgacaaatgatagaaaattgaggtaagttttttgaagtcatattttatatttattttttatttttcattaatttgtcttttgccagaattaaatgttatgatcattaaactacttctcttcttaggtaattttttcacttagtctttctacccctctacctttaaaaagtatactgaacaaagcagcaaaagatattctctttgaggaaaataccttattttctgtgaatagttttttaaaattaaaacataatgcataaacatagaaattcttttacattggcaagaactttttccttgataaaattatttttccatttgaaaaattattaggataataagtcaagataatgcttaaaaatgtaaaaattttctgcaaagaatgtaaaactgtcgtaagtgaagccaacaggtaagccaaaaaaccagagagaaaatttgcagttcattttagtcacaaaataagggatgcccttcatatatgcagaactcttacaaatcaatatgaaaatgaacaaaagccctggtaaaaaaatattcagagacagtttacagcaaaggacatgtggctcctgcacatatgataaaaagtgctaaaagccacacacacattcaagtgaaaatcatgatgagatacgattttccatgcacattttggcaaaaatgaaaaatgtgttaattccgttttgttttgattttatttatttattttttttgagaccaggtcttgctctgttgcccaggccggagtgcagtggcatgatcacggctgactgcaacgtcggcctcctaggctccagtgatcctcccacctcaggctcctgaatagctgaatagtcagcatgcccagctcctttttgtattttttatagagacagggtttcaccatgttgcccaggctggtctcgaactcctgggctgaaacaatccacctgccttggccttccaaagtgctgcaattataggcatgagccactgcacctggcctcttcctaagattgtagaaacgtaagctctcaaacgctggtgggagtataaatggatataacaacctccatggagagcaatttgacaaaatgaatttatactgtgtgttatgtccacctgtaggagatgtgcaagaatagtcatgttagtattatttcttagagcagaagactggaaagaactagcaaaaggtagtgaaaaggtagctcactccaaaagttttgcttagggttccagagttcatagtaatttcatttgtcctaaaacatcacaggactattttaaagaatactatgtttctccctgctattggtttaaggaagaatgtctaaaagtaacttactgtaccagtgtaacatggtatcaaactgcctgtcagactggaatagttaaataaatatgatacattcataacattgaaatactgtgcagcctttaaaaagttgagagtgtcttctatgtgctgctttctttttttttaagacggaatctcgctctgtagcccaggttggggtgctggggtgcagtggcgcgatctcagctcactgcaagctctgcctcccaggttcacaccattctcctgcctcagcctcctgagtagctgggactacagatgcctgccaccatgcctggctaattttttgtatttttagtacagaygtggtttcactgtgttagccaggatggtctccatctcctgacstcgtgatccacccgcctcggcttcccaaggtgctgggattacaggcgtgagccaccgcgcccagccctgtgtgctgctttatcaagtgacagaggcaaacgacattcattggcataaaaaagaatgtgtgtgtttgtgcttgtgatatccacagaatatctttggaaggagccacaagaaactgggacccatggttgcctgtgagttggggagctggagggctgactccataacaagtgagaaggatacatctcttagatcatatctttttagtattttttgaattttgaaccctacatgtgtattacctatttttttwaaaaaacatttcaaaattgtgcagtggaagggtctgtaagatggagcagtgttgaaataatggagccttaattacctttcaagaaacttctgcagtgacttggccatccggggaagcaatcagaaaagcagctggctcattaaatggagagtgctggtcccacaggtgtaagtacacaaaacgcaatcactgaaattctttggctagcacttccaactcggagacagttgctggagatcacttaataggctctggttacaggttgatctaatctgaattaagaaattggaaaaagcaaagaaagagcagtaacataggtcagagtaaggaagctgagtccgaacagttcctccacagcctcctgtttccccttctgtaggtgtatgaactacccagagagattactgtgaatgtagaatagttggagagatgtgtttcccaatagcaaaaggcagtgtaaaggtagttcactccaaaagttttgcttagggttccagagctcatagtaatttcactcgtcctaagacatcacaaggctattttagagaacagtatgtttttccttactcttggttcaagcaagaacatccaaaagtaacctgatgtaccaatgtgactccttatcccaagctaaagaatatcctttcaaggcaaattcatccaaatcagcttgacatctgatgggagggggttggataaacaaggttgtagagaaatcaagtctgaagagtaaccttgcacagcttgatctgtttactttttaaatgcaggtttgttcagtgggtatcgcactctacttttgaaacataggactaaattttcacaaaaatgtgaagatcctgcccgtgtactctggaaaattgcttgtytaattgggtgcacagctgcacctgtaccctcttgaatgactcagtcatggtgtgctcaagggccaagtaacttgttatggtgctaagtgaagaacaaaaatatataaaattcagttactttggcaatgaaaaacactgaatggtattggttgttatattacagttggcaaatactgtaattaagacttcaagtgatttttagtattagccctggattcactttctgaagaattttatttagaataaaactttcagcgttgataccagatagtcacctttagttcagttcagtttcataaatctttataaaatatttatagtagtcaaggagcctattacgggtgctagtcaggtttctgcaacaacaaaaagtaaattaaagttggctgggtacagtggctcacgcctataagcccaacagtttaagaggctgaggcaggaggatcgcttgagcctgggagttggagaccagcctgggcaacatagtgagaccctgtctctacaaaaaaaaattagccaggcatggtggcacatgtctgtggtcccagctactcagggggctaaggtgggaggatcaagtgagcctgggaggtcaaggctgcagtgagctgtgatcgtgccactgcactttagcctgggcaacagagtgagaccccatctcaaaacaaacaaacaaaaaatgtaaaactcacaaatttaaaaaagttttaagaccaggcgcaatggctcacgcctgtaatcccagcactttgggaggccgaggtgggcagatcacctgagatcaggagttggagaccaacctggccaacatggtgaaayccagtctctactaaagatgcaaaaattagccaggtgtggtggtggtcacctgtagtcccagctacttgggaggctgaggcggagaatcgtttgaacctgggaggtagaagttgcagtgagccaagattgcaacattggactccagcctgggtgacaagagtgaaactccgtcttaaaaaataaaaataattaaaaagttttaaaattcactttggtatgatattttgacccctcaaagttgtttataaatagaatgaacagtggagccatctgttaaaatgccttggctgagtgactcagctagtagatgaattttgacatatttatagcaccatgcattgatcattttagttgtaatataacagctgtttattgagtaccttttatgacataggtcctggagaaccagtggtaatcaaaagagatgatacatctgacttctcacagtgtcatctgttgagggggacaaggatgaaagctgtgtcagtgaaggaggaaaattgagtggtaacagggagggcaggtgctgtggtgagcatgtatgtagcggaggccccgaactgaacacggaggtggttaggggaggcttaggaaggaaatactggccaggctgagacctacacaggaggtttgggggagggtaggggaaggagtcagagtttgaaggcctacataaaaagtagatacagctataaagaacgagatcatgtcctttttagggacatggatggagctggaagtcattatccttaggaaactaatgcaggaacagaaaaccaaatgccgcatgttcacatttataagtgggagctaaataacaagaacacatggacacaagggaacaacacactggcgcctaccaaagggtggagggagaagatcaggaaaaataatggatactaggcttaatacctaggtgatgaaataatctgtacaagaaaccctcatgacacaagtgtacctatgtaacaaacctgcacatgtatccctgaatgtaaaatagaagttaaagaaaagaaaaacacacacacaccaaaaaaaagcagaaagagaactaagaaagttaattgtgtctgaagcaagagagaagttgtgtatgactgcagcacagaaagcttgaagtgtgggacctggtggcaggcagggagggggaaacgagtggtgagatgggaggggcaggccccaggggaagcagctgggacccggccatgtgaaagtgccagccctgaacctggtctggatgtgtgtggagtgcagtggagagccacagaaggcttgcctgcagggagtcggacagagttgcctgtttgggagatcactctgccttcatgatggagaataggtttggagaggcaagactggaggaagagggcctgctagaagcagtcatgcaggtgggcgctgtgagcctcagctgcaagtattttggagaaaaaatggatcaacatggaagagatttaagatgtagaattaaccgtgcatttattgagcagtaataatattagctaatatatattgcatatttaatatgtgtcaagcactgttctaagtgatccacatgcaatatgttatttaacaacaattgtagtcaacatgtacaatctactttcatttctattccaatcctataaagcataagtactattattagtcctatttttaagtataaggaaattgaagcatagagaggttacgtctagagaaataggaagacaattttagacataattttgaagggatctgtgagatacacaagtggagatgtttcctgggtcattgcatgtgaggttctgtggcccaggagagagtttgggggagattcggtctccagtagtataaatggcagttgaacacgggttgaattgaggagaaagtagaaaagggaagaggaccaagaaagatgaaaccttgaggtatgctaaagatttaaaggatgggcagaggaagaagaatcagcaaaggatactgaagaggagcattgaaagagactgtgtcagaaaacccaagaagttgtgttgtttcagaatttaaaggaagaggctgttttaagaagatgaggtcattgatgccagtgaatgtaagaagtcatgttaaaacaaaaaaaacaactaaggctgagatttatccattggatttagtgaaaataattgagaacaatttcagtgttgtaatggggccagaaatgaaattgtggtgagttcagacattgagatatgcggacaagtggagtgaatgactcttctaaaggcatggtcgttaagagtgggccatggtgttgaggggattgactttttaaaggtttaataaattcttaagtgctgataacaggtgccagaagaagggaatttttgatgattaaagaataaggagaaaaagaagaactaggagaagggcctctgtgcttttttttttttgaaatggagtcttgctctgtcacccaggctggagtgcagtggcacgatctyggctcactgcaacctccacctcccgagttcaagtgaatctcctgcctcagcctcccaagtagctgggactacaggcgcacgccaccacgcccagctaatttttgtatttttagtagagacggagtttcaccatgttggccaggatagtcttgatttcttgaccttatgaaccaccacacccagcctctgttccatttttatatgaaaggacaaaggagcgggtggagatgaagggagagttggtgacttattcacctgtgatggctgctgtgggggaagaggtgaggtgagactgggaggagttgattatggcattagaaattggaagtamgtggaatgttgttgaggctgggagcaagaattgacttaaacacaacagaagggctaggctaaccaagcttccatttgaagtcgtggagcaggagttgatggggtatcaatccatgtggtcagatagtgcaaggcagctctgcatgtccaggaggccaggacacagggaggctaggcggagaggtgccagtgagggaggtggagataggcagatcctgaagggcctttaaactatgggtttcgattttattgtgacattattcattatctagccagcttttataggagcagtttataaagtatgttctagggaatactattgatcaacacgtttttcaaaagtctaaattgtgttcaaattggtgtcttgtgagaattaatagaatacatatttagatcactttcataaataaatacattaacatcatattttcagtaagctcatatttgatatctaatcaaattcttttagtcatgaatttgaatgagaggttttttgggttattgttactgtttgttttgtcttctgtgtttttatatttggaagcagaattagcttttggtctcttaagtgaccccttagtcacttaagatggtgttcatttccatcattgtgcttatcatgcacttgagttctcgtgtttatttctttgtccacttgtttaatttcagcctcttcacactaaaataggagctttgtaaaggcaaggacctagtcttgttcactgtcacacttcttgtacttctcaggaaatattcattgggggcagggtagaggagttggggaaggaaggaaggaaggaagagagagaacagtgaagcgggaaggaaggagttccaaaaactgcttccctagtggtcatggaaactctttaataaattagaatgttgtctccaaaaaatacaggcagatatgcgttgacaattgcctttcatacaccttaacaaactagttacataatgggatatcaaaattcagtcaatgtgtttgctagtttaatttgttgtgattaaagaaaacaatgattttatttataaatttagcacctaggaaatgtgatttcaaatatcaaagcataggcattttttactctttttaaaattgaagggtcaacaaaatctgccttattcttcacagttttttctctgtcagtaatgtagcagtgtgttaatttccagaaatttaatctcttctataaaatttcctgtgacctgaaaacttttgaattggagttaatttaccaaactgtcatggaatgcctgaaatttccttggggcagaggaggtagcagagaggtggtaagttaccatgtttccattgtgtgaataactgataagtgggattccaaacagaatccatgtagcgttttaatgaattcacatttggagaaaaaagtcacagactttcaaaacttacaggaatttggctgtcctagggcaactcctcacttaacagcaagaggggatgagaaggttgagtgactcacccagggaagtgactcacccagggaaggtcaagtgactcacccaaggttacttggtaagtaaagagagaagccagaagcctggggcctcctgacggctcctgcttctctttttactaaggtcttctgccatgggaagaaactctgaatgttagcaaccatctggatggtgttagttgtatgtctctctatgtatgttgaaaasaaaatgttgaagaattgaatttctcctgcttatgggttgtgtcacatttaatagcgttctttaagaaaaaaacacgattgctcaatatgattatatgagctcaccataaccaatgacaggcagaaaatcctgggaggatagacactaacaccacattatcctgttgggataatatcccaaattctgaatataactttcttttaccactttaaaggccaaaaaatggctgttaaatggagtatttttgtcaaaccaagtttttaaagttttcagcagctgcttctgctggcttttattaactactgaagagtctttttttttttttttttttgagatggagtcacgctctgtcacccaggctggattgcaatggcgtgatctcagcccactgcaacctctgcctcccgggttcaagcgattctcctgcctcagcctccctagtagctgggtttacaggcgcccgccaccgtgcctggctaatttttgtatttttagaagagatgcggtttcaccatgttggtcaggctggtcttgaactcttgatctcatgatctgtacacctcgggctcccaaagtgttgggattacaggcatgagttaccggaccctgcctactcaagagtcttaattgaacatcaaaatcctggttttgtttataaggaaaaaaagttaatggtgcaactaggactaattctttgattaattttttaaccacttctacttagcaagtatatgaaacacattaaagactgatgcatctgttttgtttttgttttgagatcaggtagaagatctacaaaactagttggaggctggaaagaaatttcagatagtgatacatagaaatgttctgccttaactctgaatttttagtcatgaaatagtgcaaactcttaacattacttttgtggagctttgtagtccataaaaataacattgttgtagagcctctgtatgcgtcagctgtgactgagtgttttgatgtcttagcaaaaggcagaggagtgctttcctttgaaatgtgtgaggcggtttgagatgcagcttctcagatggatttaattagtccttcgtagaactggatgtccgtttgttgcaactgaattctcatttcattcatccataactagaaacacctcgcttcaaacgggtttcttcaaagaaagaggggtttagggttctatgttgtactgctttttgatgttggtttccctttaactgagaagaccttatgtttatacaactgttattattaagaaaacacagctttcttcagcgaggttccttttgcatcagcgctggttcttggtggcagtcagaggtctgtggaatggatctctgtcagactatcacagcagctgtgtgtttgcagattttgcttatgagaggcatgaactgaaaataggcgtaaacttgagtaattccctaaacccaaaatataagatagaaaccagtaactgaatctggtaacagggtagttgtttgtttcagaagcttatattaaccacaaaaacaaagtgaatcaactaacaagggttaccatgacccaaatagtaattgcattttgattcactttgcctacagtgcacaggtcaggtctgcttctcaataaatatgttgaaagaatgaaatatatccttcatagtaaaattatgttttttaaaaaatatgtcctactactaatattttttaaattatccctaaaccttcacatttcattagaatagctacttcaatttactctgaaaaaactgctttcttgtctttccagtttgtgtgtccagggtctgacgtgctccatcatcaaggcagcttttatcttctgtgtccgtgattctaattacatttcagggggttgtgatctctcccagaatcccgttcatgcattgtgtttaggatgaaatgcttgagggggtttggggctgtacactcatgggcacaggtttgcatatctaaaactttctttgctctaacatcctgatttgtataaaaatcctaaaagcaaatttcagacttctaattattctttgcctttaaggaaagacaaaattaatttagactgttcaagcttaaaattatcccaaagccacagatcacactgaaaacacatagtaatatagcccacaaattattttggtgtcttgtttccatattccatccaagagtctgtagaatctgtaggcttatatttctgtcttgtttcttagccataactgatcttttccatcttattcaccagactcagcactgcgtaactgtggcaatttctgaaactcagtggcaagggatataccaccattgaagagattaaaaataatcaacaaaggctttaaaaagtttaaaaaatgtatttggagcaataatagcaataggtcagaaaaagttttcacggaaagggccaatatacaattaggtttccatctctgtattcttgattgtgtgttttatgtcttgtgactatcttgtggagttcctaattttaaaagaattatgggtgtggctcaggaatattttattacatttgtgtaaattaaataattttttaaaattatggatgtgatttaaatattcttttagtggttctgcctttggtacagtgttccatgattttgtaatgtttttatttgttgaaaaagctctaaaaatcttggtagaaatatagaatctcagaaggcagaacatttggtaattatcttttatatcaatttgcaagacaacttgttagggagccctatttctagtagttgaagttaataagtaacaaatcacagcaatcacgttttttatcatgcagagtgggcagtcttataaaaaagaaacgtcagtctttttggatatagggacacaagcaatcatagttttcctctgttatctttagtttgtaaaaatcaacctatctaccatcagcatttacccacaaggtttagttyggagttacctaaggggatggtagagaaacaataatttaacgttatgctgaaaacaatagtctctgaagatagagaaacctctgtcacttaccagttgtgtaaagttggaaaagttacttagcctccctgaaccactgcagcagtggtgtttacctgaatgttggcatagaggaaaaccaagggtcacgaggcaggtggacttgagtttaaataccaatcctgaacctgctggctgtggaatccagcagaagttagttatcttttcttagccttagttttccttatctgtagaatagggatagtattctccagggtttttgtaaaaattaaatgagattttatataaaggctctagtacagtggctgatgtaataagcaccccagaaatgatttctcttccctctaaaacacggatattttgctttttaaaagaagctaaagtagcttttactttgcaagcagttcttttccattgtatgaaaaattcttggaaagttttaaaaataagacaaaagggagccacagtggcccaggcctgtggtcctggcacataagcagccgaggctaggcgttcgaggttagcctgggcaatatagaaacctcttatctatataataaaaataagacaaaaaataaaatgtgccaacatatattagcaaggtttgtcagtactgattaatatttttacattctaatattctttgttagaattgtatttattttatgaagccccttttgaatctacagcagactacctgggaagtagttatagaggtcatcatcgtgtcttggtgattcactttgggaaattttgttgagtgaggctggtgaacctagaaagctgcttcttctgcctccccatttctgtccccaaggccctgctgtggttcaaaagcccatataaacctgcagtttccctttcttccacgatagggcgcgcacctacactgttagggtatggggccgactggctcctgccctgtgggaggtttgatccttgtccatttagaggcccttccttattcatggacactctactgagtgtctgttgcaaactccctggtataaaccccagacgtcatggatttaccacactaattattagagtggccattatttgcaataaaatagtgacccttgccactgtgttttcctaccaaataaacttactgacaagtatctgcattggctgggtcgaggtgtcatcaaatcagcctaggtttggatgtgctgttttgctagctgtagacccttgagcaattatgtaacttctctgagtgtcagatttgtcatctataaaatgtggttagtaacgtctccattgtaggatcgttcctaggattctgtgagtgtgatgtatattaaaatacctgattgatattagggcctcagtcatgttcctttctttgctttagactcatttctctgaaaaagtaatacgatgtttatagttggggaaaaaaacccaaagagcgttcataatctggatattaccactattgaaatttctattttgattcagtgtttttttkgaaggtattcttatttttaagagagggaattataaaatatgccattttctaactcagtgtttaaaccttaaaaaaagagacatttcttgaaatgttaaacctatggctttgagcatggctgtgtgtggctgtatttgctcttggccatatttattgtggcagcgtggtaatgggtttatgcttgttttatcgcttgtggtttttataaaataaaaactgtgtttggctgtgtgactgtcgttcagaacaagattaaggaaactagatggagattaaacatagcacaatcttctgttgtaaataaccatagacaaacttgtgagcagctaccaaattccccagttggacaaaaagtgcttctttttagctttgaaaacctagtgatgatgatttgagaactggcataagtctctttaatcattcaggttcagcgtgattagaagaagagttgttttaaatgtttttgtgattagatttgaaacaaagcttagaaggatttatgattttgtttacaaccagctacgaaaaacaccaaggaaatgtgaaagctggtagtaattggtgagcttgctgggagtggatgttgtttccagtagtgtaacttaacaaagattgaaggaagctccgtgccattttatttcataccactggtttaggtgcattaattgatattttaaccaaaattttaatctaaatcaagtcttttaggttcaacctattccactgggttttaaatgatcatatatgcataccacagcacatctcacattgagaacgttacctcagtgggaaggttgtttcattcttggttgagtatagcattccagcttgtaattaagctgcaatacaaaaaatatacgcacttgctagaaggatattcttgctagcattctgtatgtatcatttgcttattcaagcatataaaacttcaacaagaggaggtaattttgcttagatctcttgatttgaattgttccgctatttggcactgggtggaaaagggaaaaaaatcatattgaaagcattgttctgttaatgaagttgcttgtccttttttgtgccaaatttggcaggtaaaattaccatttattctacttgctagagctggagaatagactgttgaggaaaagtagcaatttaagtaatgacactagatagaatgtgctacattatatacatctcccatacttttagatattgacatgcaatttttatttctctttagtaatgcactttgtctttaaccactacattacttcccgtaagctccatcaactacatgcaatttgcttcagttgtgaaatttaaaaatttactattaattataataaagtgaagcattttgattcaagaagaaattaaagattgctgtattttgttctggatatttcagaagtattgtattctttttaattctgaatatttaacataaaaaagatgaaatagacgcattggttaatttgaagaaatacaatcaaatttgaggtattcatggttttttccatgttaaatatgctttgcctatttatatttgccttaatttttgttttgtagagtataaaagagaaactttaaactcgtatacaaaaatgggaaaatatctaaaaatatgactaggtagttttaaaaattactcacgtattcaaatgaaatgcataagtttagcatttgctaaatttgagatattttatttcatattatttgtaaatatatttttgtttggcgtgaatttstaattcactaagtttcttgtagattaaatttttcttagttgtaaaacttcaggcttaaaaaaagtattattattgttacaatttacactataatggctaaacttgcccctcctccttaaaagaaatataaactaatttgcaaaaatatattttttgaaaagccaattggtgaatttgtagacttgtaaatgttaattcaggaacagagttgagtattgctggaccttctaaccatcactcatttctttctgcccactaaactaactggtaggcaggtgcagatgttacaaaatctagcatcgcaattgacactaattggcatagttgttggcagtcttatcagaaagcaaagggctgaatggttgaatgggtttagagaacttgaatggtaataagcatttttatatgcatcttgaattacttttgtgacccagactaacaggaacactttattctgacctcattcttcaatgaatagaaattgtagaaagcataatatgcagtgtatgtgatgactgattgtttttcaggtaaccttttacagctatctgctctgttgcctacttcctccccccactacctcccttcccagtgctcagagaaaccaaagtactgtaaatgtgtggaataaaaaggagataacaatcattaatgaatattgaattaatttatttgagtggtttgttgccaaaagcttgaggatgtcataagagttaggstaaacttaagaaaaagtattcattgaatttatggatgaaacaaaaggacgactgggacttgcttcttaatagtcttggagcaggtgggtgaatcagtggggatatggataaaacaggattggctttgagtggataagttttgaacttgggtgatggatatatagaggtttattaaaccattctttctgtttctatatatgtttgcaattttccagaacagaaaggttgtttgtttagtatgcggggtgacttcaccctctgctgttgtcaggttttttcaatacctgccagttcctttccaggatctgccttttctcccccagttccttttatcaaaaagtacccatctaaagtgagaactacatcacctgacaagctgttctgtgcgcttatgtataaatgagttattttctaggcagtgtggattttaataggagttttctaaagacactgccttaattaaaggaatggctcttgggttgggaattatagtgttggggtgggtctttgtgtctatatgtgactatatgtagaccactcttcacacttacagaagtgttaggtgataattttaggtgtaatatgatgattgatcttagttctttttagttctttttttttttttttttgagagttttgctcttttgcccagtctggagtgaagtggcgtgatctcagctcactgcaacctccacccactgggttcaagcgattcttctgcctcagccccctgagtagctgggattgtaggtgcccgccaccatgcttggctaatttgtgtatttttagtagagacggggtttcaccatgttggccaggatggtttcgaactcctgatctcaggtgatccacctaccttggactcccaaagtgttaggattacaggcgtgagccaccggcatggcctcatcttagttctctatgttagaggtaatgatgtctttttcttctgtagaaagactttccaaaaagaaagtgcttttctttaggactttttagaatatgttcaaaatactgatctttgactaaggagaggaagagaaaccaagatcatatttcagactattgtttcttttcccatggttttggcttatcccgagaattgacttgacgtgttcccttttttatttcaaagtagcattgcttgaaatattttagattttttatagctttctaaggaattaaactctaaaaacactttaactgtttttttgttgttgttgcttgtttgtttgtttgttttgatacagagtctcactctgttgcccaggctagagtgaagtggcktgatcttgactcaccacaacctctgcctcctgggttcaagcgattctcctgcytcagcctcccgagtagctgggactacaggcgtgcaccaccatgcctggctaatttttgtatttttagtagagatggggtttcactatgttggtcaggctgctttcgaactcgtgaccttgtgatccacccaccttggcctcccaaagtgctggaattacaggcgtgagccaccgtgcccagccaactgtttttttgtgttttttttatttttttttaattgtatcttgggaggccttcatgagtgaatgtagcttgctcattattttttgtaccattcccagtcattttctactcattcctttccttactagttttcagtttggccatgttctgtgtacaatttctggtaagtgctaccaaaaccaatatatattagacatgctgtttttcaagactcctgaaaaagtgccaatcttattctcctttcagtttgggagcacagtttcacaaataatagaatagtcttactttgtttgcagaattagaaggatttatctracaacttgaatagataattttttttttgtagacgtgaaagtgaaaccttagtattgggatagaattttaagtagcattttaaatttgtttcaaaatcttttcttattgcctgcctttcattaaatgagctatggtaagtatgctggggtgtatacgtgtgcgtggtgatgagatgtttacctctgtgtggatcccttgtagattttgtattgtaaaagtgcataatagagtcctttatatagctggaataactgtaatctgctattgtaagcatatatggatttttaaatacaaccattataatactttataggacattacaactgaaaatattttgacttaaaagttgctttattagtcttacaaaagctatgttgaagagttttttgttttttgttttttgttttttttttaaagaaccatgttgtcagtggtcaacaatcaaatgtaaaaaacacttagctggaaaacatccattaagataatgaaagtgagccacgatgcttgtgtcagtttttatattttagtttaaaacatagttttttagcaatcctataattataaatataagttagattttctctctaatttaattagataatttttattttaatacaatagatacttatcaaggatctgtcgttcttcaagatcagggcactgtgctgagttcttcatgagggccatgaaggaataatgcccaccctcacgaacttccagcctagtttggaggtgttgagattaatacagtaatgattgtaatataaggcttactctgataagtacattgagatataaagtgttacagagattcagagcaaggaaagacccagccctatttagcagtgggcaaggggtggtatgggtgggtggtattggtaggggcaggggggatgaggcagaaaatcaagagcaaactgaacaaaatgaatagaataggtgtcaggtcatggaagatggatggtagaattctgttaggctgaattggctagtccaaatttaaaaaatagtaggactaaagtttaggatatagtgcctgtgcacatttgctgaatgtaagagaaagtgggaagaaaaattgaaatgatagttagattgtgaccattagtacagaagacccagaggaccatgtggagaacttaattttttttttttttttaattaagcaaccagaagccaagaaggattttgaactgagaaaacttgtaagacacagtaaagccacatttgtaactggtctatcgaagtgaatacaactgtagcaggttggagatggggctttgggaaggttttcttgtttgatgggattgtcagtagtaaaagaaatgggaaggaaaagagttcacattcagcttagaagttgagaacaaaatttgrggagatagatgagagagatgtcaggtaatagttgggggttgggaagggccaaacaaacaacactcagttattggcatgtgtgttaggccgtttctyacactgctgtaaagacatacctgagactgagtaatttataagaaaagaggttttagttggcacatggttctgcaggctgtgtaggaagcatagcagcatctgcttctggggaggtctcagggagcttccaatcayggtggaaggccaaagaggagcaggygcatcacatggtgagaaccacagtgagcgggggtggggatgtgccacacacttttaaatgaccagatttcactaaggagatggcccaagtcattcatgaggaatccacccccattgttgcaggactttttcttggtttagctaaggatggggttctttgtcccatggccatgaaaattcaggcccacagacaatttgaatggtgagtaagacagggttttattgggtgaaaaggaaaaaaaacgggggaacagggactcttcaaggccagagtcctgctasagtgcttcctgcctgcagcttgaatgtttggttccacacaggaagaggaggggccaggttcctccctgctgcaaacactgcgaacttcctgaggccccaccccagtgcgcagctggttggaatttttccaagaaccccctccctcccacctggctgtctcattctcccctctaaagaagtacatctaactgccattagaatacggataaggacaaagaccgatcttaactgcttcctgctgacaggggatgctgttttggggaaacagcagtcagagatccctcaaaggcctatctaagsgttcccggcagaaggggccgttgtcagagtctccagttgcatgaccatttggagtttgatggcctgaaggcaagaacagacaaaccgggttgttagaaaacatgtatcaaaasgaaaccagaggamgggtaaagatagctaaaaaattaggccttttaccagtttgcacagggagaaggaggccaaaagcccgactggtcaggaaaacttcacacttttgctggcatgttgggcttctgggttcccttcccctgagcccagtcctaagccaacccgtttaaggtttgggaaattaactctttccagcttggaggatgcatctgaggtgagtgtatcatagtatagagacacaattacctatttgcaaagagagaactgmggaggagaaagaagaaaagaaggcgttttttttcaaaggagtcctgggggtcccggatgcattcaaaaggcgtacaaactgaagatgaatggctacctatctagaaagaggggagcaggtgtccctggttcccttctcttcctagcagatactcagggttagtgagggagagaagagagagcatcctctttcctttcttctatccttgcatccctgaatcccagcaaccttggtaggtgctgccatggctgtcaaatcaacttgcaccrgtgaagcagggggcctagggggtgagaatcatccactcttacccacgtaacgccctatctcccctgctgtcagtagctttgaattctgtatgccatggatactaatgtggcctttatccatgaaacaggaagccttggggttggcttaatcagcaggaatcagccactctcacctgtgctgtgccttttaaccttggtgttgtcatctgcctctggatcccttacatccagttttctttctagggctttgacccgaagcttggaattgagtcgggaacacaaatgtgtctcgaggggagttgtgtggactccttaccataagtggaatactaaggtgaaactgtggaactgagtcctcctccaacaagggagaggaaagcatgtcttgtgacacacccagataactggtgactgtagttatgcttgctaggatttgggtgcatggtgcttggctttggttcactcccttggtcttactttacccaaaggaaacctcggagtgatgggcatcctatttattcccatcccctggcaggatttacaggataattgctcagaactagaatattgatccagacttttacattacccatccctcttgttctttctgagctgcagccagagattgctggttggtttacaggaacaagcagggttagtctaaaatgtaggtgaaaacttaaaaacaactagtgagtttagaatttaatgacaaatgtatgataagttttggaacataatttctctccagtcctcatttttgttaaacaaaaaaaaattatgataggactgagtggtttgcaaagtagactttagtcttattctttgcctgaatatttgcataaaatgcaacaagaataattatttctacataggccttttggattggctttgatggatgtctattccacaaggaatctcagataagaccttttaagccgagcccagccatggctttctatcctcaaatacttgcgagttgggtggtcctctccttttaaggtcccaagctaaacttggagctcctggacctgttaggaagtgacattcttttttttttttttttttttgagatggagtcttgctctgttgccaggcaggagtgcagtaaatctcggcttactgcaacctccaactcctgggttcaagtgattctcctgcctcagcctcccgagtagctggaattaaaggtgtgcgccaccatgcccagctaatttttgtacttttagtagagacaagatttcaccatgttggccaggatggtctcgatctcttgacctcgtgatccacccgcctcggcctcccaaagtgctgggattacaggcatgagccactgcgccccaccagaaagtgacattacttactgaccacaggtcagtaaccctttacagggactgcgtagacaggggtatgaggccattttccccactgggctcttactggctctgcaagtcaagattcactcctttcacagtgaaagccttggtaaaataaccactttctccaattgtgtcctgttgcaaaagaaaaatggattcttactacactgatgcaaacaactattttgtcataagttaagaacactcacagatagtttccaaattctagaggaagcaggaagagagaaacaaacatgctccaaaccttcatcacagtagtgtataccttacttaattattaaagtccgtaaacagttcaaaattggccgggtgcrgccgctcacgcctgtaatcccagcactttgggaggccaaggtgggcagatcacctgaggtcaggagttcgagaccagcctgaccaacacggagaaaccccatctctactaaaaatacaaaattagctgggtgtggtggcacatgcctataatcccagctactcaggaggctgaggtagsagaatcgcttgaaccgggaaggtggaggttgcagtgagctgagatcatgccattgcactccagcctggctgggcaacaagagtgaaactgtctccccacccaaaaaaagagaaaaatagttcaaaataagtttccttgactctgaaaaactaaacaaggatcagcaatattccaagcaaaagtcaaaaaggttgcttcaggtttctgagttcactccattaagttctcttgttttgcttgatatttgtgaacacttcagctctttatgagtcttgtactttttcctttattttaatgttacaatcttcaaagttattagaagcctgtatttgagaggacctgttaaaattctatagcttattataaaccatcttttgaaaaggattaaaacaagacaacaattgctgtgaatagctaaatatccagggtagttacagttagaaacacaactgacaaagaagttcggttatctccatggtttacaataacttaacataacaaccttaattatgattaatagcatatacttggacattagaattttagaaatcccatacaatttgggaacacatattagcattattcacaaaaatataacctaaagaagattgaacatcattttggcaatcccatgtaaactaaacatgttaaataatcctgtttacctctctttctggacattccaggggccctctggactatccgaaaagccagttgtcaggaaagacaattttgaaactgaagtttgattttgagaaggccgttaaacgttcaaggtttaaatactttgtgttataaaatagaattccagattaccataaattatttattttgccaaagtaatgactcagaagttttaaataagtaaaaaccttttatagccctttacgaattttgccaaagagcagattagcgccttacaaaaaccttgttgtgtttttatttcaatgctcaatctacagaaaaaccatattataccttttggaatttagtcaatatgttcacatagagaacctcttctgcaagattcatttccacaattcttccaccacttgtttgaaccttcagctttttcctaatttaaaactgtcctttaacctagacaaaaatttatatttccatgcctccttgtaaccttttgctaaaaaacacattttactgttcttacataccttgcatgtaaatctatttccagtagtcttaattacatgttataatagtaactcctagcaatttttaacttttttaaaacttggggctgggcatggtggttcatgcctgtaattccagcactttgggaggctgaggtgggtggattacctgaggtcaggaggtcaagaccagcctgaccaacatggtgagaccctgtctctactaaaaatacaaaaaattatctgggcatggtggcgggcgcctgttatcccagctactgtggaggctgaggcaggagaatttcttgaacccaggaggcaaagcttgcagtgagctaagattgcacgactgcactccagcctgggtgacagagtgagactccgtcttaaacaaacaaacaaacttgataagttgttttaattgtttaattgtgtgctaagtgctgccaaggtttgccttcttaattaagagcatggttatatgtccccagcccttaccagttgtgaagccagcaagtcaaatagttcttaaaactcaaaaagcagcttgtaacctcaaaatacttagcaaactttgtatctgacctgcattgtttagtccacctatttacattttgacaacatctgctctttaccaataatccttaaggctgtttttgtttctcaatgattaaagtcacgtgaactgaaaggtatcacagtttttatcttccctttaaaaaatattagatccaagtgcttgtctttgtttaggccaaattaattagagctctttttacagataccacacacagtatatacacagacaggcaaaagaaaacccagtcactgggtggggccctttaagagacagggctaggaagacatgcagatatggaaccagagagggctcatcccctaaggcaggattgctaaacaaagccttgccactggagttagaagccatgccctcaggatgtaaaacaagatggaagcctratttcacaaccaacaccttgcagagaatacaaacagtgatagttccggggtgggggtctggcctagtaaagtgttttctaaaagagaaaaaacttaaaagttaactgttgacagggtaaagtaggaaaaaaacaacaacaaaacaacagcaggttaaaaaatgcctrggaaagaaccttttattctcatgcaagtggttctttcaccgaggagagaagcttaagcttaattactgtccgatggagttgaaacccttggctggggaaggggaaggctccagtggctcgtggcagaaaatgccagccagccaccccgggtgcccttggaccatgtgtccaagcctcagcagtggaggagggaggtagggagctgctgctctctggtccctcccraaaaaggaagaaaagggctatggaaaggtcgggttggttctcaacccctgggagcagcaggcggtgggggcacagtttcctccaccctcagaaatctcaggataaaaaggcttaggagccacagtgaaaggttttgagtccccatttcactcactgcttcttgagccccacattgggcgccaaaaatggttcctggacttttccttagttcggctaaagatgaggttctttgtcccatggccagaagaattcaggcttgcagtttgaatgggagtaaggcagggttttatagggtgaaaagggaaaaaaagggggaacagggactcagcgaggccagagttcctgctagagtgcttctcacccacagcttaaattcctacttccacataggaagaggaggggccaaacggtgcagatggtgaggacttcctgaggctccaccccagtgcacaggccagttggagtttttccaggggccccttcccgcctggctatctcaccatgatcggaacacctcccactggtccctacctccagcagtggagattacagttcaacatgagatttgaacagggacaactgtccaaactatatcagtgtgtcttttagagttggccatttttgtcacccccactcgtttatttatttttttgagatggagtctcattctgtcgcccaggatggagtgcaatgacatgatctcagctcactgcaacctctgcctcctaggttcaagcaactgaacctgttgagtagctgttgggattacaggcatgccaccatgcccagctaatttttgtatttttagtagagacggggtttcaccatgttggtcaggctggtcttgaactcctgacctcaagtgatccacccacctcagcctcccaaagtgctgggattacaggcgtgagcaaccatgcccagcctgtcacccgtacttgtgatatgattcaacaaacccgtttctatggccaaattggtttgctaattaatgtactatatggactgggattctttggtacaaaacgtgactgtccaaatagcctgactaattatctattttccttaattttttgccagggaaattttttttgtttttgttgttgttttgttttgttttgtttttttgagacggagtctcgctctgtccccaggctggagtgcattggcatgatctgagctcactgcaacctccacctcctgggttcaagcaattctcctgccttagccctctgagtagctgcgactacaggtacatgccgtgatgcccagctaatttttgtatttttattagagacagggtttcactgtgttggccaggatagtcttgatcacttgacctcgtgatccacctgccttggcctcccaaagtgctgggattacaggcttgagccaccacgcccagcctgccaggaaaattgtaaagtctacacacagtggagctactagtgtagtgagcaccatgtgcagttcttgcggacctctccttgcacaccactgtttttattctgaagtattttatagcacgtattgcagtcctgtaaattgatgctattttttttaaagtttgttgaattgcagtatcctaaattcccaaacccatgtccacygacaacctagcacactcttttttttccccaagagaaactcgtttcttattaaattttgcattagtgtcaaatcggttgactgttttttttgttaaagcactgtcatatttttttctataatatatactctttgacctactgtgaaatatatttaaagtagaagatttatgtgtatgtcagacaaattgtgaaagaaaatagtagcaaacttgttagttagccagataatgtgaggcagtttctcactgtctgtctttgaagggagttgcaaatatagaataggggaaagttaaaataaatcctacattgttgaaatgtttggaatcagaggtatcaatgtgaagtcattttttttttaatcagtagacacagaaacagatttagatgtatttgcttagggcttaactttacaaacttggcagaaaccatcttaaccagtaataaagtaaccttactggtaatgggacaggtgtgcctcttgattttttttttttttttttgagacatggtcttgctctgttgcccaggctggagtgcagtggcacgatcttgactcactgttacctctgcctcccaggttcaagtgattctcatgcctcagcctcccaagtagctgggattgcaggtgtccaagccatgctaattttttgtatttttaatagagacagggttttgctatgttgaccaggctgtgcctcctgatttgatgctgaaaaaagcacaacattacttctgtggtattccagataaaaatacattaatcaagaggaaacattttcccaaattaactggtctatgccctgcaagtctggaaagtgtcttagtcaatttggactgctataataaatataccgtagaatgggtggcttaaacaacagtcatttattcctccagttctgtaggctgataagtccaaaatcaaggtgctggcagatccggtgtttggtraggacccacttcctggtttgcagatggccatctttcttgctgtgttcattcatggctgagagcagagggagaggaagcagctcttgtgtctcttcttataagggcactgatgccatcaggagggctccacccccaccacctcattacctcccaraggtcctgtctcctcatactgtcatattgagagttaggcttttatcatatgaattttgaggggacacaaccattcagtccatagcacaaggaaaatcatgaaggacaagcaaagttaaggaactattcaggttgagagagacaccaaagagacatgaaaactaaatgtatgaacctaaattagatcttagacataccataaaggacattattagggctattagaatttgaatagagtttgtggattagttggtaatattgggttaatagtaaattcctgttttgttgactgcactgtgctgtcgacaaaatgttagtgacagcaaaatgttgttgatagcacagtgcagtcaacaacatcaggaagttactattactccagtattgccatctagttcacagactctgttcacattcactaaggagagggtccttgtacttgggaataaatgcggaagtattaaagggtaatgggacatcataaaatgtattctttactgctcagaaatgttagcagctagggaatctgggtgaagggtgtaagggaactccgtgtactattgctataacttttatgtatatctgaaattgttttacaagaaacaaacaagatacaaagaaatacctccccaggatgtttattagaacaatagaggctaactataccatttttctatttcttattaggtgcaataaaaggacactggtaactgtaaatttaacagttaaaagtaaggtcatggcggtggcttacagctgatagtgccctgtatactctgtrcaagtgcatgctttattatgatcaacctaatggatagttagttttgtttttttttaaaccagggtcttccttgagatgtaatgggcacagagtaaacggctgattgttagcttattctgtggatgtatgtgatgagtgggtctggggcatcagtttctatatctcacctttacctatcaaagaaattggacaaaccatgatagcraacaaatgaaaagaaaaaggagttttattgttcatgcttacaaaagaatcctgttaatcaatttgtaatccaccaattattttgggaataaaattgtagcaaataaatttaagatagaaacataaaactattaaacatgttatttgtattataatgtaaaatataattaatattttagtatgtacatattaggaataatgtcactggtggccccagaggctaaaaaacagaatgcaaacctgctggaaaatccttggtagataggagcatagaaaacagaatatcaaatgcatttattgttggccaggagacatggactactaggggaaattctgagtgtctaaggatagtactagaatgctaaacagtcacagataataatataaagtaggtaggattaacaagaaacagcacatcacagtcacaatgtgtgggaattaggcaaaggaaatacgtagccatttttatggacgtcttatagtccacttagrcaatagatgtattctgtggtggtaaaccaccagcttaggtaatgggatttattggaggacatcagtggtagcaaaatacatatgaaaagcaaaagcatactaataggaatctgatgaaattaasagaataaataatggaggagatattagtgaagaacaagaaaaattgaagaacagtaaaagtaggcatgcttggaaaaggagaaaaatagatctctaataatcatttttggggaggagtatagagcgtcactaagttgaactaccaccaacagccagcattcattgagggcttattatgtactaggtgctgttctaagggcttgacttcattcctcacaaccactccttgaatatgcattttacatatgagaaaatggacacatgaacaattaggttacttgtggaactgaggttcaaacacaagcattgcgaccattcacggcaatactgcatagaaacacaggattccaccataatcaggtaggggagcgaaaggcagtttcaattgttctttatgtaaagaactcatctacctggagttattcattaagctgatataatttacagtgtgatctgcagagaatgaccttatcacaccaatccaaaagaaactactactataattaaactgtgggcaaaataatgtaggatatttttgtagaccgtaaaactgaaattaaagttgttactgatcaattaatgaggtgataattaaacagaaactagccaacctgactgattgtagaccaatacctaaaatttgtttttgcaattcacatcctttgagatatatttaattacatttataacacatggatatttaatataatcttttgtgacagattgacagatcttcactatcattatgtgtaattcctcttgatgtttttgtcattattacatatatatttgggagagaaataaaaggctgtttccaaggtgatggtgataaagagcaaacttataaaaatggttgcctccttttgtttgtataaaacaaccatctcatttccctctgggaggtcactagaggtatgatagctctgttttgaaataatattttagtaaataggaaagcagggtaaagaaagcctcccctttttgtgttatgttaaggtttaaaactgtgttacagtttatactaaaacattaagaatcaattattataagagcattaaattgtttgagttttgtcatgctttgcctagaaatcagcactgaagcgagtgacttagcaacgttattagatctattaaataattggaaatttatgtgcttattgtcagcatcttggctttttagaattttaaagtatgtttgtgcttcacatctctagttgcagtttatgtagaatttagtgaactataataacgttggatggtggtaatgtcacagtgtaattaactgcatagcatacaaagttctttgttaatggggaatgggatatacatcatctatttgatatataagttaataatcatactttttgttagcagtagttaaatgataagaactaaaaagaagcaataaacatctccatctctaaaacagtcttgcaaatatgcagtgagcatctactgtatacaagcactatatcttcatatttagattacatttgctattttgcttttcacatgtgaacttaagtgaaatactctaaggagtattgcaaggtaattgcccctataaattacataatttatatggctctttaacttttttagatgtaaaatgggaggaggagagcgttgagttggagtgtattatttctaggattctttctagcccacaagtcgaatcagaaaacagtggctcatgcctgtaatctcagcactttggaaggctcaggtgagaggattgcttgaggccaggagatcgagaccagcctgggcacatagtgagaccacacctctacaaaaaaaaaaaaaaaaattagccaggcatgatggcaaacatctgtaaccccagctactcaacccgctgatgtgggcaaattgcttgagcccagggggttgaggctgcagtgagctggatcccaccactgctttccagcctgggtgacagagtgagaccctgtctccaaaacaaaacaaagcaatcagaaatgtacagatctttttccacagtttgtgcagaacagtcacttctaagatatactatgaaagtctattacaggagcaggaactagttattcctttctgagaattagatataacttgaccaacaaatcggttttttatccttcatatcatcttcagaagtagaagcaagrtatatgatcaaagtctttttaaaaatagcagaataccggggtttttattttatattttcactctgcacaatgctaatctccttaacatttgatgacaaagaaaaaacttggaatttgtgtatgacaaaaagaatgacttatgaggtgaatcgaaaacactttttacagcctctgtcttcctaaagtttattgtttttggaaatagttttttggcaaatattttgttttgtaagttttacatttctaaagttgaataaaattaaatgtttagcaggtgcttgttgtaatagaagctataatattttaactatgtcatgaggtatctctgaggaagtgtttcttttttgttttttaatggtaaaggatgtcagtaatatctctcaaatgtcaaattaatttagggtgtgtactttctttttccctatgatgacgtagataggaaaatcgaatgttccaaacaactcatggaaaatgttccacttcagcgttatttgtaccacaaatgcagtgaaatgcttttaatggaatccagagtgataggtggattatgacatgtggggagatgccttcttgaaataggacataaatcatgrttttttttttttttctgagacggagtctcgctctgtcgcccaggctggagtgcagtggcatgatctcagctcactgcaacctccacctcccaggttcaagcagttctcagcctcttgagtagctgggattacaggtgcccacsaccatgcccatctaatttttatatttttagtagagagaaagtttcaccatgttggccaggctagtctcgaactgttgacctcaagtactccgcccgcctcggcctcccaaaattctgggattagaggcgtgagccaccgtgcccagccaaatcatgtttttgaacttgttttaaatatckgtgtgtgtgtgtgtgtgtgtgtgtatgtatttttttttttatggagtcttgctctgttgcccagggtagagtgcaatggcacgatctcagctcactgcaacctccacctgccgggttccagtgacctcagccgcctgagtaactgggattacagacactcgccaccacgcccaactaatttttgtatttttagtagagacggggtttcaccatcttggccaggctggtctcaaactcctggccccataatctacccgccttggccttccaaagtgctgggattacaggtgcgtgagccaccgcgcccgaccagtattatgtatattctttttgtttgtttgttttttgagatggagttttgctcttgttgtccaggctgcagtgcaatggcgcgatctcggctcactgcaacctctgcctcccaggttcaagcaattctcctgcttcagcctcccgagtagctgggattacaggcatgtgccaccacgcctggctaattttgtatttttagtagagacggggtttctccattttgggcaggctagtctcgaactcccaacctcaggtgatccccccgccttggcctcccaaagtgctgggattacaggcgtgagccaccgtgcccggcctgtcatgtgtattctaattataaataattttcaaccaaactgatatgtttggttaagctggggaaagttttcagaaaatagagtacactgagatgaatttcatgaactgtacccaccaaagccttgtcctggttaattcaaatttataatgccaatagtttaaattagcatttagcctttaagtgacggtggaatggtgaggcatatgatgtttttataccaaacactccgtgctccatgtcttttttggagtttacacttttcaaaaacaggcggcacttccatgtgtttatttccccttcatctctgtttagtgaatgattggtttcatctttacaaagattattctggctgtagtggggagaaccagttggagatatggaagatgtatgtggggaggccagagtatcgtggcagtctgcctgagagatgcagtggccggggtttggtctaagatgttattggtggagacggagagaatttgcggtatttgagagccactccagcctccattatttctaattctatgtcctctacccttctctgtcatctctccactgcctcccagccccttccamtgtgccccctgtattgcccactttcagaccaacagccttttgtatcagccttttctggaatgttccactaattacttaccctawctaaaaccttagggtagttttgttctcataccacacgcacctccaagacaggaggtgggattactttcctcctygtgtcattcaggacgactgctccgctctttcttgtaagccctttcttttttgaaatcacatcatcagtcttcactacctcatcttcctcttggcaaccttcagctccccttccctgtatccctctccctgcacgtgaagaccagcagccagttcctggtctgtctgtctgtctccatacaatcattattccctgtattttctctccatccacagacaccactcctgtttttacatcctttatccaatccctggcctggcattatagtcactcactcatgaatacccttaactgctcactccttcattcttccatcagtctcaaacttagaggaactctgcctccaccttcccyatgcctgcgcatgagcaccttaccatggctggtgaacgtcccataccaagggcacagttaacatgcgtctgctggtcagggccagctgagcatcctacactgggcagaagggttgctgtttctctgataacttctcctcccttatcctcagtgattccttcctgtcttcaccactgtattcacatgtcccacgctcctgctgcagctgacactacttctgaatgtccctcttctctataccaccagggctctagatctgatcaccatgactttyagttttatttcctctaattcattgtccaagctatagcctgcatgatctttcaaaaatggacagtgtggctcacacctgtaatcgcagcactttgggaggccgaggtgggcagagatcaggagttcgagaccagcctggccaacatggtgaaaccccgtctctactaaaaatacaaaatattagccgggcatggtggtgtacacctgtaatcccaactactcgggaggctgaggtgggagaatcattggaacccaggcagtggaggttgtagtgagccaagatcatgccatcgtacttcagcctgggcaagagagtgagactccacctcaaaaaaaaaaaagaaaaaagaagaaaaaaaaggacagcagacaatggcactctgcaggtggaactgcttcatgtttcccactcctgtccctgttcttcaagagccggcctccccttctctctgctccatccacatgggtttcaaagaagcttagctctttctcaccccagggtttttttctttctttttttttttaaatatgatattccttctagaatattcccacacacccatcactagcatacttaattcctactcacccttccagtctttgctcaagatcacctcctcagagaggtccttcttcctgctgacaagtaaagaataatgagaattcagaagaggctatagaaattggctgggtgtgatggctcacgcctgtaatcccagcactttgggaggccgaggtgggtggatcacttgaggtcagaagttcgagaccagcctggccaacatggtgaaaccccatctctactaaaaatacaaaaatwagccaggtgtggtggtgggcgcctgtaatcccagctacttgggaggctgaggtaggagaattgcgtgaacctgggaggcggaggctgcagtgggccaagattgtaccactgtactctagcctgggcaacagagcgagactttgtctcaaaaaaaaaaaaaagaaaagaaaagaaattgctgaagatttgtgatttttcacaatacagttttagtagtcagattatagaaggttatggggaaaggtgtatggtaagaaaatagctgcagagaacttgttttagaacctgtcagagaaaggaagagacacagttagggagctatggagtcgtgcatgtgtttgaaagcagaggcgagacgccagtgtagactgaaagctggagaacagcgaagttaaaaggattaactaagaagcagagagggcatgagatgggagtgaaggaaagagcatggctggttaggcgagaaaataaggacttgggcctatggcttcgattttggtaaagagaagaagtcatctgctgagagtagggggcagggttataattaatgtaagtttggtgcacttgagtccttggtcaatttcagggcaaattatataatctttgtttacattagcatggctgctaaacacctctagcgttgtgtctttggatagtttatgaaatacagagttttttgcataatttaaactactccagtgttttcacagtgctaagacattttgataatattgtctgccttgaaaggagcagattttacttgtgcctcaggatattatgtcatttatcacttcacttttggcttatttttctttttatccccacactgaatttgatttaatttgttagcttttattgtcaattaaaggcaaaatgtcaaaaagttctaacctcaaacagaggtatgtgagcaaaacactcactttataatattggaaatagccatattagaaattaaatgtctgaggtcagatatggtggctcacgtctgtaatctcagcactttgggagaccaaggtgggaggactgcttgagcccaggaattcgggaccagccctggcaacacagtgagaacctgtctctccaaaataaattaataaatatataaatctggaggtggtagctcgtgcctgtagtcccagctacacgggaggctgaggtgggaggattacttgagcctgggaggtcaaggctcagtgagccatgatcatgccactgcactccagcctgggtgatggagtgatgccctatctcaaaaaaacaaagacattaaccatctaaatacatctgaaataaaagggctttgtaaccacagaattatagatgtagcagagatatttgaccttgttagttcaggtctcttycagatgaggaagagagattatctgaaacacattgtaaaatttggtgttgtagttgaagtctgtaaatctacaaccagagaaatagaaattagtatccacctgttaactcaaatgcagtttaaaaaaaacagctacgatttattgtgtgcctactagtgaaaggtctgaagtggttgttgattgcatattgtaatgacagagaaaatgagcacacttcacttgaaaaaaaaactttagagtggatgtagtggctcatgcctgtaatcccagtactttgggaggccgtggcgggccaatcatctgaggtcaggagtttgcaaccagcctggccaacatggtgaaacaccgtctctactaacaatgcaaaaattagccgggcctggtggcaggcgcctgtaattccagctactcaggaggctgagacaggagaatcgcttgaacccgggaggtggacggaggttgcagtgagctgagattgcgagactgtgctgcagcctggtccacagagtgargcttaaaaaaaaaaaaaattaatgtactgtatgtatatatggtacaaagttcaaaaagtccaaatggatttgtggggaaaaacaagcctccctttcatacctgttcctcagctattctgtcgctcttaagcatttgtccagagatactctttgcatttaaaaacacacatgtatagttatttttttcttaaaaaatgatagcacactgtatacactattctgtattttcttgaaaatggtttcaaatcaatatgtatagagatgactcatttttttaaagaaggggcactaagtttttacattctacagaatatgtatttatttgatatactttaaggaaatctttgctgggtgtaaaattgggggacaacatttccttttttttttagtacttagactatattgctgtgtggtcttctgtatctgtgttgcttttgagaaattagactgacctgagtttttttcctttcttgtacatgatttcttattttttattttttttgagatggagtcccgctctgtcgtgcaggctggagtgtggtggcgcgatctcagctcactgcaacctctgcctcccaggttcaagcgattctcctgcctcagcctcccgagtagctgggactacaggcacccactaccatgcccggctaatttttgtctttttagttgagacgaggtttcaccatgttggtcaggctggtctcaatctcctgaccttaggtgatccgcccgcctcggcctcccaaagtgctgggattacaggcgtgagccactgcacccarcccatgattttttatttctaacttaatacctccatactttctttttattctcttcttttctttcttttccttttctcttctcttttctttctttctttctttctttctttctttctttctttctttctttctttytttcttttctttctttctttctttttttttttttttttgacagcattttgctctgtcgtccagcctggagtgcagtggcaaaatcatggttcagtgtagcttggaaggcctgggctcaagcaatctcccctgcctcagactcctgagtagctgagactacgggcactggccatcatgcctggctaagtaaaaaaaattttttttgtagagatggggtctcactttgttgcccaggctggtttcaaactcctggcttcaagcagtcctcctgcctgggcctcccaaagtgctgggcttacaggcgtgagccaccatgcctggccataattctttctctagccttaaagttctataaacataatcaatccacaaattccaggttttacttattttgacaagttttatcctgttatgtatctttgaatgtacatttgttctttttgctttgtgagcctctttggacagttacatattctttctaacccccttcctcctccatatctgttgtcttctcagtaaattggttttatattgttagtcttatctatttcattttatatgatttcttcagtccttatctttcttttagtcacatttattctatttttggttgcttcttaatgtggcttttatctcaataatgttatttttctctccattttttttctgagttcyatcagcttgactttcatttccttctgttgttgtataatctcttctttgaacctttgtttttcttctttgagctctttttttatttttatttttttaagaggggtcacgtttcctatggttgcctttgagactttggagaactatttatctgaactcttcctgtgtttctttgagtagttcttgtgttatatgctactaatttacctttttctctgagttttttttttttttccaaattgtatgcagacatcgagtattggttgttttctgagtgttgtttatgttgaaataggccgggagggtaggtgaagcaggctacagccttttttttggacatgttacttagtcatttctcaccaaatctgttatttagtttgaaagggtaggctggttcttcgtgtcggagtctatcacgaaatgccacctccactccacatctgccccttcagtgacccttgactgaagggttgcatgtacacagtggatctggcatggtaacaaggattcttcggttcagccagcccacctttctctggtattaacccgtggttcaaagagacattctctacttctcctttggcctatacttccatctagattccctccttggatgctagcatcattagaatcactgtacctcttattcgggattatgtatctgtgtattgctagaagcctgagaaggcctgtgatggctttccacacatcccttgccccgcttatactggcagataggtttcagtttatgatttggagtcatgatagcttccttgtttcagttgtgtagggaagttgcaaatttctactcatgactcattgtrtagatgatgaaatgtagtgtattttctatcacctatcatctttgtcagaggccctctacctttagtagtggatggtgggaagaaaaatttgtgagtaaacaggatcttggcctctgttggtttaaacagtctctttggggtaatgtgtttcagttttcttctatccccagcttctgctgaggtgaggtctgggagcagtgagagaggcctttgggaatgatgcttagatctgcctcgcggcgctggcatggggagaacgtagactcacacgcagtcttcctgaggctttgctacgagggcctgggtgggtaaccactgagtaacatctctcgctgttgaggctttgaaagccttgaggaggcttctcctgtccttagacctactacagtcggcccatgggctctgcatctgtggatccaaccaactgcagatatttgggggagcggggaggaaaagatttggatctgtactgaataggtactgccttttttccccccatctttattccctaaacaatagaggataacaactatttagatagcatttacattgtattaggtattataattcaaaggtattataggtaatctagagatgattcaatatatggaagaatgtgcctgggttagatgcaaatactacaccattttatatcagggacttggagcatccccggattttggtatctgcagggcggggcgggggtggtgctcctggaacccgcctcccatggattccaaggatcacctgtatttgcctgcagtcatcatggagttccccatactgtgtggtcttcatcctgacccagaccttcactggtcagaacttcaggattcctatcacgatgtacttgggttatttgcccagcccctccctccagccatgctgcgctgttgctgccacgccatattcagaatgccacaaaactgagccctgggcttcactgcaagcctgcagcctcccctacactgtgtcccagaagcagacctcttgcctggatatttttagggcaccttatacttgtcagaatgttttcagcaatctttgtccactgccacccccgccctatccccaagggtccagcagaagaggaaatagtgaagtctctgataatctgattttaatgagtatcttttaagagaaataagtgatagtgggggaattgttagggatcatatatcatagttctgctgcaggtttatctggaaacttgagcaagattaagtatcaccttgttaggttgtctaccatataataataatgtcatctgtaagcctctcatattaaagagttagggaataagcatcagtgagtgaaaggaagaaaaccaatagttctttcattttaaattagctatgatttttaaatttccattacttttatatttatttggaaattattttttttcttttacgagtatccctgttttgaaagattatgggtctttttttgcatattcatgaaggatgactggatgaaatcagtcatttatgattgacagaaatatgacagaactttgcaaagtttgaatggacttttgatattcaacaccaaagaattttgtctaattaaagcttctgtttaattaagataacaatgcatagtccttcattaaaattaacacagaaaaagttcttccttggtccttggagaggatattatatgcaagccctgttgtgtgggttgcaagatgtcactggaatttatatgcattacttgtctaattgcagtaaatgtagcatgtccagataggtttcgagttagaaggctgtttgttacttacggaaatcacttgaagcctcagtacccggaggcagctgttcacaggtccttcacctctccccagagatgactgggaagaygctgttgttggaccctgtctttcttggctggagcagtaaacatgacargttgtttgggagccatctgtttaaaatggctgctgctttgtatgcagcaatgaacttgagatcagttttctgtctttcttcatggtaatggtcttatttggtgtcacaacaggtggaagttgatgggtcgaaactaaatgtgaccagcacgtggaacctggcttcgcccttattgtctgtcagcgttgatggcactcagaggactgtccaggtgagtgttgtaaggatttccttagagggcctcctcaagtccagaatccttgtcagcacctgtgtggctaatacttagagctataggagggaaaagctgtattttattcaccttatactttttacagtcgaaaactttttcttttcttattttagaggatcttaagttttaacctgagcatttaatgttttcttttttcagacaatccaagaaggttcatgtattgtactttgttgtaaacaaggaattctgcaggcttttctaaaaatgctagattagctgtttttttttttcctctgtgggtttttagttgtaaaatacaacttactttgttacctttcttttctgtgcagttgaaattacgtagtgttaggctagtaaaacttgtgttattcaggttgactttccacagctcactgatgtcctttaaaaatttagtaatcttaacttattaatctttcttttcgcctcaatataaaatgtcctgccttgaggagatgccttggaacccagagtcgatagaacattttttgtaacctgtgacttccattttaaagtagaaagttatgaaaagagattctgccaaaattcttcaccttacctcatatttgaggtttagcgttttaggaaaaaaaaaaaaatcatggaacatgtggctatcacaggctaataaaaatctagccccacccatagcattaaatgctcattctttgttcttttttatgaaaatcatcttaacttgattttacacaggaaactggttttaaaaaccttgagaaatcaggataatcacagattaagactacttactccatacctgattcttatctacctctatgagagaccgggatagtggacatcagaatccacaaaaactatgtgatgactgaactgatttctaagtcagtttcaattgatatattatctctatggttccaagtaaccttgaactcttggtaataagccctatattttgactttggttttgtgacttgtcccagtatattttttctcatttttttaattttctaactcctgtcttttctcatattttataacttaactcatattatataactttatataatattatatcagtataaattatgagttgaaatagtttaagactcttgaaaaaaatatcactacataatttcacattacttagatccatgtattattatgtctttaaaaactgtggtgtctgggcacggtggctcacgcctgtaatcccagcactttgggaggccaaggcaggcggatcacctgaggtgaagcgttccagaccagcctggccaaagacrgtgaaaccctgtctccactacaaatacaaaaattagccgggtgtggtggcgggcgcctgtattcctagctacttgggaggccagggcaggagaatcacttgaatctgggaagcagaggttgcagtgagccaggatcacgccattgcactgcagcctgggcaacagaacaagactctgtctccaaaacaaacaaacaaaacaaacaaacaaaaaactgtggttttgttatactggtttatgttcgatagactgtacagtgcatcgaatatgttatggctcaagtgtttgtcagagggacatagtgttaactctcagtagtcagaagaaagaggtacaaactcctattatgcaaattttttgtattgtgttactttcatcatccttttcagtgagtgcgcagatagttgtcttgatggcacttttacatgtagaatttatagctagattaatagggatacatatgtagaataatcaaaaatattttccctagtgtagggatcatgttcggtaaatccctttttaatcctgtaagtactttgctactaaaagaattaatgtgtctgaaataagtgaccccttaaagagagatcccttgactcttaggaagaggtcgttgcatcaagttaagtactctctaattggaaggaaataaactcagagaggtaaatggtgtactaggaaaaacagtcgtttacctaaaaaaaaaaaaaaggtaaggagagtttttccttgtgaaaggggatggattttatttactttctgtaggcattagcattatatcgactctttccaaaaatgtaatgtggcccctatgaagataataacaattgtagtaataataaataacacacagtgcttactgtgttatcaggtgtagttttaagcatagtacagatatgaacttctttgatcttcacaattgtatgaagtaggtgctatttatagttttataaatgagacaactgaggctcagagaaaagtaagtgacttactcaaggtcaccagctagtaagaggtaaagccatgattttttttttttctttttaaatgagacaggatctcgctctgtcacctaggctagagtgcaatggcacaatctgggttcaccgcagctttgacctcccaggctccagcgatcctcccacctgagccccccaggtagctgggactacaggtgtgcctgccaccacacccagctaattttgtttattttgtagagatgaggcctcactatgttgcccaggctggtttggaactcctgggctcaagcaaccctgcctcctccccgaccccccctaccccccacccccacccccaccccccccacaccctcagcctagatccatgatttaaatccgagcagtcttgctgtaggtaggatccttgccatcaagcattgcaggatgctgaggcaagctatgtaacttcctgggcatcacaaagctaggaagaagcagagcaaaaacttggtccgtggcagtcatgtgtgctttcccccactatgctatagtactttgcgatttttcctatcacattcttcttcaaattataattacctgtcattcatgctttaaaccagagatgcttaaactttaatatgcttcagaatcaactagaagccttgtggaaactcaagttgttggacccacccatagcttactctgatttagcaggtctgggctaggtctgcatttctggcaagcccccaggtaatgctgctggtctgggccacatttggacaccctctgctttaaacctttgtagtcagagaatgagctgaggagtggtgtgccccagcaaggtgggtaggaaccgagtcacatgagccttattaaggacataggagaggctctactttatccctaggtcagtagggacccgtggaagagctttcagtaaggaagtgatgattgaacagaattgtagcttacgaggtttttttggtttttggctgctttgtggagagtggcttgaagaagcatgaggtgaagattggaggcaaagagagaagtcagcagatgttagggattcggaggtaagaagtctcagcagctgtggggatgagggcactgtgtgcagaagggatctgcaagcgtgacaggagaaagaactggtggctttacagtcatctgctgatttctcttctgaccactgttagcatgggcaaacctccaaattctattcctgactcccccttttctctctctgcttgcttcctgggctgcattgctccaagagttccagcttaacacctccaagcagatagctacgaaatgcaattataagtgtttgtgtgtctctttgcaattgtttattctgagaaataagggatgaatattaccaaaggcatttttcaagtgattttacagtaatcacttgaaattgattactgtagtaattgattactatagtaactgtaggtactttaaagtaataactacaattcttttttctctggatttttgagcatacatataaactttatattcttaaatagtattaaatattactatttatcattaacttgtatcattaaattttattattaaacctcatttaatataaaataatatgtattattattattttgagacacagcctccctctgttgcccaggctggagtgcagtggtacgatcttggctcactgcaacctctgtctttcgggttcaagcgattctcttgcctcagcctctggagtagctgggattacagacacgcactaccatgcctcgctaatttttgtatttttagtagagatgaggtttcgccatgttggccaggctggtctcgaactcctgacctcaggtcatccacctgcctcagcctcctaaagtgctgggattacaggtgtgagccatcacacccagccaaaaatatttattatatctatataaaagctaaagaatgacccaatgaaaacctgtttacccactatctagattaaaaaaaagaaaacaggctggtcactgtggctcacgcctgtaatcctagcctttgggaggccgaagcaggcagatcacctgaggttcggagttcgagaccagcctgaccaacgtggagaaaccccgtctctactaaaaatacaaaattagccaggcatggtggcgcatgcctgtaatcccagctactcaggaggctgaggcaggagaatcccttgaacccgggttgtggtgagctgagatcgcgccattgcactccagcctgggcaacaagagtgaaactccgtctcaaaaacaaacaaacaaacaaaaaaccaaaacattatcagtgctatttgtatcattcttccttgattaaatcctcctttccagtgtccctgaagaacaccattatgagttttaaattgatcactaccttgcttttctttagggatatttatgaatacaccaacactgtgagcagtatcttgttgagctgctcttgtttttgaaccttgtaattgcccccatcctctctgtgttcctccaggagttgtcttctccccaccagcatgatgtttgtgagcctggcccatgttgctgcctatagctgcagtttatctacttccatacatcatattaatattaccaccaattacttattctcctctaaatagacatctgtgttattttccttattttgttgtcacagtgatgcttgtatgaacaccctacttcctgtttcctcttgacataggaggttctccaggtcatgtgccggtataacagccatgctgtggggcctgtgctttctcattcctgcatggcaaggccaggtgggtttctctgtgtggctgtaccagcttatgtgcccatcagtagtgaagatgatagtcacaatgagaacaatgarctaaccttattctgtacttaytatgcccggcactgactgttctaagcactttgtatgtatgaatgcccccaaaaacccaataaagtacgtactagtgttatccctcattttgtatttgggaaaacagaagcttgtagaggctaaattgctttcccatctggtagtaaatgggagtgccagaatttgaaccaaggaatctgtgcccttaacattttttttcacatcctggtgaacccttggccttcccagactacttaggtttttcctgactggtgggtttagatggcatctcattatggttttaatgtatacttccctgattagtatgacaatgaacattgaaaatatatatttattggctctcttgttttctcttctgtaaaatatctgctcatgacttttgcccactttttaaattggattatctttttcttattgactcataaaagttcttcctgcgttatggctcctttttgtcgtatgtgttgataaagtagcttctgtttttattgttttaagttatccaagttaagttttaaggcaagatttaatgtcagaattttcaatattttcctttatggtttgtgtgttttgcgtttgtgtagataatcttgttctactcctaagctcacaaagatacctatattttcttttaaacctttttaaattgtgcttttcaaagttaactacttaatcctcatgggattgatttttgtacacggtatgagtggctcacgcctgtaatcccagcactttgagaggccgaggtgggtggatcacgaggtcaggagatcgagaccatcctggctaacacagtgaaaccccatctccactaaaaatacaaaaaattagctgggygtggtggcgggygcctgtagtcccagctgcgtgggaggctgaggcaggagaatggtgtgaacccaggaggcagaacttgcagtgagctgagatcgcgccactgcactccagcctgggtgacagagtgagactccatctcaaaaaaaataataataataaataaaataaaatacagataccaggccgggtgtggtggcttaagcctgtaatcccagcactttgggaggccgaggcgggtggatcacctgaggtaaggcgtttgataccagaccagtctgacctgtaacatggtgaaaccctgtctttactgaaaatacaaaatattaaccggggatggtggtgcacacctgcagtcccagctgctcaagaggctggacccctgcactccagcctgggcaacaaagcaagactccatctcaaaaawaaataaataaataaataaataaacaaacaaacagataactcgttatgccagcacaatttaatgatagtcgtgcttctcttcccttactaccttgccaccacctcacctttccaaccccgaaattctttaaaagcggtttctgtgattctcaattaattgtaaataaaaagatgatttttcgcttaatacgatcctcagtatatttgcttctgtgagctctcagtcagttgcactcttttattttttgttaatcttctggaaacccttagccaagggcatcagatgatatttgagatacaccttagaaaaacgtgtttgtgaatcaacaggcaaattgggaagtattcatttagggaagtaatgagagctaaacatggaaaaataggttggaggaccagatagtgaatgagagcctgaagaatctatgcttttcagtyagcagtggagatattacaactttttgcagagtacagtaacgtccatcaaaatgccattgtagaatattaatgtgtcctcataatagaggaggggttaagggattgaagggtgaagtggagatggagttcatttagaagacaatcctattactgccttcatcctccactagggtgcaagcagtgtagagaaaaagggggttgagtttgagagaaacctatgtttccatgcatagaaaccactttctgtttctatgaatttgactactgtgggtatgggtaccgcctataaatgaaatggtatagtatttgtcttttgtgactggcttatttcacttagcatactgtcttcaaggttcatccaggttatagcatgtgacaggatgtctttcctttttatggctgaataatattccattgtgtgaatatactacatgttgtttatccattcctctgtcaacggacatttgggttgtttctaccttttggctgctgtgaattatgcttccatgagcatgggtgtacaaatatctgtttgagtaccccattcttttgggcatatgcccagaagtggaattgctggatcacgtggtaattgtatgtttaattttttgaggaacctccatagttgctgcaccattttacattcccattagcagtgcacaataatttcagtttcgtgccatctttgttaacacttgttattttctgttttgtyttgttttttaataatagccatcctattgggggtgaagtggtatctcattgtggagcaggacttatctagatagtaactgaagaaaaagcattccgaatacttctaggatgtgtccttcctatattggtattactctgtaaccagttcactgcacaagtggcacttttttcagtccaagtagaagcaagtttcttagagctgtttttttttttaaaccctttatttcaacttctttccttcccatatataaaaccacataccattctaacartctgtaatgttgctaccaggtaataaacaagccatactgtatttgggagaggagggtgtgtttcaaagtctagttcattgtaatatmaaaactggtaaaacctctcctctctaaactcagtttgacctcacactgagaaacctttactagtgcagaggagaatgttgctttcttcttgcttgctttatattgtaggggcaaaagggtgtgatcccactcctccccatcataagggtgtccatggcagacactcctataacaaaagacaggttaacaagagaaaagtataactgatttatttaatcaaagttttatgtgacatgagagtcttcagaacagagatccaaagatacaaggaaagctgtccattttaatgcttaggtttaatgaagaatgggcagccgtgtaaaactgatgggacaaagaatgtaagtgaatgctagtaggctgagaggaacccagcaaggcctatgttcagatcttcctggcctctcttgtactatttcttcctcccaggtatgggacaagacccatctgggatgacggtcttatgacctgctactgttgtagagaagggtaggccagagaatttctttatgagcagctcttagaaaggcagggaggggttagagtcctstttctggtttcatagttgtctttgcgggagaggaattctgatgtctgtgactcatctcaggagagaatgaggggtgagagacaggaaggcagaaggtcagagatcttagttctgaggttacttctgaggccttctctttggggtatcattttctgagcctcaacaatacccttttctacttsagagctgctatattgggtctctcagaatttgcagtatggggtaaagatgagaagagcatggcaggaagaaccaggttttctggggcagaggcaacctggcattcactctcttggggcatggcagatgtccaaagctggccggtagccctgggatactttcatgtggatttgggggaacttctcacctgcagaacacttaatgcctcctgtcttttccagttgcctttggtctcctgagcaactactgtgttgactctgaatgttctcactgggcatggtccctcataatgaccccgcctgcttttctcctgcacaatccacrtctggccacaggaaatagtaataagtccttgcctcaccaaaccaacaaagtacaagcttctcttcttggtctgtctctaagaattcgcatgaataagtgattctcatgaagtcgctttcacgtagcttaagcagagttcagccttaaattctaagcttaagaattcgacctcctcaaattaattttcctcttttattcttttaaggtgggagatggacagtcactggtcccacagcttcctagcacattctaccaggtagccttggctagcatctgacttaaagatgtatgggtacttggcgtctacttctttttgttgctgaacccctgtgattccatgaaaagtagtgcgttcatctgttcttatattgctataaagaaaaacctgagactgcataatttatcaagaaaacgggtttaaatggctcatggttctgccagctgtacaggaagtatggtgccagcatctgctcagcttctggggagggaggcctcagggagctttcagtcatggtggaggcaaagcaggaggaggagcatcacagggcaagagcaggaatgagggtgagagagaacggggaggtgccccactcttttaaacaaccaagatctacctctgtgatccaaacacctcccaccaggccccacctgccatgtcgagaatcacatttcagcaagagatttggagcggacacatccaaaccatattaaggagcatttaacttctttatctgattagatgagtaagtagttgggaaggcaacttacctttgcttcaggaattagctcccgattcatccagtccgatcacgtgtattcatgttcctggttttcattggtaaacttcataagtttaatattacccattaaattcctttaaaagtaagttgtattttggtgtatactgtcactggtagagggtcatgattgcaagttatccaggttcttggcgttttgaacaaagaattggacaacatgtccagcaaagcaaacaatgaagcaacaacagaacaaaaacagggatttattgaaaacaaaagtataggcggccaggtgtggtggctcatgcctgtaatcccagcactttgggaggccgaggcaggtggatcacctaaggtcaggagtttgaaaccagtctggccaacatcgtgaaaccccgtctctactaaaaatacaaaattagcctagtgtggtggtgcatgcctgtaatcccatctacttgggaggcaaagacaggagaattgcttgaacccaggaggtggaggttgcagtgagctgagatcgagccattgcactccagcttaggcaacaagagcgaaactctgtctcaaataaaaaaaaaaagagagagagagaaagaaaatgaaactgtactccacagtgtgggagcgagcctgagcagtggctcaagggcccggataccgaatcttcttggttccaaatacctgctagaagttttccattgattactttatactcacctcatgtaaatgaagttgcagcctataaggttgcagaaagcagccaaccagaggctgaagtgaagttacaaaggtcacactcctgtgcaaacatgttgcaaagttatactcttatgcaaaygaagacttggctggcaatcagtctgattggttttggacagcaaccattcagagactggagtgaagttacaaagttgcaaagactggacccacagtcaatctgattttctgatttgttattggatgggaaattgactgtccgatttcccatctgccacacagaaaaggtgggtggtttgcaaagggagtagcccctggtccttttattacttaggtgtggaaagctaggattttcctttcaatttagttctaggaagttggcgtgaaacagccttgggttccctgcctccagaccctattctcctgcctcagtgctatcattagaataataaatttcataggttattaacctcttttaattgatctaaatcacctgtttccttttggatttgacttttaattcccactgccctgctgacttctcggcgcatataaatgctcaataattggatgaataggtgtgggtgggtgaatgggtaagtggacagtcatcttacattatagaatgttttgctgattctttttagttcctgacctcccaacatttgcgaaatccatactccattagtgtggctggtggacctctcttgatacagaataaccatggtttctgtgagagcaaaaagaaacaagagggctcccaaggacttgcccacagaggcgctttgctcaccaagcatggttctttcctgttggcctctgtttgctctgggtagcacctcggctgttttaggsccacagtatcacctattgacaagtgtagatagctattgatagtatcaataggtgtaggaaagggtctgcctcctgctattcctggttttctctttctcaaaggcttgtgcatgccctaggctttctcactgtccgttgctgggtgaggtcatatcagctcttactcccacagaaccacccgcacctgctttaagtacgctgcctttctgacttcaagaaaatcatactctcggaaaaagtctaatcattgtggataactttgaatatggagctagtgatatattacctaagggaggaggaaatcacatattttgaaatgataaagaaccaggggcataaacattgagaactcttgaaaataattaaaagttctcttcagaattttaaagtctttttctattaatttctctaataatttagccaacttttcttcaaatatcatcatttaaggaaaatgaaataactattttatatttatttgtttatttgttttttttttttaccagtgtttctgttttcattgccgaagtagtcagttggtaatgacgtttattaaatagccttatctaatagaaggctaacacaagccatatttaaaatttctttgttttaattaattagctctttgttttgttttgtgtttgagacggagtccgttgcccaggctggagttcagtggcacaatctcagttcactgcaacctccgcctcccagactcaagcaattcttctgccccagcctcccaagtagctgggactacaggcacctgccaccatgcccagctaattttttgtatttttagtagagagggggttttaccatgttggccaggctggtcttgaactcccgacttcaagttatctgcccgcctcagcctcccaaagtgctgcaattacaggtgtgagccattgttcccaactgtcatttaaaatttcttagtagtcatattaaaaaagatgaaacaagtggaattaattttactaatacattttatttaaaccagtgtacctgtggagacaaaagtgattccatcttaattgctaatgcaccatgttgttttttttttcttgaaggcaaaccttgttgttttaatgtaatttattttttattttactttttttttaatgatagggtcttgctctgttgcccaggctagagtgcagtggtgcagtatggctcactgcagcctcaacctcccagactcaactgatcctcctgcctctgccttctgagtaggtgggactgcaggcctgtgccaccacatgcarttaattttgttgattttttgtagagatgagggcacactatgttgcccagaactcctggactccagtgatcatcccgcctctgcttcccaaagtgctgggattataggcctgagccaccactcccagcaaagccatgttgatttctcattagccccagtctcgtgaatgcctcctgattctgattttatttactgtttttagtgtaagaacaaagcagccttgatcttaccacacaaattataggcagtgacgcacatagcattcccacctgttctggaggatgcctttaattgcctctgtagagcacgtacaccctttccctgtggcatataagctctgggtctggccagtaacagagtgggttatacctgtcttgcagccatccgagatcacgcttctgtctgtaagttcccccaagaaaacaccctttaccaacaaattgagtttctttgccttattctttggtttcttggctccctccgcatttgggggctgctttgcatttatggccctttcacagaataataccccaaatgttgtcatttcaacatgaaagacttttaaaaattactaatgtgataccagaaacaacatagacattggcattaatacaacagtatcttaaacaatggaacggtcagagtggaatgtagtcctaccaaaacaatggagttgggtttaacagaaaattacactgcttcagttttaaaattaacattaaatacaattgaaaatttaactcctcagtcacascagtcatatttcaagttctcagtagctacgtgtagctagtggttactgggttagaccactcacaggcaaaattttttgtaaaccagagagtgtttacagatagagaaaactctacataatggtttttaaagtattcccccttaatgtcaaccacagttttggtttttatctcttaaaatttggaatagatgagttgaatttatttttaaacagaagatgaatttatcatctagctgacaaactttttaaatttcccattagaagatttaaaaaattacaaccatttttaaaacgtggaatgatttcctgcctgtggcatataattaaagtgatgaaacaaacagaagattcgctgtgtcctggccatggtgagctcactctctgttttcctcacaaaccccagaacctttgtagtgtggaacctgctggatgaatagaagttttttattttattttatttttttactatgtctatattcctgtgaagtaatttttttgaccttgaaagaagttcttcaattttgctgttctctatttcttacagtgtagtttgtgtaccgggatttaatgtattgtttgtcgttagcgttttacatactagattttcatcgtgcatagtcacgttgtttgaacatttgcaagcagagccgactaactgctgttggcctgtttctttgtatggcgtgatttcttctatccacctgctcacagcaggttgccttcaggcctgaggagtagctaaatacttttgaaaatatcttgagatcctgctaaggtctaacaatttctgcatttgtgtgatgtgaagctattcatgctgtacctttgaagacttttttctttctatttctcatattcttgctcaaatattttcaaragaagataaatttattataaataacagtgcagagctgattgtagcaccactgcattctatattgaataggtctttgatattcagctaagtggaactaattttctatgttaaagcagacaaatttggaatagtgtcacatgaatctcatgttatttactgaagaataccagattaaatggattagttgtgaaatgactagagtattaaattatatatatatatatatatatatatatatatatataaaacgtgataacttaaaatgcccagtgggcctatgtaatataaaatattacacaagcacatgaatatgatggacgagatgttattctgtttgcagattgtgaaactatctgtagtatatatacaaatggttgtccacacagaatttgaatcaattttaaaattgtaaccttaaatttcagttttgaagaaaataaattgttgattttcatatctacttgagaggaagttaaaaatgttattttcttttcagttttttttagattaaaatagctcccacaccctccaagaataaactttagttttaatcctaataactgtttatagatagtaaaattaatattttaattagaaaaataaagcggcatacatttttgcctgtactttgctggtacacaaatgaattgggaagtaattgtcttatgttttcagtcctaaagtgttttacaggttttaaaaatgttccccccacccccatctgtttgaagtcattattattttgtactttacacatgtgatttctctagaatcattgcatgtgacatgacactctcaggatatataggatatataaatatataacttagaataagtagaggttggtatttttcgaatgaagtaggaaatgaaagagtaattattaaccatatcctttttacattcctgacatatcaatacagctacacatcttagaaacaagctcaccagtagaacagaaataactctgttgactctgctttaaaatatttcaaggcagtttaacagctgggatgtatttacagctatggtataaagtattaattttgatgcaaggctacctgcttttgtaatgtagtcctagaagcttagcagttttctgggttttataatttggagttgcttttaaaatttaaccgaatgggaaaatgtctttctgaacttccccttcccacacccccacacatacaagcttttctcctcttctgttaactagaaaattatattttcgttgctgcctgaggaagagaattttgagtagtataaacactgattgtagtaaatgtggaaaataatacaaacagctgcactgcagaccgataagacaaatcccacagtaatggcctttaaaacatattaccaagttggaartcagtgaggggaaaaagaaaactattactatttcttcctcttactgttcagtgacattatttttaaaggtgaaattacctctggttttattatcctaggaaggtatttttggaacatttgatttattgttttgcaaatgtttttgcctttgtgtgaataactttgctaattttgtatgaatttgattctaacaaatgttgaagtcattttgttaacaaaatcttctaaagtattttttaaagaaataaaaaggaatatattatgtaaacattggagcagactatcaaaataagaaaaggagaacatttttatctggctttggagtgccatttaaaataggaaaagggatgaaatatttgcagaaaatattttaataagcgtggatatgtttcatcaaatacaagtcttaatttttatgaagaattttgctattagcatatcaagtggtcagttcatatttgttttggcatgcattagactcatgataggcattgaatactttgttttttgtggattctaaaactgaattatcttaatcctaggctctaggaaaagtatatcttactgctagggaagattgaaataaattccagttctgagtgaaattttatttctgtttttctttacatcaatcttttctttttccttttttcttttttttttwttttttatttttgagacagagtcttgctctgtcactcaggctgtagtgcaatggcatgatctcagctcactgcaacctccgcctcccaggtttaagcgattctcctgccttagcctcctgagtggctgggattacaggcgcgtgccaccatgcccggccaatttttgtatttttagtagaggcaggatttcaccatgttggccaggctggcctcaaactcctgggctcaagtgatccgccttccttgacctcccaaagtgttgggattacaggcgtgagccaccacgcctggcctgtccttccttccttccttcctttacaaactgtgggagagtggtgaaaaaaaggtgacagtcattatatatgtaattgtgacctgctttaaattgaatgcaatgttaaggacagcttattggtacttatacctatggtcacacattcattgatacagtttgtttttaatgtgaaaatttgtttccattttacataatacaaaattacttctatttgcctgggaatgaatctaacctttgtagtgtcagccaaaggaatgataatattgttttagtgtctcctacatagaagggaacgcccagtatggcctaggcagtgttctagactctgcagatagaacaaggaacaagacttaccttccagcagggggaagtagatactaaacatgtaaatacctaaataaggtgattttagtactaagaagttggatgaagactatgaaattgatagaaagtcactagagaaggcagctttagcaaggatggctaggaagtcctctctgaatagctaacactgagctgagacctacgaagaggagggggcaaacgtgcagaagtctgggggaaggaagtcccaggtagcagaaggggcaaagcagaggctctgaaacgggacaagcttgttttgtgtgaaggccagttggggagagtggaacgaggaagacagaaccagatcatctaggggccaaagaactgttttgttttgtgttgtttctttctattcatgttgtggagcgtttggagggtttgggtaggagagtgatgtgatgtgattttttaaatcattgcaggccttggggtagagacagagaaatcattgatttgaccattgcagacctcaggtgagaggtactggtggcttagaccaggaggcaccgtctgtttctatggggctcacaacttgagtggttattacatttttaaatagttgggggaaaaaattaaagaagaatgtttcatccagcctgggcaacatagtgagaccttgtctctacaaataatttttttaaaaattggctgggtacaatggtgcatgcctgtgggtccagctgcttgggaggttgaggtgggagaatcgctggagtccaggcagttgctgtggagagctgtgaccatgccactgcactccagcctgggtgacagcatgagacactgtcaaaaaaaaaaaaaatcaataatgtttcatgacccatgagaagtatgatgtcacattcagatcttattgatgataagcagttaactagaacatagccacattcattcatttttgtctgccatgtrtagctgcttttgcagtttttgtcgtatgaagctgaatgcacagactttcttgccacgcagcagttcagtgggttattgtgatttttttttttttaatctcaggaccaagattaaagttttttgtgcagagttgcaggtagccaaattactttttgtattcctgtgccttagattcctcatctgtagagcaaaattgagatcgtctttcargtctgtttgctctccacatcctaaggtcctaggtctgaatcagacttagttcttctgttgtggctgcttagcacatcargctcctaactgaatgattgtagtggtgttttactcggtctcctagcctcgtccttccccattctrtgtatcttcagcatgacctcagaccaccgtctttctaaaacatgagcatgtcacactccagttcttaactgtaagaactttgtcaggtatgagctctctttgtacaagatctgacctgggtttataattccttcctggtttcctttcttgccacttccaccttcatccaaccctatttctggccacgctgaactgcttaacattccctaaacttgccatgccatcgtgccatcccttaatctgaaatttttgttaactgtctcatcagcccacaatttttttttttttttttgagacggtgtctcgctctgtctcccaggctgaagtgcagtggtggtgcaatcttggctcactgcaacctccacctcccaggttcaagtgattctcctgcctcagcctcttgagtagctcggattacaggtgccaccaccacgcccggctaatttttatatttttagaagagacgggatttcaccatgttggccaggctggttttgaacaacctttttttttttttttttttttttttttgagacggagtctcgccctgtcacccaggctggagtgcagtgatgcaatcttggctcactgcaagctctgcctcccgggttcacgccattctcctgcctcagcctcccgagtagctgggactacaggtgcccgccaccatgcccagctaatttttgtatttttagtagagatggagtttcaccatgttagccaggatggtctcaatctcctgacctggtgatccgcccaccttggcctcccaaagtgctgggattacaggcgtgagccactgcacccggtggttttgaacttctgacctcaagcaatctgcccgcctcggtctcccaaagtgctgggattataggtgtgagccaccgttcccagctgtttttcagttttcttttggaaaattcctgctcatttttaaaatttgtaattggtttttaattgataaattaaagttgcatatatttgtcatcctgtcttagtagtgtcttttgtgttgctacaaaggaatacccgagactggataatttataaagagaaaaagtttatttggctcgtgattctgatgtctggaaaagttgaggattaggcatctgatgaggacctcaggctgcttttattcatggtagaaggcaaaggggagctggtgtgtgtggaggtcacagagtgagagagaagggagggaggtgccaggctcttttaaacaaccagctttctcaggaactaagagcttgaactcgccctcaaagagggcattaatctattcatgagggatccttcccaatgatccacacacccccattaygccccacctccaacactggggatcacatttcaacatgaggtttggaggagataaactttcaaactttcacacatgtacaacatgttttgaagtacacacttcaaacagtggatacactgtggaatggctacattgagctaattaacatatatgtattacctcatatacttattctgtatgtgaggtacacttaaatatactcagaaaatttcaagaatatattaataatacgtcgtcattaactgtggtttctatattgtataatagctttctcgtacctatttctcctttataactgaaattttgtgggttttgattaatatttcctcaacaccccctccccaaccaccattctattttctactctatgagtttgacgtttccagattcttcatgtaagtgaggtcatatggtatgtctttctgtatgtacctggcttattttacttaatgtaatgtcttccgggttcatccatgttgttgcaaatggtaggattttcttttttaagtctaaataatattccattttgcatattataccacattctctgtatccgttggtccatggatggacacttaggctgattccctgtcttggccatcatgaatagtgctgcaagaaacatggggatgccagtatctccttgacataactgatttctttcctttggatatatatgcagtagtgggattgttggatcatatggtagttctatttttaatgttttgagaaacctccgtactgttttccataatggctgaatcttgttcatgttttttttctttcttttcttttctttgtttttttgaaacagagtcacgctgtggtgcccaggctggagtgctttggcacagtcggctcactgcaacctccaactcccaggttcaagtgattctcctgcctcaggctcctgagtagctgggactgcaggcacctgccaccacgcccggctactttttatatttttagtagagccaccgtgttgggcaggctggtctcaaactcctgacctcaaatgatccacccaccttagcctcccaaagtgctgggattacaggcatgagccaccgcaccctgcccctgtttgtttttaaatatccagctttaatgtctgtcttaacctatctaatgtcttccttattaacctttctgctcatttagtcggtctgtcctcttatcccataatactttgtacattttgtactatgcatttatcgtattgaattatacttatttttccaataattctgctgtcttttccttagtctcttggaaggtgggtcttaattcagccagcagtgcccaacacagttgagaggtagatggatgattagatggatgaccaacgtagaaatgccagtgtcaaaacctaggaatcaaccctccgttcttaactgagtctccctaagacacaggaaaggagtctattttattccattttgttttctgtctttttttgcctttattaagttcaacatgtgtgtataaaagaataggaaaaacagataagtgaaaacgagagtcaactaatatttttgcctagaaatamgttttatgtgcactaattctagaatttttctgtaacataattttttacaaggcttattctgaacatattgttttgttcttcttgcccttagaaataaactgtaagcgtttttcatatcttgaaactttttaaatggcaggctggatatataccacaatttacttagctagtgtctttccccgtcatttacatttcttgccattgttcagttctataaactacactgtgatatttgttcagctttatttttctgcctatccttacattttttcctcaggataaattcttagaagtaaaatgggttggctgggcgcagtggctcacacctgtaatcccagcgctttgggaggttgagggagcgggttatgaggtcaggagttcgagaccagcctggccaacatggcaaaaccccatctctactaaaaatacaaaaaattagccgggcatggtgggagatgcctatagtcccagctacttgggaggctgaggccggagaatcgcttgaacccaggaggcagaggttgcagtgagccgagattgtgccactgcactccagcctgggtaacagagtgaaactttgtctcaaaaaaaaagatgtgaaatgggttggttgggcatggtggctcatacctgtaatcccagcacttttgggagctgaggccaggagttcgagaccagcctggccaacatggtgaaaccccgtctctactaaaaatacaaaaattaggcagatgtggtggcaggtgcctgtaatcccagctactcaggaagctgaggcaggagaaacacttgaacctgggaggcagaggttgctgtgagccgagatggtgccattgcgctccagcctgggtgacaagaatgaaactctgtctcaaaaaaaaaaaaagaaagaagtgacatgggtcaaaatgctcccatactgattttttttctactctataccacactgccttaagtatgctatctagattaccattgtgtcaatttacttggcaatatttgcaggtaggggaaaacattttgcattaaaccactgtctttcttattgatctaacctccctccgtcaaggaaccgaggactcagcttgatttctagaggttcactctgggttctattacttctgtgatcatagagatcagagttggtaaacctccacttctgtaaaaaggaatgaaattaggatacatctgtatcgtaatgctcatggcatgtagttgagtgaaagccactaatactctacatctgggaacttaaaaaaatgatgctggcttagttagaactgctttatttgtgtgtgtagtctttgaagtcactgagccctctctgattagccagaagaggaagaattctgaggaatacgttaggattaagtagagcaagttttttttgtttttgtttttgttttttgagacggagtctcactgtcatccaggctggagtgcagtggcaggatcttggcccaccacaacctcacctccgcctcctgggtccaagcaattcttctgccttggcctcccgagtagctgggactacaggtgtgcaccaccacgcctggctaatttttgtatttttagtaaagacggggtttcaccatattggccaggctggtcttgaattcctcacmtcgtgatccgcctgcctcaacctcccagagtgctggaattacaggcatgagccaccgcgcctggcccaacagaccagttttgtaggtgagaattatctcacagtgtagtcagcttccagtgtactacttattcacccatttttagtagcagtagtagttacttttaactaaaattttaatagtcatagtatttacttttaattaaaattcaaacaagatatatgcaagtgatatatttgctgtaaacaaattttatttataaataaatgaataataaagaggttatttctttcactactctctggacatagaattgcattgttgttttaaacaaatgctaattcattttctataactattttattgagatataattcacacaccatacaattcacccatttaaagttacagtttagtggtttgtagtcaattcacaggggtgttccaccaccaccacagtcaattttagaccatgtttatacccttgagaaaccccacaccaattagcagtcatctccatgtcctcccagacctcctcttggaggcatctaccaatctaccttccatctccatggattttactattctggacatctcttattaagtggaatcatataatgcatgatccttggtgaccaacttctattgtagcatgtatcactacttcattcctttttatggccaaataatattccactgtatggctatactatattttgtttasccatccatcagttgatggacatttgggttttttggctatcgtgaacattacatacaagctstgcagatatgagttcattttatatctcttgtttgttttttagtgtctttctcgagaagcaggtggaaacatgagcattcagtttcttggtacagtggtaagtatgaaatcattctttattctcttaatttacagagaaaaaatgttcaactagttgtagctcatgtgtttgaacttggcttcattactgctagatatttaaattacctctacttttttgcctttacaaatgatattctagggaacaacttcatatatttcactttattttagtgtttggaattattatcttttttgagacagagtctcactgtgttgcccatgctggagtataggggcacaatctcagctcactgcaacctctgcctcccgggttcaagcgattctcgtgcctcagccacccaaatagctgggattacaggtgcctgccaccaagctcggctaatttttgtgtgtttttttctaaagatgaggtttcaccatgttggccaggctggcctcaaactcctggcctcaagtgatccatccacctcggcttcccaaagtgcgggattacatgtgtgagccatgtccggcctggaattattttcaaatgtggataagatatttttaaacatgtatgatatattttctcccaaatagaatcaaagtcataaatagttttatggcttattatacatgttgcccattattttatgtccctttagaacaccacccatcatatattagaacacaactttgcattgtcacctagtgtgagttgtaattttcaagattagtaaacttgatctgctgaagagtttcaatttattattactattttacttataagtttataattagtattagttactataattttcaaactaatttgtttaaaaaggtaccttatttggcttggtgcggcagctcacgcctgtaatcccagcactttgggaggctgaggcaggtggattccaaggtcaggagtttgagaccagcctgaccaacatggtgaaaccctgtctctgctaaaaatacaaaaattagccgggttgtggtggtgggcgcctataatcccagctactcaggaggctgagggaggctgaggcaggagaatcgcctgaactgaggaggtggaggttgcagtgagccacgattgtgccackgccctctagcttgtgtgacagagygagaccccgtctcaaaaaaaaaaaaagtaccttattttaattttcatttttctgtttattgctattgtatttgaatatttctccatgtattcattcaccagatatcatttctaatctgtgaaatgtctgttcatgtcctttgggtacctcattcaggatatggattcatattgggcatttcagataactctggagtttattaagaatatcagaggtattctgcaagaatatcaagaggtatttcaggcgagagagcttgcgtgaaaaagggttttgcagccattgagataggaaggatgttaataaaatgtgtgtttactgaatgctttatcgattatagagatgtatatataatttatgtatataaagtatatgtataggtacttggtcaatgtaacctaaattttaagtattggaactaagttttgtgattattcttgtttttctgattagtaaggtaatacatgcttattgtaaaacatttgaaatacaattcaaatgtatgtcataatatgttgcattagtcaagattctccagagaaatggaatcaacaagatgtgtgcgtatgtgtagagagaaagagaaagatagatctaaggaattggctcaagcaattgtggaggcttggcaagactaaaatctgcagggtagatgagcaggctggagacccaggggagcgttgcagttcaagtccaaagacagtccactggctgaagccctccttgcttggggaggtctgtctttttctcttaaggcctttaacgggttggatgaggcccacccactgtggagggtgatctgctaaactctaagtctactgatttcagtgttcgtctcatctaaaaatatcttcratgatacatctcagtgtttgacctaacatctgggtaccatggcctcgtcaggttgacacataaaattaaccatcacagaagtatatatcctatccctagaggtttttaagttattagcaatagataattcttccagaaaattatgcatcttttcatgcaataatagatcttggacacctttctgtgtcagtccgtaagatggacctcagtcgccttaagggccacacagagctgcattacgtggatggagaggactgctttcactcctcagtgttcgtgctgggaagtccactcatgctgtctctgctacttagcatctctactgggtttctaatcggtttctcaacttcatgtatcggaaactgagctcgaaaagtttctccctcagtttttcctctctctgaaaatggcaacttgaactaatccttgattactttctctcctcttcctctctctcctcttcccctcctctcctctctccyctctctctctctctctctctcttctctccttcctctccctctctgtcctcttcctctcctctctgtcctcttcctctcctctctgtcctcttcctctcctctctctcctcttcctctcctctctctcctctctctcctcttcctctcctctctctcctcttcctctcctctctctcctcttcctctcctctctcctctccctctctctcctctccctctctctcctctccctctctctcctctccctctctctcctctccctctctctcttttctccctctctctctcctctccctctctccctcctctccctctctcctttcctcctcttcctctctcctcttcctcctctccctctctcctcttcctcctcttcctcctcttcctttctctctctcctcttcttcctctccctctctctcctcttcttcctctccctctctccttctcttttttctttctcctctttctcgctcctctttttcttctctctctctccttttctcttttccccatctgtctctccctgtctccctctcccctgtctctgtctctgtgtccccacgccccccactcctggccctgcctttagccatctcttgtttggaggatggcagtagctggcgtccacctcactgccatgctactccctagtccatcactaatagagcaggaaaaggagtcctttgaaaacatcccttggttggccttgttgctcttcttcagacctgctgggcacatgccttagggtctctgcccttgtttttcttctactaagaacatctgcccctacatgtctgctcaggggtttcctcactttcttccggtctttactcagtaggctccttctgaaggaaggcttccctggtcacgccgcttacagttctggtcactctttccaacatcttattccccctcgcccactttatttatttatttttttcattagcagttaccactgcttgacatactgcaattttccttttttgatgtatttgttgtctatcttcctcacctggaagtgataagctccttgagtgcagggtgatttgtctgttctgctcagcgtgctctgcccagtgccctgaacaaggcctggcttggaggaggtattcagtcagggttgggcaaatgaatgactgaaattggccaatgtaggacctgagtgttagacttgaaaagaaaactaaagaaaggaaatacaggcctggctcggtggctcgtgcctataaactcagccctttgggaggctgaggtaggaggatcacttgagcccaggagttcaagaccagccagggaaacaaagggagaccccatccttacaaaaaattagctgggtgtggtggtgcatgtctgtggtcccagctacccaggaacatcacttgagcccagggaggtcgaggctacagcgagccgtgatcacaccactgcactccagcctgggtgagagtgagaccctgtaccctgtctcaaagaaaaaagcaaatatgaaaacaaatggaggccgggcatggtggctcacacctgtaatcccagcgctttgggaggctgaggtgggaggatcacctgggtcaggagttcaagactagcctggccaacatggtgaaaccctgtttctactaaaaatacaaaaattagccaggcatggtggcaggagcctgcgatcccagctactacaggaggctgaggcaggagaatcgcttgaaccttggaggtggaggttgtagtgagctgacattgcaaccactacactctagtttaaaaaaaaaaaaagaagaagaagaaacaaatggagaaaaagaaagtgcagggagctttttgggactgtggagctgaactaagctgtcttccatggataaggaaactgtatcttagaaaaggtcacttgacttccccaaggtttcacgtctggctggtgtgtagagcactaaagggtatacagatttcctggctctcagttcagggcctgttccatcagcaggtgcccttcaatttcactcccttttatccacttcaggcacccaaaacatgctagcataaaaaaacacaagaaacaaaaacacaccacatgtacacacccctacttaaatggacaacaaaagtcaccggaaaaaaggaaaaaaagaatgtctttttgatttgttttgttttgtttttgtttttggagacagagtctcactcagttgcccaggctggagtgcagtggcgcgatctcgatatccgctcactgcaagctccgcctcctgggttcaggccattctcctgcctcagcctcctgagtagctgggactactggtgccggccactacacccggctaatttttttgtatttttagtagaggcagggtttcactgtgttagccaggatggtctcgatctcctgacctcatcatgatccacccgcctcagcttcccaaagtgctgggattacaggcgtgagccaccgcacctggccaaaaaaaaaaagaatttcatgtagctgacactttcctctgcccctaataaatcatagattccttgccaatgagttctaaaggggctgtgtccactctgtttatacagtttatacctagcaggaatgtcagtttcaggtacaatttctagagtaatttctaattactgtaaaattcacagtacagcatagcagtttggatggccaatgtgctttgttttactgaatttttctgtgtgtgttattagcaatagtagatcagtctgaaagggggaaagaaatagtttgaagatagtagtggtcctgttacaacmaatacagattgattcctagctagcatatgttgcttcagtcaaagatgtctaaagcaagtatagtttccaagacacacaggtcaggaatagcagcatgtcccatggcaaaggtgatgctttccaggtatagatttgtctttgtgagaatccttgtagaattttctatataagtttgtttttgtcaatattgataaacatgatcttcaatgttcaaaggagagttcaattttagactaagagaagtacttctgttgtgtaaataaggttcaaaaataaggttactgttcaacttagagaaaatacaaacttaaaaataattcatttcattttttattcactctgaacttttaaaaaaagctggtttgtgattttcattttcagtaaaacaaatctcattactttaaaaaaaatgcttgtattagatattatatatatgaaatattatactttacattcttataaaacatttataaagaatgatgatacaacagatttgcatacctaagtgtaagacttgaacaaaagactaaagacaggaaatacaggcctggcttggtgactcatgcctataaagccagcactttgggaggctgaggtgggaggatcaaatacatcaaaaaagtaaaatatgtagtatgtcaagcagtggtaactgctaatgaaaaaaagtaaataaagtgggcaaagggtggaataaaatgttggaaagagtgaccagaattgtaagtggtgtgaccagggaagccttccttgagaaggaggctactagcctgaagagtttttaaaaacgtaaccattagtttggaaggtctctgtgttactcccattctgtcactcattctctccctgcacaaggaactaacatcttcccgacttgtatctattattctttgcttttctttataattttcccacatttatatccctaagtgatatacatttttgttttacgcgtttttaaacttgatatacatagaattatattctggaatcatctgtgacttggtgattttgctttgtgtttgtgagactcgtatgttgcatggaggtataattcatttatgctcagcaatgcaggatgctgtggtgttgataaactagcctgctactcatggataattgggtagtttccagtgttttgtgctgtaattctcactactacccgaagcattttggtacgtgggtatatgtgtactgatggcacatatgcaatcgtttctttcttttttttttgagacagagtctccctctgtcacccaggctggtgtgcagtagtgcagtcttggctcactccaacctccacctcctgggttcaagcaattcttctgtctcagcctcccaagtagctgggactacaggtgcatgccaccacactcagctactttttctatttttagtagagatggggtttcactgtgttggccaggctggtctcaaactcctgacctcaaatgatccacccacctcagcctcccaaagtgctgggattacagatgtgagccaccatgcccggccatatgcaatagtttctttagggttttgtgcattgagtatgcagtgaatgagttcactttgttccacatcttcacttggatcttcttaatttttgccagtgtgaatagtgccctcattgttgtttcaatttgctttatcctgatattaatgaagtagaacatcttttcttatttattggctatttctcttcatcagccatttggtttccacctctgagaagtacctcttatagctttttgtgtgtttctctatgacatgggactgcaaaaatacatgaatttagtatgtgaatgatacaaattaagtatatgtcatttggcttttcaataaggcaagagggttaggtgtggacttttatgactcattcttgtagggcccaggcctttggggcttagcgggtgttctcccggtgtgcggagacgagagattgtaataaataaagacacaagacaaagagataaagagaaagcagctgggcctgggggaccactgccatcaagatgcggagaccggtagtggccccgaacggctgggcgcgctgagtacaagaccagggggcagggtaaggagggtgaatcttctaagtgattgacaaggtgaagcaagtcacgtgatcgtagaacaggggggcccttccctcttaggtagccgaagctgagagagagaaggcagcatacgtcagcgttttcttctatgcacttataagaaagatcaaagactttaagacttttactatttcttctaccgctatctactacgagcttcaaagaggaaccaggagttacgggaggaacatgaaagtggacaaggagcgtgaccgttgaagcacagcatcacagggaggggtttaggactycrgatgactgcgggcagactgggataatatccagcctcccacaagaagctggtggagcagagtgttccctgactcctccaaggaaaagagactccgtttcgcggtctgctaagtaatgggtgtcttcgcagacactggcattaccgcttgaccaaggtgccctcatgcgggcgtgacagagggctcacctcttgccttctaggtcacttctcacaatgtcccttcagcacctgaccctatgcccgccggttattcctaggttatattagtaatgcaacaaagagtaatattaaaagctaatgattcataatgtttataatgattgataatgtccatgatcatctctatatctaatttgtattatgactattcttattctaactattttctttaatatactgaaacagtttgtgccttcagtctcttgcctcggcacctagataatctttcacgcacacgttctgactatgagctatgaatggaagtgactgtcaatgactctgaaggttctgagatttatgctacttgctggctgacaaatcagcctgcgacatttcatagatgctgatagaaaacrtgagactccaggatcagagatgaaggacagtttattacagcagcagcagtggtcaggataccattgtctttgtaccatttccctgaacccagattcctctagggcaatgcaaagagacatgatacctgcacacataatgggttgcattataggagaggagctctgagtttagagaacctgagtctttttatactgtgcagtaatcgcacctgccctttgatctggagggagacactctaccaaggccatttactgtacaagcatctttgaaaaggtagttcagagcaaagaacaatcagtgtcttgctcacaagaagtggaaaaatgcaagagacctgggggtgaattgtctcctggtagtgatgtgtgtcacttttggtcagagatagctaagagcaagtgtgagccctctagtccctgccatgccccccttggaggttgtgkgtgacgctgatgctcctgtcagcatgagttccttctgaagagtggcagtgagcactgctacttgcaagctgtagtagactgggatctcagtgttgacttattgctaatgcrtagcccagcttatcctgatacatagtctgggaacatgaaggaccaccttctgtttatagaaccccatgtctgcttatagatttcagattttatagagattcattaggtttattctgtctactttcagtcctttcgcttataaactttcaatccaagcataaggtctttttcctgttacgctgtttgaactttgtttaaaaattgtggccaagcatggtggctcatgcctgtaatcccagctactcaggaggattgcttgagcccaggagttcaagaccagcctgggcaacagtgggaccccatctctacacacacacacacacacacacacacacacacacacacacacacacacacagtgggaccccatctctacacacacacacacacacacacacacgcacatatacacacagtgggaccccatctctgcgcgcacacacacacacacatacacacacacacacacacacmcacacacacacacacacacacacactagcggagtatggtgacgcccacctatagacccaggtactcagaaggctaaggagtaaagatggcttgagcccaagagttcaaggctatagtgaggtatgattactccacttcactccagcctggggaacagagtgagaccccacctcaaaaaaatcaaaaaagcgaagatttaaaaattaaaataagattgttagccagttttttgtttaatgaaggaaaagttttccaaattaacagaatgggacattcagataaaatttgtgcctttatgacccaggaggatggcctgggtgtacatacaagtactcaggacaccacattctcacctttggtatctatccgttttattactctgccactcccaaacagtaatacataggattccgtgttagtttcctagggctgatgcaacagattagcacaaaccgggtggcttaaaataacagaaatgtgttccttcacagttctgggagccaggaatctaaaatcaaggtgtgggcagggttggcgcctccctagaggctcttagggagggtctgttctgtgcctctctcctggcttctagtagctcctggcagtcstygccttccttggcttgtggctatgtaattccagggtcttctgctgctgtcacatggccttcttccctatgactgtgtgtgttcattcacataaatccagcaccaccagtcatcagatttaaggctcaccctaatccagtgaaacctcatttaactcattatgtctgcaaagaccctatttccaaataaggtcacattctgaggttctgagtagatatgaattttgggatgacactattcaacccagtatgctatatagatctgaaagcctacttgacacacatgtaaagctaaaaagtgactgaggcaacttacctgaaaatatattttacaaacagagcattacttcttaggtctcatttgagtactaccatttatttccctagtattttcatacatcacctgtatgactgcagttcgtaccccatactcaaaaatgcaggaacactgatgatggctatgcctaattttcagaagacaaaagtgagcatagaaaggttaaaataactatcctatggtaataactggtagaaacaggatgcaaaaccagccctcaccaactttgaagtcaggctgttgaacatcagaggaccttgagaacaaattgcttgactgtggaatccagggagctctctgcagtaactgctaagtacaactgctcaggctgccataatgaaacaccattgaccgggtggcttaaacaacagatgtttatttctcacagttctagagcctgggaagtctaagtaaggtgccagcagattcagttcctggtgagggccctcttcctaggctgcaggcaaatgcctattctcccgtagcagagagagagtgcaaactctgatcttccttcctgttaagggcgctaatcccatcatggggccccaccctcatgacctcctctaatgaactctgaaaggctgcgtctccaaatactgtcacattgagggttaggcattcagcatatgaatttggacgttcagtccctaacatacatttggttggtaagctgcagatcccagaatttttccaggatatctgtgcccatttcaaattgcaaattgtctgggttttgtttgttttgtttgcatgttttggtgaagctgtgagtctgtgtacatcagatagtgtaagctcacaaagaaatcgaagagagctggtgttttacttaaccagaattccttacttgaactgtgcttcacaataagaataaatattttgttattaaagaatgcagaagttaccattttattgcaaatttttattataattaggttttaaagtactataataaggcaaacatatctcagtgagactgactttttttcccttataaaaacaatgtttgtatgaaagagaaaataagcttagactccattgaacagcttcttcatggctgcagtattggcattcacccaaggactcttgagaaacgatcaaattttcagtatctttgaagcttagccagagatctaatgaaaccaaatgatgctaaagttcttaaagctaatttaaatctcaaattatacattttaaattaagtttttattgataataaatatactttatttcatattacccttgaaagcttgagtgataatattagtagaataaacatgttttacaaagatttaccattaagaatgctattaatatgacccttgatacaccagcacaattagatttcaaagtaagcacttatgaagtaacagcgattaatgacaaccatcgaaaacaattttgaactccatcagtttaactcaggagggtaaacttaatatgataattcatctagttgaattgtatcagcttagcaggaaggtatgtaaatatgtgacccttacctagcttctaaatggatgctgtgctgatagatttatcagttccattaaagaactttggggaactttggagtttcagcaattgttcccttggaggctgaaaacccaacctgatctcatactgggaccattctggtctgcatatttccataatttgcctttgctactaatatgacagcaagacacaaataactgtttctaataatatcagatggagttgtggaggacagcattttaatgtagtaaaagacctccccgtggggttgttattgctactatagaacagcagctacacagttgcaactgtagtctcttaattgattcgtttaattagcaagagctgaagcttgggctgtatcttgtcatctgatatcataggactcgaaatttgcatcattcatatttatagatatgtaaacatcatcaaaaaggtcttctgcttctgaaaattcacttacagatatcaaattttaatagagcagactcccatttgtttgaaatttaactaattaaaaaatgaaaagaattaagtttgttactgtttttctttatctgtactcttgagaaataagtgatgtcatrcatttttggttgtggatcatctcctaaacataaacttccagagaacttcttcagtcttccgtatctcataattccataagcagtccctcaactgacatgtctgacttaagttgatctctcctctctgtcccatccctttctctgtgtcagtgtgatttcaggaatgacatgatggcttactggggtttcttgcacacgtgtgctgtaactttccacctgtccctgcctgcctttgcagctgctccaagtcctgctagggtaggctgtctgcttgtgctgtggtttggtgggtcatctggctgagttggctcttggcagttacctgcctacccaagctgcattggtcyccactttctctggaggggaaaagagaaacggatagaaagtatctggcatagaaaccagagcctttctagtctgtttaccctcaactccacagggcttcctccctgctcggtcacactctttgtattcctgacccttttctagtccaacaataggaagcaggtggcggtcacagagcagacactttgtggaggggtgatgaagttttctgatgttcagatatattttacagtgctaagaaaatctatagcattccttcctgcatttgcccctaaatatacaaaatttcaggcaaaatatgggtagaataagattttatgaaatggaatataaatgtagtcttaatcttgaacattgtttctgtggtaatgtgtgttctgtgtgccatgtaaccaagctaagaatgaacttttggaatataactacgtttttattcttttgaaattggcatgctctatataatataaaagtttggttattagtattgcagtgtgatgcattctgaacaaaaatttaaaagaaatcattgcctgcctgctatactatgtgctaggaagtgggttagttgaacatgacttggtccctacccttaagtagcacactggctggtgaagacagacaaactgataccatgcaaacatggtatcagtgctgagatgggtaatgcataggctyatatagtagcagagcgaattgtagatctgttagctttattatttgtttcttttattgataaacagtacagtccatagggcgtaggtctctggttaagaatttgcattttatttgtcaagtacacctcaataaacacagggaaaagaagaactgtatttcatatcttattagacattactttttgaaaatgagcacaaaacctagcatttaatggtagtcatgagagtcagtcagtcatcttacactggtgacagacactgaattctggcaattcaaaggaaacaaatatccctgcagtcattgggcccattgtcacctarggatagagaaatgtaaatgactgattaccgtgataagaacgctaacagaggtgtatacgaagtagagggattctggggctgaggtgaagaaagtggagaaattgtgaacagtttttcagtgtttatagctcatgctgtgactttaaggatgaattgagtttgcaggagaaggcatttcagatagagggaacagtgagcctggagatagcaggttgtagaaactgcactctgtactgatgatggagaaagaggacggaatgaaattaataaaggcgcagaggtattaagatgtcccaagtgtttaaggaagagcagattggcttatgagggtgatgggcagggcaacaaagatccctttggaagatgaaattagtctgttgggggcaagatgacacaagaccattccaaggaggttgggtggcattccctagattctgaggttcattgaaggagttgaaagaagaatcataatctcatcagaggtggttggttttattggtgtggtttttttttttttttttttttttgacaacttatgggagtaggcaaagaaagaagagggtacatttgagagccacttctttagaatccagtgtacaattctatgtattgggcagaattgaagataattctgagatttctagaggtgataactgatgcagttagggaggaaaaacaggaagaagagaagaattgtaccagagaaaaggtggactctattaaaaagatggatttaaccaatttaagtttgaaatgccaagagacatctatgatataagggaaatttctggtctggagagcaagaagaagattaagagtgagcacgtaagttgatgccccagcagaggtgaggtcctaagccatgcagtagatgaacctgccaaagggacaatggcaaagcagaggccaggcccagaatggagctccaggaaatgcccacagctaaggtggaggcttgtcctctctaatggagtcacttacaaaatgatgacatgtttattattgaaatcatttatatatactattagaagccagttcattgtaacctcagttatgatttcacagtatcctagggtatcactaagttatttcaaagtatctcaggatctgttgccacctgccaaagatcttcaaagtaaaattaatatttataaataatgccttacgcgtgtatggtgctttagggctttagaatgattctacatatgtcagcttacttgattccattcaattgctaagatgaataagccatagcacaccttagagtgagtggtaaaaattagacatggaatacttcttgcagtgttttccatttaaaatatttgagattacaagttatgtgttcacaggaaattaccacgaaccactgccagattgctagtgaacaggatcgggcaggggtgggggaggaataagtagagtttgtcttcctgcatttgaatcgcagatcacctgtctcttagctttgtgaatttgaacaggttgcctaacctccctggtcctcaattttttcatcaacagaatagatattatctgcttttatggagatggcaagggctgaaaaagaaaacgtttgtaaaatgcctgaaaatagcaggcacttggcaaagaatagctcggtttttattgtagctccccactctccctttgcttcattttccctttcatttgtcttgcttggagacatgctatcatctgaagtgatagtctccaccgagtcttcaatttggtgcttggcctacagaaaaatccagagggaaaatattgttcccttttatttgaaaaaccaaatttgtgttaatcccctggttatgaccccttaacatagttaatgttttgtaagtgaatatggaatagaaagcacatacttaaatgtgtaccttgtggtggcagggtgcttaaaaacatctgtttccttgaagaatcttgcgaatcaccaacaccaaacttgaccagggaagaatttggtgccttgtgtttaaactgtgctgcttaaaatatattcagatggaaagaatggcaaaaccattctgatataggacattttatgacagtgcctatgagatgttctttcttctactggcctcacttttaaagggatatcattttaggtaggctgtttcagggcactgtcatatgttactgtggactatcgatctcttgtrcctatgaattatttgattgtcactctttaatttatagtgagaaggaagtgggaatggcagctcttctcttatagaagaaaaatctgagtcagtggttctcaagttttatcatgcctgaggatgaccaggaaatcctggtgaaaatacagattcccagatctgttcctagaaaagctgaccccccatgtctgatgtcgaaatcggcttaaaatgcaccaggactagaatttgcaatatattttgaacattaatgtagaattactatctagtttggaaagtcaataccaaaagacacatgatattcctggccccatgagccaagcttaggagcagtgttctggatccttttcagaatgagaagataggacaaacrtttgattatttgtgctaattaacatgtactttcataatacatacttttttaaaatcagggagtgacatgataggatctaaagtataattaggtccatagtgtcatcaactgtatcttttaagtttacttatcatctgtataattctttagattcagtctgagttatttcaagtcttatagacagtgataatttttatttttgccctagagcagggcagtgttatctgtttgggcagtattaacattttggacaattctctgttgtgggagactgccytatgcgtaataggatgtttagcagcatccttggcgtccaccaactagatgtcagaacatgtctccagatataacaactaaaattgtctccaaatattgccaaatggctgcacacagcttggttggggagagactccagaacagatgtgaaacttagtggctggaagcttacaaagtacacatgtcatgacctacttgaataccttatgcgaagaaaataaactttacccgtcctgatactggatttgctttaggaacatgtttagcgaatagctgtttggaagtgtgtaaggggtactttttctttatcttcctcatattggatcatgaaccaggtctaccatggacagccattcatggaatttagggcaaagtctagtttgtgtgattgcattgtgttcatttgggttctttttaccatttgagtagatgtactgttactgcttaccaaagacacattttgggtatacagtgcgtgtgcagctcaataccttattctagaagctgctgctcttcattttgtcttcagttttgtaaaagccccgtaatcctgctggtgagacatattagagtgtgataagcatcacttcacagtgacatctgtgaagttcttctgttctttttgcagctactatttaattgtttggctatttaatattttgtggcgcttccccccttgtgcaaggaagtatatggcaggatgcctgacaagacacgtaggaagccacacagtagtcagcatctcaagtgtgtgttcctgagaaatagccttcccaagccggcatatgttttgtatggtgtaaattctcaagattgtgaggggaacagctaaggtaattcctaaggtatccgtgttaattacctaaggtaattaccaagcatcagggaacatagcaacactgcaaagtcaaagtaccctcgtttgaaatagaatctctacctgatttaggggttagggaaagaattagtggataggttctaacaattacccttctgaggtcacgagtttgagaccagcctggccaacatggtgaaaccccatctctactaaaaatacaaaaattagctgggtgtggtggtttgtgcctgtagttccagctacttgggaggctgaggcaggagaattgcatgaacccaggaggcgggggttgcagtgagctgagattgcgccactgcactccagcctgggcgatagagggacagtccgtctcaaaaaacaaaacaaaacaaaacaaacacagttacctttacagttcaccatggccaaaagattgtaccactcctttcctgtctcagccactttttgagtgactgtaaagtaggttggccgggggacgatcgttgcttgctgagtgcctgtaggtacctagcaccgtatgtttgtcattctcattgaagtctcccctttgagatcaccagtagaatccccatgtttcagatgcagtaacacggacaggaagtaagggatttgctcagagtggtttatatcagaagagcagctgtaggaccaaacccagatctagtaacaaatgtggcttccttcacatgagcatctgggtggttgggagttagttattcctgactgttgggtggagagcaatttgatgggacaaaaccagttcttctgtgttgaggcttagacaccagccacttaacgggccagacagctgaggtccggatttctctgcttcctgagccagttactcttgtatagcgggggaggagtgggcacattctttttttgagatggagtcttgctctgttgcccaggctggagtgcagtggcacagtctcccctcactgcaagctctgcctcccgggttcaagctattcttctgcccagcctcttgagtagctgggactacaggtgcccgccaccattccagactaattttttgtatttttagtagacacggggtttcaccctgttagccaggatcgtcttgatctcctgacctcatgatccacccgccttggcctcccaaagtgctgggattacaggcgtgagccaccgcgcctggcatcaagtttgattgtgagagtgcagcaattcagtcacatgtccaagctccactcctagttcttttgctgttttccctacatctgcagttacttcttgaacccctcaaagtcacccatgagggttagaatccagttcttcaaactcttgttcatgttgataatttggcctcttcccatgtgaattcaacacaaatgttcttaatagcatctagartggtgaagaaggttttcaatttactttgcccagatccatcagaggaaacactgtggcagctgtagtcttccaaatgtatttctgaaataataagacttaaaagctgaaacgactgcttgatccatgggctgcggaatggatgtcgtgttagcaggcacaaaaaccacattcatctccttgtatatctccgtcagagctcccaggtaacaaggtgcattgtcaatgagtagtaatatttttaaggaaatatttttttctgagcagtaggtctccacagcaggttttaaatattcagtaaaccatgycctaaacagatgtgctgtcatccaggctttgtttttgcgtcctagagtacaggtagggtagacttagcatcattcctaagggccctgggattttcagaatggtaagtgagcactggcttcaactaaaagtcagcagttgcattagcccttagcaagagagttggcctgtcctttgaagccagaggtttacttctcctctctagttgtgaaagttagatgacatcttcttccaacagaaggctgttttgtctacactgaaaatctgtagtttagtgtggccaccttcatcggtgatcttaactagaccttctgcgtgacttactgcagcttcttcatcagcacttggtactttgccttgcacttttatattatggagatagtttctttaaacctcatgaatcaacttctgctagcttcacacttttcttttgcagcttcctcgcctctctcatyctgtgtagaattgaagagagctagggccttgctctggagtaggctttggcttaagtgaatgttgtggctggtttgattgtctatggagaccactaaaacttaggctgggcacagtggttcacacctataatcccagcactttgggaggccgagaggggcggatcacttgaggtcaggagttcgagaccagcctggccaacatggtgaaactccatctctactaaaaatacaaaaattgagctgcaacaatagaaagatggtggagcaagaacaaagaaacaatccctttgactgggcgcggtggttcatgcctgtaatctcagcactttgggaggctgaggcgggtggatcacctgaggtcgggagttcgagagcagcctgaccaacatggagaaaccccgtctctactaaaaatacaaaactagccggacgtggtggcacattcctgtaatcccagctactagggaggctgaggcaggagaatcgcttgaacccaggagacggaggttgtggtgagcaaagattgcgccattgcactccagcctgggcaacaagagtgaaactccgtctcaaaaaaaaaaaaaaaagaatccctttggttccagaaaatctcctgaaaaagaggaaggcttattaagccttcagagctacccaggcaaagcaggtacttttggcaaagaggaacaaaggaaaggaaaagggctcaggtttaagggactggaatcctacatgattcctggcggcagaaacatgacaaggtgggtctcagacgactagaagtgaaacctcatgctttggaattgccagataaacattccttggcctttcttgtacgtatcaaaaggattgatggtgtggccgggcacggtggctcatgcttctaatatcagcactttgggaggccgaggcgggcggatcacaaggtgaagagttcaagaccagcctggccaacacagtgaaaccccatctctactaaaaatacagtattagctgggcgtggtggcaggcgcctgtagtctcagctactcactcgggaggttgaggcaggagaatcgcttgaaacccggaggctgaggttgcagtaagccgagatctcaccactgcactccagcctgggcgacagagttaggctctgtctcaaaaaaaaacaaacaaaacaaaacaaaacaaaaaaagtttgatggcgtgtgagtttactggtgcagaaaaccattgcaagattttgcctaaagaaagtttttagtggtgtctttgtaaaagtcaccccctgctgcatgtaatgggatcttatgtgacctggggatttccaaatctgaattttctctgggaactgattttgaaacgtggtcaaggtcaagaataagaccatccctctgacagacaacacagtggttgcggagcacctggggaagtatttccaggagacttcatggttcttgcgtcgtttccacctctcagtggcccatcatgctaccaaaaatagagtgggcttcctcgagatgggcacacctggctatcggggtgaacacgtcaatcagctcatccgccagctgaactagacccaggtgccaaactgcagtacatttttatcagtgaagtggaagcgtgtgttttgggtttttttggggaatttttatcaagtatcttcagagaagattatttcctgcttaatcttcaaaaactggaaaggaagggtcaaagaaaagacagtagcttatgtttatggcgggcacctctcatcacagtcattcccaaggaaaaattccagagttttctacattggcagctgcctcgtctaaatcaacacattccatgtgcatcttctatccttgggtttaatgttgctaaatgagtaactctagcatttgtacaagaccccctaagactctggcagcagtcgaccaagcccagggacataattgaatctggagattcctgaggccttgttttgaaaaagacttgaaatacacataggaagaaaggcccaaaaataaatgttcacttgtctctgcaaaaaaataaaaataaaaaataaaattaaattaaaaaataaaaatatgaaaactagctgggcatggtggcttacgcttgtagtcccagccactctactcgggaggctgaggcgggagaatcgcttgaacccgggaggcggaggttgcagtgagccaaggtcacaacactgcactccagcctgggcgacagagtgagactctgtctcaaaaaataaaaataaaaaaacttttcatatcagcaacaaggctatttcactttcctatcatccatgtgttcactggagyagcacttttaattttcttcaagacatttttcctttgcatttacaacttgagtaactgcacaagagacctagcttttggcctgtttcagctttccacatgctttctcagtaagcttaatcatttctagcttttgatttaaagtgagagacatgtgactcttcctttcacttgaacacttagaggccactgtagggttattaattggcttaatttcaatactgttgtgtcttggggaatagggaggcccaaggagagggagagagatgggggattggccagatagtggagcagtcagaacacacacaacrtttattatagtttaccatcgtacatgggcacagtttgtggttccccaaaacaatttcaatggtaacatcaaagatcagcgatgacagatcaccacaacagataacgacgaaaatgggtttcctaataatgcagaggtttgaaatactgcaagaattaccaaaatgagacacacagatgtgaagtaagcacatgctgttggaaaaaatggtggcaatagataaagggttgccacaaacctttaaattgtaaaaagtgcattatccttgaaacacaatagagtgaagcctaataaaatgaggtaggcctggattttttggatacttgatagtatctaagtttcttctcaaacacagcaaacatttcacagttcaaatttgcccatcggtagagttttctctgtggatcttctctgttaatgccacatctgtctagagtaaaagttcaattcaatattgtgctatcaacttagcaacttgttgaagatgaactaacataagtacatgctgtgtgtgtgttcygtgtgcagacacaacacaggtgagctttccgtaagcctggatcttcccaatggcggtgcttctcgtgtgcaggccaactagggagaaggggacactggggcccacccggagctctgtgggccttgtctcttgtgacaaggatattttgctccttagctcagcagagtccaggttcttgtctcaggactgggaagaagtaggcaggcggacacttggagagtgagtggagtagaatgcactaagggaaaggaaaacttaaaggaagggtcttgaaagcagattgtggttctcccttcacagtkgaatacaagggcttttatatacctgctgatggggctgcgttccctatttctgtaagcgcgaattcctggcggctccacccgtccttccaatgcagacgtgggcccttagtctgagccactctacattgatttatttcccttactgcgcatgtgttaagggacagaacttttccaccgcaagcatgtttgggcaaggtccctgggcacgacgaccttggtgggtcagaggttctccggggaccctcccctgtctaccggggagagttctctgcttcctgcctccatctactccccagtctgcagtctggccctcggtggtcctgcagatctggtgttgattttgcagggtgtttggaaaggtacctgcgtattttcatttatggaagtgactgagtgccgacgagragaggttaatgcccttgagaggagaatttattacttcatcacctaagagaagggggcacacccctccatgcagggcacaggggaaccaccagtgtgggtcaggaggcagaaaggagccagagaaaagtgtgggtgggaaccttagtggggcttcctcgggaaaggcagtgcgtggctggtttgaataatgatggtgggctttggggtggtctctatttgcctggtatctggccctgggatgttttaaggcagggaaaatactggcttggtgtgtgttagagaaaatgggcagctggcttacttccaagttctttactaaattgaggaattagctggtcttgggagaggcagtgtctttctgggtctgtaagtccctggaaaatgttaaagtatcataagataaaaaaaaaaaaaatttaaacctgattaatacactgtgaacctagaagtaaccagattttaggaaactgacctatagtgagcaaactcacagggattgatagctaagccagaatatgcatttattagcttgaggggaggaatgtttcttccagtgaccaaatctttaagtctgccctccagaatattgactaaatattctgccatctagaatggaataattaggaaactcattagtcaccttaatttcaaactagtttggtttatgtggtaatcagagcaaacggtgacgtggtgtacctgtgccgcgcagggacttggtgaattaatctcttctcccagaacgccccacaagggccaccgccgtgccttcccttttctttgcctctgcgctgctgttatcttcccacagaaaggccccctgcagtcgattaggcttcagctacctaaacaataggcacagacccaaacgatgtcaaactacagttttctcctgcccttagggtggcactcaggccactttgattggaattttgagtgtccccaaactctggttgtactctttcacagatgggcaattacagtactgctctgtggagttttaccagtatagctctcagaaattcctaagaattttctatttcttaggttacactctctatagtacatacactcagacagaaaaatatatttcacgaagagagccytgaaaaatctcatctctagtcccagtgatgccttaaactggttgtgtgaccttcgtaaacctcagttttctttgttgtaaaatgaaaggtcggggtcggtgacctctagagtctatcccacccctagcctgctccgagagtgattgcatttggcacaatatgcagtttgcttcgcagcagtagcaaaatgacacatgcaacttattatcatcattgtctatcttttgatttccttgagttttccagtctcattaggggagacatctctggcttatcgcacaatgacatcgtgtcttgtaacttaatttctggggacaacacattgtgctgccacaggcacagtgctaataatcaaggttgtctgttctgcttactgtgacttttttgtggtttctggagaaaaaatgcagatgcttttcaattattctaagggaattttgatgaaccccctgggtagagttccctgtgccacctgccatgagaagtgagttttatcgaacagaaggtagggaattgaattgctcatatttgttttctttctggtacctatagtattatttcaagctcaagcattttaataaatatttaataaatacctgtctaaaataggccaaaactgtcataaactaaacctcttttcttcttcaattttaaatgcaaatgagttaatttgacttttagtggaatttccaagataaaggcccatgtttttcctttatgtatccgaaagttatttttgatggtatagtgaacgtcctgcttactacacattttrtgtattagcctttggaagcaaattccttaagtttattgcaacgttgctgcttttgttgccattcttataattttatgtatttactgtttctctctctctctctctctctctctgtctctgtctctgtctctgtctctctctcatattgagacaggatctcactctgtggcccaggctggagtgcagtggtacagtcatggctcactgcagcctcgacctcctgggctcaagtgatgctcccacctcagcttcccaggtagctgggactacaggaatgcgccaccatgcctggttaattttttaggtattttttgtagagaagggattttaccacgttgcccaggctggtctcgaactcctagtctcaagcgatcctcccaccttggcctcccaaagtgctaggtgtgagccactgtgcctggccgtatatgtccattttgcaggccagaattctttgactgtttgatttacagagaattttcaaatatctgcctctaaggacttttgtagcaattttattgagatacaattaacgtataattcacccacttaaaatgtaggatccagtgggttttgtttcttgtttttgttgtttcttttgttaagagataagcagcaaatacatttttagtataattatgtttcattcaatatttgggacatatgctaacacttgttattattagcattattattagcattattattcaagctgaggtctcattctgttgcccaggctggagtgcagtggcttggtcacagctcattgcagccttgaactcttgggctcaagtggtcctcctgcttcagcctcccaagtaagtgggattataggtgcaagccacagcacccagcgattcactggtttttagactgtccacagagctgtgctgccatcactgtaatattttaaaacattttcatcaccccaaaaagaagccccctacccattagcattcactcctcaccccttccacccctcccgcctgtggtagccactgatctactttctgtctgtgtatagcttattctggacatttcttaggaaaggaatcatacagtatgtcgtcttttgtggctttcacttacatactggtatccacattgtagcacatgccagtacatcattcctgtgtatgggcaaataacatcccattgtatggatataccttaacattttatttacctgtcagttggtgggtgttggttcctgtcttttcggctactgtgaataatgctgttatgaacattcatgtacgagtttttggggcgacaaggttttaatttttcttgggtgtatacctagaagtggaatttccaggtggtgtagtaactctatgtttaactttatgaggaattctcacactgttttccaaagtggctgcaccattttaccctcccaccagcaatgggagcgatccagttcttcccacatcctcactgacactcgttattgtcttttttattatggtcatcatagtggctatgaagacaggcttgtttttaaatattctctatgtagtattctgctttcttccctagaaatcataattaatgcagaagtagcccaaattgtgtatgttaatttgttttatttttttaaaacaaacttgaccccccaaaagcaacaaagcacatacatttcagttaatatatattttctaggacgttattgtctcttctcaaatgagatgatttcgatatgaagcacagagttcctttcattttcctatgctcattctctctctttttaatggtatcacatactgtgcaggaaggtcattatataaggagaggaaaaaagaataatcagcatagaagagaaaattaatgctgtttgtgtaatttttaataggaatgttgtaaaattttgagatttaaaccaactactaatattttttatacattactgggcagtttcctcttgttgcctgtgaactgatactttgccttggaaactcagatagtaaaaatatttgtcaaagcttcaaataccagtgttttaattccttagtcatttagatattaatcctgttctggagaccacctacatgtgtttgtaagggatgtgataactgacactgtatttaattagcactaatattgtgaaaaaagcaaaacatattaagtatctttccaagtcactagtttgaaattagcagaagtgaggaagagaaagtcctgtccaccccccacccttagtttgcatacccatggaagtttgtgatccatttactcattcatttatccaagtatttgataggtacatattttgtggtggacaacattccaggtattgtggaaatggaccaatttcaataggacagaaatctgaatcacaaataagcatccagtggcaaccagctggtgtacacactgcacctaaatacaaattcataggtatcaaaatcaccttcatgtgtcacacagtcacctttcttagttcctcatagcaaaactgggggactctgaggtcagtccccagagtacctggttgaggggtggggcagggcagttgaataagggagtagaatgaatgaaaactttagactctgaagctcgtcactttattctgccatattttagttttgtggtattaaatctctacagaaattaattatcttgcttcctttcttgaattccttttcaaatgttatagttactacttcagtaattctatcccatctgtttatatacaaaaggtaatttaccgggtaatgaccgagggcacctgctttaaagtcaagtgcatactaatttactggctatttgcttggcctcatttacgctctctcggcacagtttctgggtctgtaaaatgagagtgattgtaccatctacctcattggcgacagtgagaattaaatgagttggtgcatgcataacacttagtacagttcctggcacaatgttaccactcaataactagcagtgtggaaatatttcacacctaagagtaaagttttatttacctttaggagacaggatcctgggaactttctggttgccatagctgcttcctcaaggcaactargttagatgtggagtttctaattcctgttggaaattcagtgaataagaaaatactactgaaagttatactattttctgcatgttaatgatttgatattatacagctttaagttctcagtgctcattcgggtagtgcaggtgagagacggcggctttaggggcaaggcagtgaccctgtggatgatgggaagagagttgttaagaaataattgtttaaatcatccagagagtactgtagcaaggattgttcctaaaaagaactgtggtaatccttgttgaatagcaagtttggacagtatacggtagggaaatctcaggaatactataaacaaataaaatgatggggtgagccctatgaagcgtgtgttctcctgtgggcagtggcagagttacccttcacccctgagtcctgatttctcagcctcttcatgtgactgtctccttggctcctgggaaagaaagaagcctctaccttccctggattgaatgcagcccttcttgtcccgtctgcagagcatgaggaacagctggccacctgcacctgacaaggcctgtggccgcgggcagtacccagccctgcgctgacggccgctccaggttgttgctggatgtggcgagctcgagctaatcgggccttttaggcttttgtttcttagcaaatgatcagctgtgaactgcccttggcctaacttggccttgttagctcagaagcccgcaattcattgcattttaccctgaagaggaatggtaggtctgaggacatatttatttttctgtggattttttttccccttgatccaggaaattgtctgtcttcaacaacctagtcttgtctcctccagagaaaagttttgaatcctctgaggagcggtctgtcgccattgtggcctgtggtcagtgggtcagaccagagccctgacaactgtctcccttcctgggcccaagtggacaccagaggagtttggggctctgggatcagcctgctctggcgagtgtcctttccctcccactctggaactgtagcttctcagccctcttcttgatgctgggcgggtgcctgggaggccccaccccttccctgggtacctggggaggtccccgactgagaggtgggaagacctgtgtcccctcccccagcacactctcagcctctgacttagttctcataggaggaggcaacagcttccaggagctgctgctgttaccctcgacgccatgatgaggaggaaattgcctggtcaggagggctcgcctgcctcttcacagccaggcgtactgtagcggcctcaggagcggtcaccctgggagtgactcctcacctcctaagcagccctggggcatgaacactcgtcctggaaatcctgctaggctggcttaagggagttgcttctagcatgcctttctggataagcctagtagaattgctttttctactataaaaaggaaagaatggggctcctcatattatagtaacagaattcttggtactagaactggtaagccaagagaaatggaagctgaccaacttttctctctgcacagggttcagagggatagaaacacacaatttgactctgcatgcaccagaaccttctcactcagggtaagggacagccacagtttctgggacgttacctaaaaacacaataatcccacttattctctgacagataatcatcagtcatagccccactactcacttttattaaagaaatagctgggcccttttaggtaaagccctttatatactgggaaaaaaggtcatgttatccattcctcaaatcccaggtaaactcctgctggttactcaaaaataaaaaccaaaatgaaagcccattcatcacagggatgcctaatcttgtaatgagggaatcactgagtgtggcacagggaagactcctgagagattctgatggggwacaagtgtgctgaccaacgtcctagatacagtgggcccttgaacaatatgggggctagggatatcaaccctgtgcagtcagaaatctacggataccttctgactctcccagaatgtaactgctagtagcctactgctgaccagaagtcctaccaataacatacagtcatttagcacgtatttggtatgttacatgattatatactgtattcctgcaataaagtaagctagagaaagtgttaggaaaatcataacracaaaatatatttattattcattaagtggaagtggatcatcttaaagatcttgatcttcattgtcttcacgttgagttggctgaggaggagggggcttgatcttgctgtctyaagagcagcggagtcataagaaaatgcacatttaagtggccccatgcagttcaaatccatgttgctcaaggctcaactgtacaccgaactgaaaaatgattccatttttagtaggaaatggcctactctaagtcctactgcttccctttgcacttgatggcaagggtctttaactgtgtcagtggagctggtttggctccactgatagagactccctgaccatctgataggccacttttgttagaggagaaggtacccccttgcctacctgttcttttcttacttcatgggtcttgattcctgactcaggagcacccrttacagaaaagccctgggactagatctaattttatttaatgaaaaacctatggagcatttactcttgcttctaataaattaacaagtcagggctttcttctgaataggagggtctcttgactctttgatatttgacttttgaaccagactagatgaggcagagcttcagcacatattttaccagtgtcttcagcaaatgcctttctctttgcaaagctccatattactaccaaaaattaacccaactaaattgtaatttctactcacccacatttattgagtactgtgtttccttgaaagatctcaaacaaggcaccttcttgcaagatcttcaccaccagaccttcatgatagtcacctcctcattaggctgagacgcatacacagtgattacgttcagacacagggactcctgtgtcttaagaccttgtgtgacccttgtaattaaagcattrcactttgcaaaggctgacagtggtataggggctgtctgaaactattcagccatagcctggtctctgctttctttttacaaatgggaggttggctaaggcagacacagggatggctaagagggataaaggacgtgacttccatagaaccttttgttcctagaggaacctctccatgaaacacacagtgaaactagattaaaccaaaaaacgccctcagctccagcagatcctgagctacaaagcacctcttccctaccgagccttctcacccatgcgcactgagtttctgagtatcagaaagtcaggtttctgaatccctagagaaagtaaaaatttccttggacacaatgggttttctttgcttcctgcatgacagtcacgaaggggaatctgaaatagagaacttgaatatgcggcttgctgaagggaagtgtactgtacagtagccccccttctccacgggggatccatgtcaaaatccccaggggatgcctaagactgcggatgggaccgaaccctgtatacgcttgcctttaatgccttttccatttcagctcggcacttagcccacactgtggctgtaacttttgtagttttaggtacagcagcaaaactagcacaaatttctttgtcctttttcacaatttcatggatagaagattgattcttactgtagatcttagcaatctcagcatacttttttttttcttgagaactttcaccttttaactaaaggaaggacttcatggctggtttttggcatatccagattgccagcatcatactcttggaactttgaggccattgtgaagtcaaataatagttcctgccaggcacagtggctcacacctgtaatcccagcattttgggagtccraggcaggtggatcacttgagctcgggagtttgagactagcctgggcaacatggcaaaactctgcctctacaaaaaacacaaaaattcaccggtcacrgtggcacatacctgtagtcccagctactcggcaggctgaggtgggagcatggcttaagcccaggaggtggaggttacagcgagccaagatcatgccactgcactccagcctgggcgacagagccagcctctgtctcaaaaataaaaaaggaacctaagcactgagaccccctgacagtagatctggtaactgagatggccactaagtgactggttggtggtgggggtgtctacagcgtggagatgctggaccccgagagagagggtttatgacccaggcaggatggagcaggacagcacaagatctcctcacactactcagaatgactcacaatttaaaacttatacattgtttatttctggaattttccatataatgtttctggaccatggttgaccacaggtaaatgaaaccttggaaagctaaaaccttggataaggggggactactgtaatataaagtttacagttcctggggtgaaagctcaggcagaccctatctatgcattattacaacgtaccatcaattcaaaaccataaatttgcagaaacatcgttgctttaattcctaaaatattgaatatgaataataaaaataatatatgctttgtcttagaagcacctttttaatatgattgatgtgtattgatctgtttcttcattctaacrtgaacatttctgtaacagtcatttcccctgaaatatctaacctgtgggtacctgagacagcttgtcagttaggaagaacagtggtggcgatagccacgtagggctggtttggtcgtgagtgcaagtgtggttgcagcagctagagcagaggactgtgtggagaacatgggtcaggtcagaaggcagtagccaggagggatgcagagtcgagagagaatttgttgattggaatgactcaggttgactttcaggatgaagagaaggggccaatagagagggaagagaggacagttgatgaggcaggctccaagagaggagggcaaagcgagatcaggggctccagtgaaatgcctgagtgtgatgagaagagcgctgtcttgtgaggctagagagggaaccaaggatgggtgggcctgggaaggctggagaggtagcctgtcagggagctgctaacccacttagaaatactcttattgacataacaaggttttttgttttggttttttgtttgtttgttttgagagagcgttcgctcgttccccaagctgaaatgcaatggtgcagtctcagctcactgaaacctccacctcctgggttcaagcgattctcctgcctcagcctcccgagttgctgggattacaggtgcatgccacgggtgcagtggctcacgcctgtaatcccagcactttgggaggtcggggcgggcggatcatttgaggtcaggagttcaagaccagcctggctaacatggatataacaaaattttctatttcaaaagttcagtcgtgggcacaagttgattttgccttacagtcttgatagtgaaggtgcatactatttttaaagctgtattccttagatactaccatattatctaatgtttctaataatggaattagcaaaaaatgactacatcatccaaatttgactttgtactaacatacttggcgtactccatatccctgaaggttaacaagagataaatttggcctagactggtcttttcctgaattcatcacttaaaaaaggaaaaaaagaatggggaggaaaagccacgttttacttttataatttttattccatcattaaaagtacaacttgctttatgatctgaagaaataccatctaagtctttctattaggaacaaaagtgagcctttcagggaaaaaaaaaaaaggagctgggcttaatctgcattagccctttgatgtattcccagattttaaaaagcttcccactgttctcagccacgttgaaacagacccagccatgtgtccggcgctgtccttttctcctctcagcacacacttagccggagacaccttttggccaatgggccaggattcttccattgcatcttcagcatgtgaccgtttgtgctggctcattgggagttcygctgctcagtactccttccccaggcaaagactcttaagttaataattggttcagaagaataaactataccgccctcttggtcttcttttggacatttctttaagatgaggctcttactggtatatctggggtactttattgagaaatagaaagtgctagctgaaataaggcgtatcagtctagagttaggaagtgagaaatgcaatcggtaaattttgcttttaaataaaaatggaagccccattttaattgttgccatttctagtcattttatcatttttaacagcctggttttctattttagagaagttgctgaccaatatttagagagcacctccctaatctgcacatcctcttgtgtgtgatggtgaagtgatgggttggaatcgtttttaatgctgtttccattgatgggacattattaccagaaggagtgctttgtgccagctggtttcatggatggaggaaaacaatctgggtttcagtttcacaaatagaaaaacaaaacctgagaggaaaaggaagtaattcgttagcagtggccactgtgcagagtaggataacctgccttcaaagatttttgtttcatgcactataatataatgtttaataaatactttacttcaaagaacctcactacaagaaaactggccgctttcctgctattcttgttctccggctcagtatgactataagtagctcatatccggtcctctgtggtctcaggtggtcgtttgtgtttatgatccttaagctgaaactgtaaggactgtgtccctattttaagtctttagcagatccaccgtgttctgcaggaattgacagaggctctcgtgaaacccttgacactttgacccatcttgaggaaaatgcttagatgctaaaagcagtgtgcatagggattacgtcctccaaaaatagaaaactctaaatttactaagcrgggagtagagaaactcatcagactgcacctcaagtttttgatgtgttctggtcgcctctgcactcccattctagacttctaaacaacacgttcaggatctctgagataaaagctggactgaagttacagaaagagcattagagatgtttgaatttttcttttttcccccctgtagatatatttggcatatgtagaatttgagagtccactattgataccagtttcttccagatattaacacatatcaaatagacagctagaactcagaagaaactaatggagctctgaaagaaaccattgttttttccactataaatcttaactcaacagcatttagggtctgggtggagccagtcaccygggcagctgcttcacacccattttgaattagctgcccagtgcttctggtgagcacctcggtaggagccactgctgtgaactcttttgcaagttctggtggtgactggtttggtttttattgctccctgtttgatgcactgataggacctagggctgttcttagaaatataggcctgagacgacttaaatttcacactggttttgtcttccgtttccacattcctctcactgactctccctcccttcctgccctctctctctctctcatatgaaatgagtttaaaatcagaggggaaggattgctttaatatttagcagtctaaacagagggggacagggctgaagaggaggaagggagtgaatgggtgtagaagagaaaagctgttcccaccccattgctttaatgacagtggaaagggtgcatggattgggcctgtgtttctctatcagctactttgttctttaaagcactggctagctaagccatctctttctctcccatattttgcctctttgagtgtttgcctagaaccacttagctgtggcagccctgctgatggggcaaggtgctctgcaagtttctaggcaaggtttctggatccatgttgaaattgarcgcagatagcacaaccatattataacagctacttacaaaccagtcagcacatgtgtggtgagcatttctagagttgagttattgcttaggtcaattgtaagaggagtttctctgaaagagttctgctctttgaactggcaaccccaactctagaacttacagaattgtttttgttaatttttctggcaagagattcatccaagtttcctaaacgtactacaagggtatatgtatacagagaccttaaggaatggccagccatgcaaaccctagggaacatcttatctgacagttcttgggatccacagtggcttgggtcataatgataatactgtaactgggagagctgatgtatatggagcactcagtatgtgtgaggcaccatagattctctcttcatttaatcttctcatgagaaatacagacgttaaataattttcccagggtcacataagctggtactaggaatgaggcttaaagcagggctctctaagaacaaaagctgtgatgccttagcatcattgacagcagctcccaggtcttactcatcctagtgcagtcccgttagtctacctgagctccccctaacacaggagttggcctctgcccactggggctttcattcccactaccacccacagtttctgcatatggcaggtcggagcccatcgtagtgtcatgagccattctctaaaccaccgtctgcctgaaaactgcctcattctctgtcattcctgaaggaaggactctggctggcccatctcatctttactcacctaggtgttcaatggatcactgggtaatctgagggttgatgttcttctttagtctatcaaccaatcccagagatgggaggcagggcttacatracactgtaaatactgccacctgggatgacttctgcgggagaagtactgagacccaagtccaccatgggaactaactggataagtttccgaagatttatgtcagtaacattcaccaccgtgtcctttgtattcacaaaataattagaaactacctgactgtccatcaataggagtttagttaaagaagttttgttgttccatatggcagaatattcatatgcagccattaaaatagtgatcaggtaaatgtttacaaacatggaaagatgcaatatgaactatattgtaacatgaaaaaataaagttaaaatggcccgtgtaggatattgctttgttttacaaacacaaagttgaggctgggtgcagtggcttatgcctataatcccagcactttgggaggccaaggcaggatgatcacttgagcccaggagtttgcgactagactgggcaacctagtgagacctcatctctgcaaaaaattcaaaaagtacaataagccaggtgtgatgatacatgcccrtgaccccagctactcaagaggccgtggtggcaggatcgcttgagcccaggaagtcaaggctgcagtgagctgtgatcgtaccactgcactccagcttgggtgacagagcagagagactctgtttcaaaaacaaaaagcccccacaaacatgaaaggcttaatccaggactagtaatagttgccgaacttgagcggaattgtcttcatgctcttatgttagcatctgatattttataatgagcatatcccttatagattcagcaatatatttgaaaaatacaccaaggtaaaggagttgtgctaattaaaagtagctgaaatgaaaaatattgattattgaggaagaaaaacaatgaaagtaagacatagaggcctcagcagtattactgataactcaatcattgttacctgtataatagaacaaattaagggcagaggttctgaactgaagcagtgttattactaaggtgcttgaaggggggaacccacatttctttaatagcaacactccaggtttctaacatctggaagtatcacaccatgaattttttttaacccagaaaaactgggaaaaacttcaaatcactgaatgacgtgttaaccaagtttctgactttaagactttaagattattgactctgaatttacatagaattctaagaatttcagttagttgattgtgtgtgtggtgtgatgtttaaaataagtttgggaaatgctgggttaaattaatrttttttatttcaggatgtctcaaaatctttactaagtggatgtctgttttgaatctccaagatggaatatagaatgcagcatttctcaaatggaatttgaccactgagtccttgttttctttgggcatgtactaagtagcctttcccagagctcattttgtgggataccataggaaatgctgcgatgggaccttttaattaatttattttttgagacagggtctccctctgtcacccaggctggagtgcagtggcaggatcatagctcactacagcctcaaaactcctgggctcaagcgatcctyctatctcagttcactaagcagctgggactaccgaagcacaccaccacagcctgctaattaaaataaaaaaaaaatgtagaaacaaggtgccactatgttgcctgggctggtgttgaactcctaggctcaagtgatcctcctgcctctgtctcccaaagtgctgggattacaggtatggccactgtgcccagccatatatgtrtatatatatattttttaatgaagccacaagcattctgcctctgtgctttttatttatttatttatttatttttgagacggaggttcgctctggttgcccaggcaggagtgcaatggcacaatctcggctcaccgcaacctctgccccccaggttcaagtgattctcatgtctcagcctcccgagtagctgggattacaggcatgcgccaccatgcacggctaattttgcatttttagtagagacagggtttctccatgttggtygggctggtcttgaagtcccgacctcaggtgatccacccgcctcggcttcccaaagtgctaggatttacaggtgtgagccggccgaccctatatattttttaaaagcttttaagaaacacagtaatctttgagttgagattttgaaaaaaattgcaaaaatattgcacattagcattttaaagttagtggaggctgggcatagtggctcacacctgtaatcccaataccttggaggctgaggctggagggtcgcatgagctcaggagtttgagaccagcctgggcaacaacatagtggtatcctgtatctacaagttttgtttttttgtytwbwwktttkkttktttkttttttttaattagctggtgtggtggtgcatacctataatccagctactcaggaggctaaggcaggaggatcacttgagcccaggagtttgagcctgcagtgagctaggatcgcatcactgcactgcaatctgggcagcagagcgagaccctccctcacaaataaagttagtggaaagtgctatagtaaacttttcccagttttcccctaatctgttttaccatgggccactcccttacccccacttttattttttttcacattagctattaacatgccctgaaagtaatgttccttagaattccatcaggcaacactactctagatcagatctgcaaactacaccccaccaactgtttttgaaaataaagttttggctgggtgcggtggctcacgcctgtaatcccagcactttgggaggccgaggcaggcggatcaccaggtcaggagatcgagaccatcctggctaacatggtgaaaccccgtctctactaaaaatacaaaaaaaaattagccaggcgtggtggcgagcacctgtagtcccagctactcgggaggctgaggcaggagaatggcgtgaacccgggaggcggagcttgcagtgagccgagattgcaccactgcactccagcctgggcgacagagcgagactccgtctcaaaaaaaaaaaagttttatcggaacacagccatgctyattcctgtatgtactgtcagtggctgctttcacgtgactgaagcggaactgacagtgtaacatgcaaaacaggtaagaaaagattgaccatctagcccattgtagaagaaagtttgcccacctctgacctagatgattagtcataggtagttgcatttgcaaattgactaattttctttttacactccagcatgaatacatgcaattgaacagctaatataggtgtgtgtatgtgtgtgcacatatgtatactaaaatattgtaaaatgtcaagtgttgcaaataacattgttaactgaaagtgacggaatggccrgccaaatttatatttattgtgtcaaaaacaaaatgtaccagacaattaagataattttacccaggccactgcagtaggggtaacgtttattaatgagaaatgtctcagagagaggaagaactagggttttataaatgcaggtgaacaagggaggggtccaagaattacggggttcatgaagaagagtggaagtctatggggaaggtkgctttgcctccagccatttcctgggttaagaaagaggaggaagattctgtaactgtttctgtgttctaggagcacggggctcagggaaagttcagcattgtcagttgtcaasaaaatcagtaagtgttattaaataccccatggtgtgtggttctggcactgaaatggggctgtttcctaaggctctgtccatggccacctctgtctrtttctgcattctgtcttgcattgcttctgttgcctatatcctggtcagcacagtttatggtgaatcattgcttattgaaatagagacggcaataatgaagccagctattataaattagagcaaatatacacatccaatacgttttaaacgcatgtgatctctggagtagtatcactaggtagcttccatttcagttcgcctttggtatattactgtactccaaagaatatcatttttccctctgtaaaattttcctcatgaaaatggtcaccataggtctgatttactttttggatcagtaacaggtcacagcataaatcccattcctgcatcaaggcggaacaagaccctcacactttggagggagctgagttcctgtttagaagaacatgcacagttagataaatctgttcacacggcttagatgatcagagccaacatctgatgactatgagcaaggcacttttctaaacatttttagtattttctgaacagttttgttgaggtatactttacagataacattcacctcttgagctgcagttcaatgagttctcgtaaactgagttgtgcagccatcaccacgttccagttttagcacatttccatcaccccaaaagttcctttctgcctgtttgcagccaatccctgctccctggccagccacaggcaagcgctgtcaatgtttggacagtgttggattacctaatggactcttcaagacagtcctttggggtgttactgtcattctctgttttacacggtgaagaagtgaggcactgagggcactcagggtggtttcaaatgaccgaggccaggtgctcagggcccagaaccctcttaccccctccaacttcagtgagcttcaaaatcacctgctgagcttgtttgaccacagacttgtgggctccacccttgaattcctgacgccctaggtctgggatggggcttgacaatttgcatttgtaaaaagttcctgaatgctgctgctgctgctggtcagggaaccctgctttaagacctcctggtttatgcartttcaaacattgtaagaaatagtcactcatgtgattggtttgtgtgcttggtgtagactgtacgaggatttttcaaaagtaagtattgttcattctaaaggaaggaaatgtatgttatgagatagaattatataataaacagaaccattaaatgccatctgaaaagtggtgttttcaatggcaggaagtagcattgctgcgtattttgtgtgtgtgcgcaactcagctttgtgtcattgtgtaactttaatttgaaagaacatcacgtgactgctgttttcatttctgccttttaaaaagcagacagctattcagaacagcaagaagcagacccaaaytttgtttgtatgcccctagtcataggcaaaaatggaaagggtaatttaccaaaaaagaagaaaatagataaaaaggaraagaatggaaagaaagtactgactcactgcaaacagctgcaaaatgttgcccttgggatagaggttaactcggttgtgaaataatggccaaagcggtgcactcttaataacttttttgtagccctggagaaagcttctggattgactgtgagaagcttggcagaaggtgctgcggcctggtggctggctcagcaggaggcctgggattgaaagctctcggtttgtacaagctcttttggatttgtaacacttttattttaaatctccaataaatgtaaatattttggtccctttttttctctattttttaaaataaaaatattttmgtgaatatgagttaaatgagaatcaagtggcttctgggcctccctgaaagatcaagtggaagcactggatgactctaatgatgccgaattgtaatccataaagcacctgggcagagttcaatcagaggtcccatttcagaagttttttggaatgtagggaaagaattacttagaaaaggttcatctacttggagaggagatggttcaatatgacttttagaagaagccgcagtccctgccccacaggggctgcttagattgcttagatggatwgtcatctctctctctttttttttttgggacggagtctcgctttgtcrtccaggctggagtgcagtggcatgatctcggctcactgcaagctccacctcccaggttcacgccattctcctgcccctgcctcccragtagctgggactacaggtgcccgccaccatgcctggctaattttttgtatttttagtagagacagggtttcactgtgttagccaggatggtttcgatctcctgaccttgtgatccacctgcctcagcctcccaaagtgctaggattacaggcgtgagccgccgagcccggyggactgtcttctctctaagcagtaagagacagtgggaactgcagaagggtgtttgcagcctcatgcagttgactgaatgaattggccccagagtcacccctagcaccatcttgatatggacaggaggcagggaaatactgggtagaagagggtggttccccagcaaaggccccaccctcaagcctggaaatccggagccctaaatgggaacaggcattcccgtttttgtgcccaaatgttgccttttggctcaccacgcccccctctcctgtatccatataaaccccaaaccccaggctccacaagcagaagagtggcagagcagtgcagcagagaaggagaaaagaaaaggtgcttctgaacattgagaggagttcggctggggaaggtagcagagatcagctatgggatgaccaaactccaggggaaagatcatcttcccactctgtcccctttccagctccgcatctctcaccgagagccatctccatcactcagtaaaatcctcacattcaccatccttcaagtctgggtgacctgattcttcctgaatgctggacaaagacttgggtaccaagagggcagggcttacagggctgtcacccttattctccgctgagctgttttaacacgtagccatccgcagatggcagcttctaaaagagcattaattgtaacagacccccagacactaccatggggccagagcccaaaagtgctcaccccagctcctacacctgcccctgcccatctgcgtgctctccctcccataaggggtttgagcacgtgtcggccaagcaaacgagcttcacccctgtcacaagtcctgagaggagtcagggaactctcccatttcattctgacacaggtgggactcagcattctcagaccttcaaaggcctgttgggtggatgtggrggtgtgcgytgccccaccaagctgatgcctgatcaggggaggccactagaatagtctcttgtacagcawcagagcctcttactacagtgagcttctcctggggctttcagagtacgtccgagctccacaccaagaagagagccarcccacgtggatgcagctcggttcttagggctgacttgaaacttgmtaagactgcctcaagcatgtgccacaaccccagttcttgcaaacccccacagagtcttgagaaatccctcttgtggtccaaattggggaaatatagaattagtcaaaagaaaaggctgaagtcttggtcatctacatgcttgcaaattccagccttcctggcctgtgagtgttgcatgaatatagcaggaagtcagcactctccatctttcacaaaacgtgatgtgtttcagtccgtgcccggtgaacactattctccacctccctccctcccaacttgcttgctttcagcttctctttaaagtacaccttaaaattcaatctatcattcagacatagagagcagtggcatatgagaagcaaacatttggctgggcgcggtggctcacgcctgtaatctcagcactttgggaggccgaggtgggcagattacgaggtcaggagctggtgaccatcctggccaacatggtgaaaccccatctctactaaaaatacaaaaatcagctgggtgtggtggtgcacgcctgtaatcccagctactcaggaggctgaggcgggagaagggcttgaaaccaggaggtggagattacagtgagctgagatcatgccactgtactccagcctggtgacagaggagactctgtctcaaaaaataaataaataaataaataaataaagggcaaacttttaccaagttctcatctcttaagccattgtttgtttaatggagtagtagatgatgtgggttgttatctaacaagaacattgtcccttgtgggactgcacttagcattcaccttcggatgccatggctaggtcaggatgccagcctaagcagtcttgactttagatttgaaattccggccgggtacggtggctcacgcctgtaatcccagcactttgggaggccgaggcaggtggatcacctgaggtcgggagtttgagamcagcctgaccaacatggagaaaccctgcctctactgaaaatacaaaattagccaggcgtggtggtgcacgcctgtaatcccagctactcgggaggctgaggcaggagaatgggtttaaccygggaggcggagtttgcggtgagccgagatcgcgctattgcactctagcctgggcaacaagagcaaaactcaaaaaaaaaaaaaaattttgtaattccttcaacacattataacatgacaagtgcttcttgccttatctactagtgaagactctgcccrgcccgctggcttcctaacagtcctgtggcggtctgttctttcctgtgtacactccttaaattgtgacatccctacttctggaaagctcaccatttcctatacccctatttgatttattttatcccaagacttatctcaaatcctccctgctcccaaaatcctcctctcactgccttagttctccctctgaaattccatagcatttcattttctcaacacagactcagagaaatttgctggtaggagggaccttagagstgcgattctcaaccggggcagtattgcccccgggcatattcggcaatgtctggagacatacttggttgtcacagctgggagggagtgctatggcatctagtgtgtggaagcccgagaccccgctaaccgtcccacccaacacaggacaactccaaaacaaagattaatccaggctttcggctgctgttgggaaacttgtccacattaccaccacatacctggttccacaatttacctctacatgtgcatgttcctgagtaattgcacactttgtaatgtctcgtagcccctatagctagtctagttaatttctggtcatcatggaaaatgccacctctctgaaatggccagcactggagagacgctactgctgctgatggtgaatgtcaggggactactaggtgtcccttctatttttgttaacttgtagttatttgtaggatgattgcctttagtgcagaaaattttttttaagtttataaagcttgtgagaaaaatccttatttgtaaagaagctcagtattattttgaatgttcttgcttctcatttatgactactcaataaagaaaataccttttcctgctctgctgtccagtttgttgggttaatttgggagatagtgtcagcaccctggaattgtgccaacttccaattatcactctgtgtaaccactgacttcaatttcaaagtaattactgcagatttttctcactaccctgaacatagcctacacgcttttaatcctacacttatttttttycccatctaaaaggaaaacttattttgattttgatactttttaattttttaaaacttattttgaaataacttagacttgggaaaagttgcaaaacaataatacaaagaatgtccagataatttcacccagagtcygcaaatgttaacattttatcagggttgatttattgtgtattcctctctttytctctctctctcttcccacctccaccatctatatatgtaaataattggtatcttctgaaccatttcagcaaattgctaacarttcttaagtgtgtatttcatcgacacaggacaacattcccttatggaactgcaatgcagtactgttaccacaattaggaaactgacattgaaacagcaccattgtcttatctacaaacctttcaaattttgccagttttcctactctttaaaatgttttcaaattgttgccagtttactcactacaaaaaatactgtctttaaagcaaaagaaaaagaagtgttattttctggcccaggatccgctcagagtcacaccttgcattgacttttcctgtcctgttggtctcctgaatctcgaatcgttcctccgttgttctttggcttccgtgatcttgacatttttgaagacaggccatttattttgtcaaatggctctcaatttggattcatttggtgtttcctcacagtcaggttgttactcatttttggcaggaacgtaacggtggtgctgctgcgttgtcctcrttgtcccctctcgggaggcgcatgttcacgtttctctttgtcccactgttaatggcatcactttgatcatttggttcaggtggtgtttgtccctttctccactctgaagttactactttcctttttccatttatctggtaaaggaaatagacagttaagctggtaatttcagcataatatggtgagtgttaaacagacagccagggtgccttgggagccagtaagtagatgtcacccaacctggtagctcagggaaggcttctggagttgatgacacctcaactgtgacttaaggkaatgattatgagtcagccaagccaaggaaaatggggaggatactgtagaaggacatgataccatgaacacagccatggagccacgaaacttcatggtgtgttcaggtcgctacagtggctggcagcttgagttctaggatggagttcggaagatgtcacggaatcccagtatggcagtacaagtgcacttgttctcacgggaggctggaagcaaaggctgtgctccttgttcctcaaaagctctagggtctcttttgtctcttaattccatagttctctctcccctaattaacacagagctaaaaatagcagagaaatggggaattggggggaagattatagtcaaagaagtttcatcacaggatgcacagttaatttggttgcactggaaattggtttccttctcttagaaaataaaaatcatctttgcaaaaaattgtcacttctttttctttcacttttttgagggtgaaaattagtgaaaaatgaaaatatgaacaagttgtgcaaataaaactaaaaagtcaccgaatttggctttgaagtatgcatctgagaagcctactattctttggcttgaatgagaagtgtaagttgtggaatggtaaagcagtgtagcctctttgacacccagccaatttaatttttttttttttttttaattttagtggcagtaagtactgacttaccaaggcttggggtagcagatactatcacagctgccaggacttttccaggctcctgtcaagaaactgctgcaattctgcaagagtcttcagattaaattcatgccaagtcatttcctctgttcttctaccagtgaggtcacctttgcagctgaccattagtgatgctgtcagcaagaaaaggattatgaactgaggtctaaatttcagtgatgtctaggcaaaaataaatgttcaaaagaatttagcgaggtttccaagacctggtaaatttctccctaagagaaattgccagatttgtgggctcttgattttagcctgaagaatcacattcttcagcactggaagtttttccttctttttttacttttctttttttttagacacagggtctcactctgtcacccaggctggagtgcagtggcaggatcataacttactgtaaacttcgaactaccgggctcagttgatcctcctgcctcagcctcatgagtagctaggattacagatatgtgccactacacctggctaacctgtttttttgtagagacaaggtcttgctatattgcccaggctggtctcaaacttctggcctcaaagtaatcctatcacctcagcctcccaaagtgctgagattacaggcgtgagccaccacacccagcccaacattggaagttgtcatagttatcgccagttgcctctctttttgtctggagatgtgtaggttagccaaaaaaaaaaaaaaaaattaccgatttttttttattttttcattcacaaatattgaatgtcttctctatgtaccagatactattatgctctctcatggaggttagtactgtctactggagaagacataccaaaaacaagagagagagaaagaggaaagccacaaatcagttggaaacacgcccgtattagtgactgaagagcctgcaaatgaaagctttacaaattcatatggccaaatagatttccttgctccttgagttaaaattcacataacacaattaaccattagctaagttaaaacatacaattcagtgcatttattaacgttcacaacgctgtacaaccatcatctctctccagttccaagacgattcatcaccccaaaaggaaaccccatttccattaagtgatcactccctattcccccacctcccccagcaacccctagcctactgtttgcgtgtgacttcttccactcagtataacacttctgaggttcatccacactggagcatgtgtctggtctttgtaggtttattccactaccaaccatgttctttatgcttaaaataactcctccctattgaactgttttggagtgatatttcctggggtggaggtagtttaatgattcatctctgtcttgttagcatgcttgtttatggtagagagaaattttgtattctgccaccataccttgtcaaaaccttttaacaaggcattgattyggttctctggttctgagaacttggcagtggaagacaagacttccacccgcattgcaagcaaaatcattgatgtcaattcacgttattgtggaaaaccgtgagttgtgacaagtgaaagcttttcaccaagccacaaaactakgggcgtgtgcagtcaacacacggaacacaaggggtttgcttccgtggctcagcatagcactctctcactagttctaaaatattcatagcctttgctgttcccaaaagacgtttgaaaaataagacttctcctttgtcagcatccgcgctcacataactggtgaaactaggagatagttttgtatcccggaagataatcattgttccattcaggtgttgggcagagagaaatggcttatctgcacatctgcaggaygtaagagattagtgaaatatttgtgattctgatgttgatgacttttaatgtttgacagagaaacttttgcaattattttcttctggtccaggcctcactccttctagcccacatggctctagtcaacctcctttaatcagcagagtaatagccaagactgtagtaggatgcctcaagacagacttttatgttgggacaagtagtgtcttattaaggcggttccagcctttcatatcctgcctccttgggataaagagtgtttgtttacagagcttctgggatagactgctgcatgctgcatccgtacctctgttgcagaagcacatctgtcccattatgtctagtgacaaaaataagaccwacgcctcagtgaactttgcatacatctgaatgtaagcaagacaagtatatttgacattttaaaaaggttttttctttcacagttttcaaaataacataggagamgcaaaggaaaaaatatttcttgtgtttctaattcacaggttgcttgagactttttttggaggtgctagyattttattggccacagagttttgaaggaaaatacaatkaaatcatgcttctgtcrtttggggaaaaggaataacagattcattttttctttttttaaagatgagagagatagtatttggaatctatctttagaytattctacctctgaatctaattgaagtaagaaattgggcaagaatggaatcttacttaccacccaggaaaaaagctaaacaattgtggctcagtccattttcccctgagactgtcttcagattgaggcgatcagtgttaaaatggatggaatcaccaggctctccacattctagtaagattgtagtacggttgaaagtcaaatgaaagtccagctcttcagtgtgtcatttcctcttgcagacaccagaccaagggcagtggtggtctggcgcttatattttgttattatttgttgagaccagaactctccttaaggatatatttatatatgttttaatattaaagtttcttttcaaggaatttatactaattagttcatgtaataataacatgtgcattccatttaaagttaccttgctaaattttctaagacttgttagcttccccatagtttttaataaaccaaaagatcaaacgaacagtccccagttgcccaaatattgagcagttaaggctggtttcagctcatctgaaatctgtaaacatttaaagagaacctctctcccagaagatagtgagcacggtggtattctccagtctcagaatattaaggttacttacagactagagaggccttcagtctatattaacgagttcctttcctaatctcacccttctaagaatatatttgatccaatttagggacagcaacattgaggccagagaaaaattaatggggtagtaactgtagacaccaaaacactccccaaatcttgagacatcaaataagcaagactgaatttatgcaaaagatactttaaagatgtttctttagctgggcgcagtggctcacgcctgtaatcccagcactttgggaggccgaggcgggtagatcacaaggtcacgagtttgagaccagcctggccaatatggtgaaaccccgtttctactaaaaatacaaaaattagccgggtgtggtggtgggtgcctgtagtcccagctactcgggaggctgaggcaggacaattgcttgaacctgggaggcggaggttgcagtgagccaagatcgccaagatcatgccactgcattccaacctgagcaacagagtgagactcttaaaaaaaagaaaaaatgtgtcactcagagatttttctacctagaacaagagtcayacatactttttgaaattattttatctatgtaaacttacgaggtacaagtgtaaatttgtgacatgcatagattgaatagagaggaagtcaaggcttttagatattcatcacctgactaatgtacatggtacccattaagtaatttctcatcatccaccctcctcccaccccgtcacccttctgagtctccattgtctactatcagaaaagccttctccagcagcgcattgtcagctgagtctaggagaagaaagscttctcatggacatgagctaaattccctgggaaaggccattccataatggagaaggccttctgttcacccacagtgtggtcctcagaccagcagcttcagcgtctcctgggaactcactagaaatgcagaccccaggcccagtgtggcagctcacgcctgtaatcccagcactttgggaggccgaggcgggtggctcacgaggtcaggagtttgaggccagcctggccaacatagtgaaaccccgtctctactaaaaatacaaaaaaattagccgggcatggtggcgcatacctgtaatcccagctacttgggaggctgaggcaggaaaatcacttgaacccgggtggcggaggttgggctgagctgagatcgtgccgctgcactccagcctgggcaacagagggacactccttcwaaataaataaatmaataaataaataaataaataaataaataaaatgcacccaaacctgaattggaaactcaggtggggggcctagcggtctgtgkttttactagccctccaggcaagttttgatgctttggtgattgagaactgctgcttatgctgtcttggtggagagcacttcagccagtgcctcttctgctgattctgtatttatcaaagaaccactgactataatttagtgctcacactacagttaggaggtgtgtgagttccctttacaaacctatttctgattgtaaattcctaagatgktttacacatcagtatcttgtgagcttgataaaagtgaatccatctcgttcagagtgatgcattatgagtgtatagtggaagtctagcttctaagcctgtgaaacagaggcccagccccctgatccaggcagatttcactaaggtagaggccagggtagatgtccctgctgaacgggcaccctctcatcccacctcaccctggctgtgtgtactgtatatttttaaccaagaggagagcagagcggcacagaatggctggtactcagtattcctggtttctggattatacagatgcaagggaaatgtctcctagtcttatttcatgagttactgtgtagcattattgaattgcartggtaagagggttaggtaggcctttctcatttttgattagacagctatcatttacaaattagaccacagggaatcgaccttaacttctgtgactaaagcttttggcagttacttttggcatttctggccctctagacttgaaaatgactgagtggttacaatttacaaagttaagagagctttctgttgattggtgtgaatggtaggatatkagacagactcttaggagtaaaggacagggatttagggaaaatcctagtggagtcactgcagccaggcagagttgtctgttacatgcagataacaagtcacgctgttggggwtaattagaaaaagaggaaacaaagttgagaaaagaagagggaggcagagcagacggcagaggacaggaattttcagtgcagcgttgggaaaggttgtggaagctgaggctgacgcagacctagggcgttaaagctgtatttacagctggaccttctgattcctggggaggaggggaggctggatcgtgggtaagagagactggcagggccagtggaggatactctcccactggagttgtccagtgggagttgtctggagttgtcctgggcagaggctgcctgttgacagaggctcagcacagccatgcttaagataagctagctaagcaggtacgaggaaaaataatttacctgaagttctttctggccgggcgcagtggctcacgcctgtaatcccaacactttgggaggccgaggygggtggatcacctgaggtcgggagttcaagaccagcctgaccaacatggagaaaccctgtctctactaaaaatacaaaattagttgggtgtggtggcgcgtgcctgtaatcccagctactcgggaggctgaggcaggagaatcacttgaacccaggaggtggaggttgtggtgagccgaggttgcgccattgcactccagcctgggcaacaagagcgaaactccatccccccccaaaaaagaaattataataaaataaagttttttctgtattaaacatcttgtgtttaaaagtctacagtgagtcaaggatgttgaatggccaaagatcataaatctctccctctttaaatgagctgtgggctgggcacagtggcttatgcctgtaatcccaacactttgggaggctgaggggcatggatcgcttgagcctagtagttcgagaccagcctgggcaacatggcaaaactctgtctttacaaaaaatttaaaaaaaaattagccgggcatggtggcatgtgcctatggtctcagctacttgggagactgaggtgggaggatcacatgggctgaggaggttgaggctgcagtgagctgtgatcacactactgcactccagcctgagtgacagagtgagatcctcaataataagcagtcttcagtgtttcattttacccaggctaaatrtatttgtagtatacatatatgtttatattttgatagattcatgtgagtaaaagatatacaataaaaattgacattaccgaaggggagtgggattagatgtgagagggtggattagtaaattgttttacacacctctttaccattggacttgttacaataagcctataactatttttaactccataaaatacattgttttataagagctgtcaaatttcacttgctcagtcccctgattctcattttcttataaaatctcaggttcctcaaatatgaattcttctgccatgaraaattagcaacatagtcttaaagtctggggaaagattatagtcagatccacatagataggacaacgttccaagtcgggagaatgttcatatgagaattgaatagaaggccaaatttttaggctaagaatatgatcagaggacacttccagtrgagagagtcagcgtgaagagttgaggtgcatggctgttgtgcatctgagagcgtgtacgcgggcgtgagagcgatttakatccctgtgtgttgaattcgagacccacccagacagcctccagtgtcttctcagtgactgtgcccaagatttctgtccatctgtggacatgttttaatgacagcaattagtggtaatgatggctattaaatacttaatgacatttctgtgttctgaggcttcttcatacaagaattcacttactggccgggcaccgtggctcacacctgtaatcccagcactttgggaggctgaggtgggcagatcaagaggtcaagagattgagatcaccctggctaacatggtgaaaccccatctctactaaaaatacaaaatagctgggtgtggtggaacgtgcctgtagtcccaactactcgggaggctgaggcaggagaatcacttgaacctgggaggcggaggctgcagtgagccaagatcatgccactgcactccagcctgggtgacacagagagagactctgtctcaaaaaaaaaagaattcacttactttccacagaagcaggcactgttatgatccacagttcataaagaaggaatctgagacatggaaagtcgamctttcccaagcttgtaagtggaacagtattctgactccagatcctaaayggtaaaccactactctctgctgcctcgcagcctggagattttctgtaagagaggggctaaaataaaaaagcccacctcatattgatcacattcttagtaatccttgaatacgtttatattgtgtcattcatgaatgtcttttccctctggccagattatggtatttaggtcaggagccattttttcttgtttattttgtattcttacattgcccagatatgctcgataaatggtttttgaatgaattaaccaaactgtttctctaattcactatgcttttaactgtctaaggaaaagacaaccgtggggtccctcgctgcatgcctgggaacctctctgaacacggaatcaacttcctttctttgattttagagccagatgtgatgtttgaagaatgtaatctatttgctctcaaacatggagagcatagagctagaactccaacaattagaagttaatctgagatgtcctacaatacatgattttaaaataaaatccaccagtgtcagtctggtgcagtgactcatgcctgtaatcccagcactctgggaacctggggcgggcggatcccttgagcccaggagttcaagaccagcctgggcaatgtggcaaaaccccatctctacaaaacatactcaaacactaagcaggcatggtggcgtctgcctgtagtcccaggtacttgggagtctgacgtgggaggatcacttgtgcccaggaggtcgaggctgcagtgagccatgcctgggtgccagagtggtaccctgtttctctgcccaccctcccccatcccccccaaaaaaatccaccactctttcattctgaacaaccagagatgtttggaaaggacacaggaaataatacctggtgaatagttactctcgagcacttgctaggtgcgctgcagatcttcgtaaatttaatcctcaaaacagttactcaagacctgtattagcttgattttagagttgacatctgtctgagaaggaggtaacttggtcagaaggtgccatctcgttgggatgtcacagtcgggcctgttggcttcagagacttgggctttcatgctctgctgctgccaggacgggggccacatcgccctgtctcccgatttctcccatggctctccaggacttggccaccttcagcatcgtgtgttctgtacacagcacagcatgagggtgccagcagtcctccttggctcagcgtctaggatgtgtcagaactgtaaaccccaagattcttaggcaacccccctaccagcgctcatttctgctacttcagaccagaaaccttcgcgggcgggggtgggggcgggggcggcgggggtttcagttgctttctgcttcagttttcttggccgacggtctacctcacagtatcacagtcatctttactttcgtttactctgcctttctgtattttagtttctgaatttctgtcccataaagccagcatttaggcattttgaattttgagtttcttcagtgaattcataatagtaaaaatatttaagaaaacctgtaaaggcaagattgttgttgaagcccctcacattagaacacttcccaggtgctccaacctgggggggactgaggacttacatgggaagtcagagctccccatcttttttccccaaaggtcattcattctgacagcatgacttcaacttgatatgagcaaagagcatttcagataggaggagaaaaaggaagagggttgggcaccgtcgtgaaatggtacacttcctcaccgcggtgcttatctacataattgtgtttttataacatttcctttacttttctgtaagctgatgctgccctaattatagatttttaagagaacacttcattgtaccccaaattatacagtgctttaaaaaggtactttcttaccggtttaccaaataccttataaattcgtaattacataaaacaattcgagatacagaatagaaacagcctgtactgttaacaggtgttggtattgttatataattgagtacatggctttcaaagatctataatatttttcttgagtaaaaagaaaaaaatgactcattatagtcgtaatgtgtcacagagactcctgatcaaacagaatgcacatgttctattttgtgcattctgtacagttcattgtaaatggacttgcctttgtggaagtgaaagtgccacttattccagcaaattgcctttgtggcatatgcacctacttgttagacagcttgggggcacttgggccaggcagaggctgggccccctttatcatgggcacacctgcacacatggcactatggcgccacactccaggtaggctgctgtcattaacagacttgctccttgggaaacccactgaggacttctcagtgccctcctgcccatcagagaccacctcggaattcttagaagactaggaatggggcagcttcctagacgctagctcttttcccgccacatcagttttaggcctctcttatgatacaagtgattcagattacaaggtaacctcagtgcaacacaagggaagaaataaatcctctctgttattgagtgctgggtctagtgtttaattttctttcttttcttttctttttcttgagacagagtctcgcactgtggcctgggctggagtgcagtggcgcgatctcggctccctgcaacctccacctcccaggttcaagcgattcttctgcctcagcctcccgagcagctaggattacaagcgcccaccaccacgcctggctaattttttggatttttagtagagacggggtttcactatgtaggccaggctgttcttgaactcctgacctcatgatcctccagccttggcctcccaaagtgctgggattataggtgtgagccaccgcacccagcctagtgtttaattttcaatttaatttttggcactatttttttttaagttgctcatcttaggacagtataactggaatgagccttgtgtttccagttacaaaaacaagacagaacaaaggatraggctagatttttgtattattgacaaccccatattcttccctccagaggagagatcatctttcggaagcaagcccgagatacacacagtcttacccattccttcaatgctgttgatgattagccttaagatggttcttttctctaaggaaaccctccccatttttgcaggatgtttgaaaaatgagttgctgaatgggcttcagatattcttattcttctgttttgttgggattttcttcccactcctatttgtgttaatttttccctcgaaaaatgagattgctgctcactgccgttgagcctccttgtggcacattcattggtccagtaaacgacttaactccaagaaccacctaccagtaacacaacaaaaccttgagtacagattgattcataaatggcagcggacgagtgttgaaagtgacgcattatgtcgctgcaatgtattgacattatcaattgtgtgtcactaaacagccaggctaactggatgatttactttgtgtttaactgcctttttcagttggagcaaatgttgaggaactgggatgcaatgtcagaaaccatatattttcttctgttaacaccagcttcactgaggcgtgttggttttggctgcaggctgtaaggctctagtgtaaaaaggtctaaacaagtgattaatgcccaggaggcagggctttacactgtctccacatcttttctcctttctatttrtgttgccttaatgcttggggtggggggttcaggctatttattgtgctgacgttggtttccatcctgagagtccttgatgtttctttgtggattttgtttgtttttaatattatttagcataataacctaaaccgtaaacgcttgcagttgcgatccaggtgtccttagttcagcagtcagacgtataataagggccactctgtacagtgaaaggtgacagctgtggcccccaaaaaagcagctctggactttcccctcccaagtttcagtcctggtaacttgaactagacttgctagtttcttgaaacattgttttattttcttgcaagttagtgtggtgttcatatttcacaacgctgaaagatacagtgtttctcaaatgtgcacttgccagtagacggatatgttaactgttaccgtgacgctgagaactggagctgctaactgaccctatgcgtttgttctctgcgtaaaatgttgtaacagtgctaattactaagcagctgaatttgtgagaaggtccacagcactaatctgcgcctcagtgttgccttgctagtgagaaaacgtgagcatgtactcaggacacatgtacttgatgrtgaacttccaggggcacgtttatctgtggatcacggacggtttgacttgtgggacgtaacatttgatttctatatgtgcgcttttgagacactcgtttttaccctattaagagttgttgagtgcagaacaagacattttaaaagggaagagtaacattcagagattttaaaacggaagcttttaaattactacttgcttctgtttattttttattttttgctagttttagaaaaacaaggaagaatatctcaagttggaatagtcagatttcagtgtttgggtgatggtgttaaaatcgttgttttaatggtagatgaaaatgattctgttctgttggattcacatcctgaataaatgtttctacacaattagagtctataacagactaagccagcatagtggtggtgtgggttttttgttttgtgttttttttgktttgttttgttttgttttgttttgttttgtttttgtctaaaagaacaacttcaagccttgggaaagaatttgtttttgccctgtggatgggtcagaaacatctgcttcaggtatagtttacaagcgttatttattaacccatgagccgaaaacccagatgaggagctctgactattgaaaactacacattccatgtttttataaatgtatattaagatgaattccacatacctattatttggatttctggcagccggaacttctacaaggaatttgtgtttttaaaaaggaatgtaaaattaatttttcttgtatcagagttttgctgtatatgaagaaatcctgctcatgggcagaaagcaaaggtttcaaaggaacctcatctccatatggttttactcgataatcctttatccaccatcttcagctctcattcctttgctttctcgcctgtggctacatttctatctctgcatcaattagcacagtgatttatacaacaagcaagcagtttagaggtaatggtacacaattaacatctcattccaccataaagggtatgctaaataccccagtcattgctttctctgcctggaattgaaataagtgtttgtcctaattcatatgctatctgatgtgaagtgrgcctgctttgtaccgcactacaccattaatctaattatagatagctgcaaatgaagtgctgtctgagctgggagattgaagaaaatagccttttgtcatttagcatgactctgtgaagcaagatcacactttacagggcaatactacaaaatggaaatctcaataatattgctgcctgttgcatcttttctaattacaacaatattgtaaacacaactgggcgctgatataaatagagctgtagatatgctgtcatgtgggttgtaggagaaagtcctccgagtgctgttggattaaatgatgcatcctgattgacagctaccttgagactgcactgatggagttgtcacagcattatgctaacaggctgctccagcgactgcagctgtaggaggctgtggttcgccctgcgccttagctgctgcctgtccatgtccgctcctttgcctgggctgcacctccaaaggaaggacggccgtaggcttcaattctgtgtattgtcactgttgtgtcttggagatttgtggtggtggtggtgtagctcagatatcaggcgattgggccctgtgcagaagtagagggaaattattttgtatggctcctaaccttgctctgcttttcctcaagtgataattgtgtaccctacaaagaatttaggagagtagaacgtggttgaatttcaagtctcattccactgaactgttttaaytcatatctagtttttctctgcttttcagccacgccagtgtttttaaagatgcatcatttttgcatktcgcgctttccatcactttaaaaacactgacactgtttctccagctctgagttaggacagtagacctttaggggaatatttgagtgttgctctcactgccacgctgcggaaatgaagacagagcttaatgttggagacctttggggccagaaggtgtaaaaccttgactaggaagagagcctaatctttgaagaagtgtctgcctccttacttagtgaggggtgcatggacagtatttggccagtgcttcaagatagctgatgcacagtgatttacagtcaaagatagcacctgcccttgagttggtattgactgagatggccaacagttgaggacatgaaagaacattaacagtcagtcaactgtacrtgtcctaattgttactggaagaatgacttataawtggaaactggaagtgagcccacttgaagaggaacggaggttgacagtggcactggaggctttgaaatcacagctgaaaactgtacagcaaactgcaagcgctcacctcgggagcagccgcagacctcgggatcattgcaacatttagcgcatggggtctgcagaattacattactgctacttctacaggctgtggaaaaaagtgggtggatttaatgctgtaaggaggtgcatgtactgtacaaatacagaagcctccagggtggtattctgtgtatccgtgaaagtggagtgtgtctcaaagtgggtcattctttgctgtctttggggtgctgatttctggggtgcaggcatacatgcccagttgcaggatgcttttcttaatgaggtccagtgataacatccctctctcacccagactgtgactagccgccgcctcctgctgcagcaaccactctcagcccccaggctttcaataggtccacggaagagctgcgtgtcagttttaaaaacaatcccactggtgtttcttgtcattgtcctgctcttgtggccttcctcctgaccctttcatgtcagctgtgattccttttctttctttcttttaatcttttgggagaaattttcttgttagacatgatttcacactgtagaggccataaaattaatttgcttagagacccgggttcgggtcacctttccgtcattcagtccttagataacacctcattccctcccattactgtcgtgtgtgggttgaggagtcccaccaggccaagccagagagcaactgttctgttctcacttacgtggtgagctgtttttcaagaacattttttttcatttggctgtgtggtctggagaacaccttcctaagccagcggagtgaagttccacgcactgaccagccccgagctcactggagcgagtcatcttccggctccatggcagcccagccccacccacaggcagctgcctgtcacccacgctggcatgttccctcatcctacccaggcagcgggaaaacctggctgcttctgggatcctactactctgtcctgtccacaagccttcagagtcttggattcctaccctcaaacatcaactttgtgatttatcttcttgaaaacaaccacaaaaacttaaaatcaaaactctctaagggagtttcgcacaacccttgaggaatagttaaatgcccacggtgaaaccgagcttgtaccccacggtccaggtaggggcacattcctgaagtctcacaaagcattggctctctgtgcccccaaagaatccagagatgctagtaaatagcagttttgatcagaagcttggaaggccctggtgtacattcttaaatgacttcttttctggggcatcaaaaagcttttacggttctcaccaggcagttcattctgatgggcccctacgctgcaccctgcttgggccccatcccggcacgcgccccgtgcagcacagcacaggccagctgagaggctgttttaagaaggcgtgtttgtgtggtacactcacgggctcaggacaacatcaaaggtaatcttaaaaagagaatctctctctgtcttctctttttatattcagaaaggtcatttctaaaccaactatttgcaccaaggcctctctggaggagtttaccccgttgttattttttacttgctattacaataagtcacttatcccccaaacagatttaagaacaataaacaaatacaaaaggaaaaggaacatctcatcagtaacaaagactgcatctaaaggcattgagtttgtgattcttttacatctctttccaagcaaagcaggagtcctacagagaaaggaatctgaaagatgaaaattataaaaatagtaaaaggatccagtgttcgtcagaatcttgtaatttctggggagaaatgaagctaaatacagtcttagcgcttcgttcatatgcaggctgatctgtgatataactaaacttagtttttggagtatatccactgtggggaaatgtggtaaatcatattctcagcgaatgaagatacttttcctgaatttaggcttcatattttgaagtcgaattctgcaaaacaagaaaaaaatagatctgtgtgctacactgaaaactgaacaaggcacgtcgtaagtcagtcacacagaaggcgcagctcagggcgataccaactagaaaagtaacttttttgttgactctgatgcctctagtgatgttggattttttcccccattgcagacagcacagataggaaaactgtgcaatttggtccaattatagtcctctctgtccctccacaccttcccccattgatttaatgaaggacttggaggtacaattcactgataaatagtccctctgcccagaatgtttattagactgacagcagcgtgcactctcctcgctttttccctcaccacttatgactcagatgaattttaataggagcaaaaagcttttatttgcactgtaatttcacttaaggaacatatccttcagaaactggcagacgcttctatgtcttgattgcaaaacacacactcaggagtaaagaaacatgcaaaagatgttattattcaacctgtcacagtgtcgcaaatccacttggaacttaggccatcaaagctctgcccccacccttttcagtaggccctgtgaagaggcacttagagattcccgccgtccccatgcagaattaaagggggaattatattttgtttttgcatccctgccatcatgatgcccacaggaggctttgagttacagcaggttttttgaatgaaatggagctgtctcactgctgcttctttcttacccaagagaaatcagacctggtagggatccagaaccttcgggtggtggttccaatttcaccaagagacacttcctcaaaccattttatcttttttctgtttggatagaccaaattgtggctcatagatttattcacggagaggataggaattctctttyttgaaatgttctgcttcactgaactgccctaaatatgcccgattgtttgagagccacctacagaaggtgccatgaatatacttgtctgtgcgtattttccatcagtgtttataacatcttgatgttattgtctctcagtgcagaaggctttctcattatcttgcatcttttcctaaccatcttgttacatcagaaagactacatagtgcctttaagaaaagccaacgttttcagtcatgaatataacattttctgtcactgaaaaaatggaattttaaatactattttgcccaaaatgaacactgaaccccattgtcttaacttactgatacgtagtgcagccgctcttggagggctgtgggaagctgcaacagccatctgctgccatctactggcgcctgtccacatgtcacctcctccatcccctgggtctgcccagctcatgggattttccttgatagggataagtttgtaggtggtgaagggaatacaagtaaaattctcagttttctttataacgttttgagatgtttttcttaaagatacaggatgatacttatcaatgattaattttaataactggaatagcccttatttcaagaactttctgaaatagctcaatatatgacagaaacaaatatattttgatgtgtgcagcaattgagaaccatttgaatttaaggctcttactgtaatttgaatttaaaagctaaaaattgatttrgaatgaatgctacttttgaggaaaatttcatttaaactcatttatggtttggttttgtttttcccttaagtacaaggtgaatatcttaaccagacttgccgcagaattgaacaaatttatgctggaaaaagtgactgaggacacaagcagtgttctgcgttccccgatgcccrgagtggtggtggccgtctctgtcaagcctggagacgcggtaagggctgtgtgtgtctctctgcaggacatgctggtctccaacttccccttccaaagcgacggctaacggcacagcacgattcggctctttgcagttcttacttaaccgacsccccctaaacagcaaaatcgattgcgtgtgttgtcgacctgtttcacgtttgcattaygttggtgccaggaccctcagcgcttcccctcccaaatgatctgggagtggagcagaaagaaggccagatgcattccatcattttgcaaatgcagtgttttgggaagtactttccttaaaagtgctgcttactctctagtatgctgtgctcaaagcatccattgaagtcatgccagggaataatactccgatgaggaactttttgcatgattcctggaacaaatgtctaattgggaagaagagttgaggaaaggttaattctgcaatctgtacagtaccagagcacttccattacttggtaaataaaatgtagcatcacagtttgaagtttttcatcttgatcttgtgacattaaagcacaaatcaaagctatattatttcctcgagataacttacatggatgaattgataggatgcacacattttcttagaacatggatagaaatctctactgatgagcagcaaaagtgaaaagaaaacaatttaggaggcaaccagatttccaggtacacttaaatacttgcatttttattcatgtgcaggaaaatagcatccggacatgactgtctctcatggatgaggtggtgattccgttttgtatctcaggtcactgggacttacattttagtgcctcctgatttctcaatagtacagataaaatatctgcttaacattgaggaaaaaatcaggtagttggcattggcttctagaaaagtatttgcaataaatgtgaatattaagaaaacatgatcagttttagttgtttgaatgaccagccctgaaactaatatgcgaagttagaaaaccgacttaacagctgctttacctggtgatacagaaatagaactgtccactttttcagaaaggcataaaagaggctacgtggctgtgaattgttgtttgctgtgaaagcattgatactcctggaagaaagccctctttaagactgtctaatgcccacgtgttaaggatttgggagaggccataagaaaaattacgtgtgtgtgtgtgtgtgtgtgtgtgtrwtgtgtgtaaaattcaggggaggacatcttccttctccagagttagggtcgtaagaggatagtctcgtggccttgacattaagaatcgttcacttgcacgtgacattatcagagctgtcagtggaatcttctagtgactagatatgtaggttcgtaaacaatataagggttttgttttgtttttttcatttttcttaagttttttttctggaaggcatctatctagtctgtatactgccagcctgagctttccactcctaattgtgtggctttaattataaaatcgtgtgtgtgtgtgtgtgtgtgtgtgtgtgtgtgtgtgtgtgtgtgtgtgtgtttcaagtaagtgttttccttaaatccttttctaacacctgaatccaaaccggagtggagggagggcgggcagggakgagggagaccactcctgcctcaagcctggagggcaagagggtgagactgcagccctggcccctcacacggccctcaaggaggttgctcagaggcagtaaacggggcgctcccaaggccagatcagcgcagccttctggtttctttaacagctgctggctcctgatctgactttcccacataccgaaagggtttggcctttgtacgttccatttcctggttaataattgaatgtagaaaagcaaggcatttcgtaaatgggaacaatgtgatatcagtccttggttcattgatgtagctcagatattaaaaacacccaccaataattaaatgtgtgtactcattaagaatggtttgagaactgttaaaaatatgttacggcagagcaacggggcctatattttatgcattcctttaaattcagagtacctggggggcacgcgtagtgaacaggctcaggacctcgggatctgtcagctccctcctaagttctgtttgcgggggctgctcaggtggggcgtatacttgcttttatttgtcttttttggtacttgcagaacttcctttcatattctgtgccattgtgttttgatgaaacagccttttctcttgaattactgcttgtgaaaaatgtcccaaaccactaataccgaaacccaatgcagcctgagaagtttcatcgtcggctcttagcgcaacttctatagttaaattctgcttagtgtaattaaaacacaagaagcttccttggaccagaggcacgtcacttacttgaggccattgtgaggaaacactacctgtcacgttgaaattttgcggttttaagtgattttaacaccgcggggcgtgttgtgttttcctccgcactaacaatagccgggcgaggttccccttttatgggtgggaagataatggagtcagtctccttggtgtattttcaaggaaaataaggaccctaaaacaactaagggccttacaagtattctgtttttctttgaaatgttactttttatcrtttaaattccagtaatctatcatgtttctgtttagcttagctgaagtaaaacttgaccaatcgtagaatggtgggcctggcaataagttctaaaaaaagtgtcacataaatcgtaatgaacaaatctgttttgtgaagtaaacaatttgaacacagtttaaaaacctcaggaagaagagatgtggggtggccgttgagaagtagtgaatccgctcggggcgcttggtgtggcagggccttgtgcactgattcatttgaaacactcagcctgccctaaacacagaagctgtgttttatttgaagggcttctgtagggttcacacagcaaaagttcctaataactttttcagtgtctgttatatactatttaacattaaatgtggcaggtcacattttaaatgattgtgtaatagtttttccgaacacgtggagagaggatgttaatacacagtaaaatgcaggtaagcaaacaaatcaataagaaagtacagtggattattaaggtccagaatcagtaatataatttaggaaacaactgatagaataaattttagtgcctttttatatgccttctgaaaatgtttctgcagtaactcatttcagtttgaaaactcgttttcttagactcgtaacactattgtaaactgggagcacttctgtaatcaaagttagcatgactcagctgtttcaaacttctacctttatgatactcttgaacagaaatgttaraaatatatatattttcagaataacggtagaatacatttttccacatgtcaaattagacttatagctgctgaatttattgcataattttcactttgactttgaagtcaaataaagtcatgatgagcacattcgctttgttagccttttgatatcagaaacaaaaccaccccataagatagtcacccaaggaggcattttaatattgcatttagttaagattctttcaagtaatgttcgtattctgcagtcatcacagatttgcatcagaaatactcatttaatacaccaaacaaatgagaaacaaaccataagctgctatatactcatctgcatttctttctttcttaacaattagtgaaaccaggtgaaagaatagwttgaaattaagtacctgttgctgctttttcttgcgaattagcccattcgatattagacttcgggatattttggtggggctaagatgaaaagatccacctcgtgatggaattgaccttcagcaggggacagtgaggtgtctgcggttgttcctcttgtgaacaacgccttaaaggcgagaaacagcctactgtacagtgtgccagggaaagcatcacatcggtgggcgtcggtggcaacaccacttacacttcaccctgattttgtttcctccttgcacrtgctcctttgacagggcaggctcccaagcaggtgtgcagtcagggccacaagacacaggcaccccatcccatctcagagtctgacgtcccctcctcccctttgtctctaagcctcatgtaactgagcttatagccgaccatacagaactggcaaacttggtgagatacctttattttttatttcttaaacaagattttaaaatttcataagctctcacgtatcctaacgagaaggcagggctgggccctcccgacgggtgtttgcctggcatcgcgcttgtgtgcctcatgcagcccaggctcgctcactgcatctttccctggcagaggggctagcctggctgcttcatagactttccagtttctggataccttgatttacaatcacaaaataattgcagtaattaaatttatatgttttatagcaatagttattcaagcagtttatttgacaagatgccagttttcacccaaacctcagattgtatctcacagcatgtacacagagatccatgcatttgttaacattttaagactttaaaattatgaaatactacaaacatgcagaaagttacagagaagaatccaacaagcactcctgtgccctttgttcaccatttccatatgtgtttcaaattttatttaacaatgagacattacatataacatgaacttcccctgtggcaagctcctccatctcattcctgtcctgtcttcttcagaggtaacgactacccctggatttggccttttaatcttttccagataacatttatttttaaatgttaagagttggtttttggccgggcgcggtggctcacgcctgtaatcccagcactttgggaggccgaggcgggcggatcacgaggtcaggagatcgagaccacggtgaaaccccgtctctactaaaaatacaaaaaattagccgggcgcagtggcgggcgcctgtagtcccagctactcgggaggctgaggcaggagaatggcgtgaacccggaaggcggagcttgcagtgagcggagatcgcgccacagcactccagcctgggcgacagagcgagactccgtctcaaaaaaaaaaaaaaaaaaaaaaaagagttggtttttgttggaggtaacaaatatctattagtagataagaggaggcagaaaaagatgaggaggtaaaaaaatatctattagtactgggaatttttacagttgaatatactcaatgataattataaaataaaaaatatttatgtggatcagtatattaaatattataggagagtcttctccaagcttggcgtttgatttttcaggagtgatctgcttgggagtagaaggtgttttctttgttttcaacatttttataagtgaccattctcagccttaccaagatgtaaactatctttttctcttttaataaaaataaaagtttacaaaaaatcatcctttcacggagcgctttcaggcagcatgctttacgaaggtagagggtccaggctaatttccaaaggtattgtgaatgacatcagtttccactagttctctttgtaactgcaggctttggctctgattttgagctaacttagagggcagyagggagtcatatttttcttcattttaaggaattttaaaagaaactggacttgttttatatcggccacaagtctgtactcttacccttagccccttgggtgctgcccagttctggggagccccacttgagagacaaggggagcaccaggcagacggcacgtgtgcctgaagtcccgagccggcagcggggctggacgggtggcccctgggttcccgcgccctccagagtgaggccgctcgtgcatgggccattaaaggagtcttcagccggagaaagggctgggcggcgtctcctgcccgcctggtctgtctttgtaatttgatgatggttccatccttgctcaaatactgcagtctcccgtggcctcctccccgtctcgctttacatgaagatgttgggatgtgaatacacgtttcttcttcaggaaatatcaggggatatttaccagcctatcttaccggctcagaggaagttgctattaatataatcagatgcgagcaggcagtgccttttcactcaatctgagatgcctttttttgtgactgttaactgaacctttcttcagatctaagggccttaaaatgtgtggcattcaggcacctgtgttccaagcagaccagcctttaacaatgaaatggtgggattttcacttttgtggcgtagacaccagggctgatattgatccgtgtttttccggtggtccggcgttgcagaagtggaaactgcagcgggctggtaagccctccgagccttctgtctaatttggcagaaaaacacagaatgtaggacaacaaaagaagcctcctttttccataaaaattcttcctcccacccacccttcttccccaaaaaggggacttaatttttcagctgcacgcagtgatttggtgctcactcttgcatcgaaacagttgcggtctgaacaggcaggaaacagttttcttttaattgccgaaatcattcggaagtgcttcatgccctgcttctgtacagcagatgctgtgcattaattggcctgcgtagaagtgacccagggttccttgcagcgggcccaattttaggcagagggtttaaatagcttatttattattttgtataatctggcgtacattgtgtgctcctgcacgtgtcgtatttcatggtctgcagtttctaatgtcatgtgggtttcaaaacctgtgtttctctggtaatgtactagcagcaggtaagctcaaaataccatccatcaggagctaattttttatccagatactccaatgactgatgaacctgtcttttgtatgaatgtttagcacagtggaaagccatatgccactggcaccgtttcctctgcattccttacagttgctagagagtgggcttcctggggggcggggcggctcgatgctgtgaacgtcccctggcctctatttcaacgataacacctttaaaacagccctgggtttgggcaacaaaaagaggatgggctgtcttaaaggagacctgactccctcgtcattttctttatcagaaatacgactgcacactcttaatagggaaccttgttttgttactccccgtctgttccaaacagacctcagcccattagaagggcctcccttgtgtgggagaccacagctgttactgtaaatctcatccactcactgtatcacccccattttgtggctctgaaggatgaaattgagaaatggaatactgtgcagtcatcctttacatctccaattttaggcctttgccatcattttcatgcttttattccaaatcaaataacattagtgagctacaccaccttctgatgaatatctggtcttgagcaccgctttcaagcctgtgcttgtgggggcttccttttatgtttggtggtcttttttcccccgttctcttctttttcttcctgcactttctttgagcgttcttcgtggtcatggcagtctgcagtttgaatgatcggcattgccaaatgtgtccctgtcttagcatgttttctgagagggggcatgtgcgggagaaggttctctgtcttttaatctttgtggaaggagtgaagagaacttggtagaaggatattgggggctttaatcagaaataagaagtggtttaaatcattagcacaacaaagcatactataagcttgaagataaaagtctctggggaaagagtcctctgaaaataaatggaacttgatagatttccatatcatttataacttcccttaattacacttggaagacttgccagtaaaactggaaaattggcagcytatatccattagagtcattttgccgaccatggcaagcagctggctttacgggatttgattcccatcactcacaattcatcatcagctggaggtgtctgcagctcttcagcacagagcaatgctgggtgacactcgggcccccacgacatgcgaamatctgctgagtaaatgggccgaggtttctctcaagccttgtttggggcaaggccgactcytgcttaatgagtgccgctctgataatcggatgcgaacgtgaaccttgacctcgtgtcaaaggagaggacgcaataagctggatgaaagatacaggattcaggccttcaaactttacaccaattagacagggagcggggagatacatcaggcccactaggttcatcaaaaagacttgtgaggcttgtgaccattttgtaagcccaacattggagacatcctgtcacaatcattaagtctttatcagatgattcacaaaagtgttggagaaacgtgcgcacacatcctgcaggaacgggccccgcacatgggggcgtctgatggagacggaatggtggagggccctctctgygcacccaattaatgcttggcytcccagccaccctgggcaatccggaaggtgttgcttccattgggcccactgcccagctccctggtgtaccctacatgtactctayggtgtgcgacacattctgcaggagtcagcgctgctgggagyaaggctccaaagtcctaaggtgagagcccctgctcccragggccgagtgctggcattttgctgttgttggaaggagcccagctcaatgcccagccatccctggagcacgccctcgagtgtcagcctcttcccacagactggggcaggtgtagtttgtgtttccattgcattctttgacatttggtttgtacatttggttctccagctcaattttttccaaaggatgaaacatgttgaaattcaattaagctcktgtgtgtgtgtgtgtgtgtgtgtgtgtgtgtgtgtgtgtgtgtgtgtgtggtagaacatgtttctgttgagcaagatgtatctcactattttgtaaggcatgaaggaagtttttaaacaccatctcttagggatgaattagggaaaayggtctacaaaacagatggtgcaaaattaatagagaagtgtgctacttagtttttcatttacagctaaataatctaggctgggcacagtggcacacatctgtaaccccagcactttgggaggccaaggtgggcggatcacttgaggtcaggagtttgagaccagcctggccaatgtggtrataccctatctgtactaaaaatacaaaaattagctgggcgtggtggtgcacacctgtattcccagctactcaggaggctgaggcagaagaatcgcttgaacttgggaggtagaggttgcagtgagctgagattgtgccgctgcactccagcctgggcaacagaccgagattctgtctctaagatagatagatagattagatagattagattagattacataagatagatagatagataaaatagattagataggatagataggatagaccgagattctgtctctaaggatggatgatagatagatagatagatagatagatagatagatagatagatagacagacagacaggcagataagatagataggatagagctaaataagtagactagtagacaccacgagaggaactagggaggggaaacaggaatgaaaggcggatggagcagggaggatctaattctatgattcagtgctgtgcttggatggggcagaagatgggatcgcttcagtggggacacgccttctttaaagtcctttgaattgaattgccggactctcacaatcagacagaaggactatttgaatttcaggcctccccacttttcctgattgtctcgggctaaatccgaggtttttttctgatgaacaactggggacccagcacttgcagttacctgtgcgttacctctttgcaaatcacccacattagaagcacagagccagccagaaagatggtcagtggcagccacagcagagccccttaagctcctgtccaccacccacttgctcccaggccctggcggggcccagagtagagctgtagccaggtcaggctggcctttgcccctagcgtgaccttgggaaatccccaggccgcatttcttcatatttgcagttgagttgctaacgcactcacttgaagatcctgtaaaacagaagcaggagctgcctgcctgtctggcccgcagattctgagcaaggggatgggaggggaygtgtggtggaagggcacacctactggcagagagggtaggggctgtgccacccatgtgaagccaatgtacttggcggggggacggggctctggccagtcctgggccctcagatgcctgcagaggaagggctgggtgggtgtttgggaggccggcatgcagtccccaggaagctcctccacctggagagagaacagtgcccagagcgggagagtggattcctcatttttggatggcatttctactatgttctgttgagtctcagatccacttcccagagagtccccggtcctgttgcctgagtgctcagtcctaggtcagagtcagtcgcagtgagtccagcttctaagaggacacggccaggcttccagggtcccctgtgtggagctggctggcaggtgtgctgcagtgaactggacctgctcctggattccctggtctttgcctgcctttgaagagagaaaaaaggctgtaaaatgccaactggagggagtgactgttctgacacccctgatgggggcctctgcrttgtctctgcgctgcccctcccatccccctgcaaacagccctsgaggctgattcttcgctctccctggaatgcagatgccacgtgaaaatgaatcaaaaagggcagcgcgggcagcgcttccaggcccagctcctcagcgcggtgtctctcctccgtgccagcgccaaagccttggcatcgtctctcttcctatatttctatgccaggaagaagcagcccaccacctgaacagcagaggaaaagagtacatcggctcaggcgctccagagtgccagcaagacagcttgcgccacacgggggggccagagggggacttggagatcatctggggatttcaggaaagaacattctctaggcgcttctgaggcattggaygaatatggccacagtggtgtgaggggccaggagccccatgccaggacacccacccacaccacatagccattgccctaggaacctggacttgcccgtttcaaagactgggaggccaaagaaaaacctggcckgctcaggacgctgacccatcggggcagagcgaagtgagygcgcagcatggttttcagctgcagctcactcctgcagggaagcctcrcgcttaacgccagtgggcttaacccagctcagcctggctgcccctcaggatgaaaggcaagttctgaacgcagtctgagcaaaggcccgtgggcgctcccagtctcctagcatggaatgcatgtagctctggaagtcattcctgtgtctggagggttttccggaagctgccttgtgccttgttgtgggtactcgctgtgtcttgcagaggatgggacagtggtcctcgtggcrccagggccgagctgttcccagttccccgggactatagacagaaatatgtatatttggtggtggttttttttttttggtaacagctatactgagatgtaattcacatacaatttagccctttaacgtgtacgattcggtggtttcagtcaattcagagttgtgtagttgtcaccacaatcaattttggaacatttttatcactctcaaaagaaaccctgtacccttcagcagtgactccccttccctcttcaaccccaggcaacctcgagtctgtctgtagagatctgcctattctggacatttcaggtaagtggaaaacattccaatttccgaacacctctgttagtggcagagccagactcagagatccccagggtaggccccgccgccagggtccccacttctccagggtcagggattttttttttttccaacgaggactttatgagagagagaatggcttttctctactgttcctaaagatgagcttggaataggaaacattagagattgttkctgctgttcatagacacatattttggggcatttgacaaagaatttcttaatggcttcattcctaagtgttaatgcaaaattagaatgcttttaaaacttctgcccatttttgttttccaggtagcagaaggtcaagaaatttgtgtgattgaagccatgaaaatgcagaatagtatgacagctgggaaaactggcacggtgagtccctaagtccccatcagcccaggccggccctgtgatggaggaaygcccacctttgaatmgtgggtggtttggctggaaagggccacagaggcgccctctccccctcgcttctacagaggaggacgttaggattgggagcttttgccattctgccctgatgcatccctgcctcgtagagagcgtgscttccaaaaagtctgtgctttatgttcaggtagtcaaagaacaattgttcttcaccttaatgtctttctttcaaattaaggggtctttaatttttaatgtttacatctgtcttgaaggcagttagttatctgagacttaggtgacacagcagcaaatggttttacaaattgcaaaaattaatgtaactcttcaagacaatttctctacaaagggaacaattcagttgcagatcaagagaagccaaaaccccatgtacatgtgggacttaattatttagggagaaaaaaatattagtactgaaattcattcatagtgaaacttaagtgtatttttttcttgaagatagaaaagtccttttaagcagtaacttcattattcttcctgtgactaaaaagactgaaaagatgccgttagtaggtaaatgatccttttgtgagggccgttgtggtttggaagtgtctgcatgggagagcatgatgggaagcgcaaggctggccgtgttctgcatgtggccatgccttggggacatcaggtgcaaagagagatccatcagttcataaccaggtttgcatcagagagacacacaacctctgtctcatgctctgtcactgcagaaggcaatgaaatggattctcagagaaggggcagcggggatgtcatgcctggtcccggctgggagaacagaggcccaggtgtatgccaggggctcctgagcccagcccgccggtctggaggggtgtggacagttgcactgtgctggtatggtgtgaagagtagaatgacatgatttgtggcgtttttaaggaattctttctaaattacttctttaaaaagtgaacaagaaaatgttggtttctgttcatgtaaaaattttatctgttctttgggatttaacatttgtgctgccctagtatcacgacatccatccatgatgagaacttggcctaggtgtgggggaccgagaacgtgtgtccgccgcatgccaagggccctgtgcagcaggtctgaggtgctaatgcagaaatgaccttggcctcatcagttccctgaaggggcatggtgccatgtggtagtaggtttcctgtcctcgtggcctgggtctccctcggccctcctagttggagtcttcctgtgcattctgttcacctcaccccatccccaggcctctcagttccaacccagccaagaagagcagaagtggcccgaagcccccgtgcaaagtagcaggccctggttcctacctgcgaggccacttttcctcccagagaaaaaaagttcacaaaggaaacagatcctctactctggtcatcgctgcatcactaacactgcgtcctctagtagggctgctaaatggaggcaggagcattgtggaaagcagccttttcagtccaagcagcatctgcagtggccgatgagttctaatccatttttcattttcaggcccaagcaagagcctccaagaagtcaaatgactgtctcttccccacctcaagcccctccttgctaattttaagtcagaacacaaatttcggaaagcaaaacttgataaagattgactgaaaccggtaggacaaaaaggcacagttccacccacccatggtgctggaaagggcgaccrcacagccccacctgccaaggactccatttcccttcagaaaatggaggtcaggccagggaggtcctcctcttactcagcagctgatctgactgtcgtgtgttttgttcctttttttcttttacactaagtattccattaattctcagagaacatttccacaacctcaaaaccacagagagggaggctaggggttagaactcacctggcagtgaagagcctgcctagacctgagggtgccagagcgcaggccacagcgcaaatgctccggagagtagccctcaggccagccactgtgagggtgccgaggacagaggagacgggaaaggggaggrgtgagccacggccacggccaccatggcgcctccctgttcaccagggtcccttcgatgggctccggtggggtggcttgtccctgtgctgctgagcttgcaggactgtgcatttttagaaatggattaggagcctgccgcctcttggttctggttacyaattcttactctcccctccccctgcatttttcaaaattcaaggtgaaatctgtgcactgtcaagctggagacacagttggagaaggggatctgctcgtggagctggaatgaaggatttataacctttcagtcatcacccaatttaattagccatttgcatgatgctttcacacacaattgattcaagcattatacaggaacacccctgtgcagctacgtttacgtygtcatttattccacagagtcaagaccaatattctgccaaaaaatcaccaatggaaattttcattratataaatacttgtacatatgatttgtacttctgctgtgagattccctagtgtcaaaattaaatcaataaaactgagcatttgtctaaatattagtttgccctttctttgaatgaagacaatgtacacataggcgacaggctctgccagtagactaccagcatttctttgtgatccttttaagagattgatataaatgtcagtcagttctctgccttgctttattaaattagcacttgccattttttcatctgattgccttactacttctagaagtgaggccctcactcctggtgctgattttcaaaacttcctaaggaccagagactgcaaatgcagattttggcaatccctttcctgctgtgtctctatgtgggtgtactgttggtggctgactcccctggaggtcaccctgaagcttcctggttggccgggggtgctgtctccactgtttttgtttgttttgaggatgagcgcgctgcctggtcccttccccattgcacaagccagggcagtcacaaggagcttgggctgcctcaccgccctcatcaagcacagggccgccacgagctcatcagctgagacccagcgtagcctttttgtgttttttgtgaagcaagtttccaattaagcaaaagaagctaaaaataatgatcatgtttttgtgccagatgcagttagcgatcacagtctgccattaagttgaagagtaagtgagctctcccaacagagaatgaggttactaaagatcacagcagctgcattttcatttggttctgaaatccttggaatacatttcagactttgctgggaagcagaagcaagagccgtgcaccgagttgaatcgatgctgacaattatcagatggaggtgggtagtaattggtacttcgtgccttgctaaaattattttaagtgctgtttgtatttggaagctaagcttctgtcaggcctgaagaacaaattactaatgcattggctcttctttgaaaggactcacccccaaatgctctcccttcagggggcagggacggggtctggctactgagatctgggctcagataaacttccacttgaagtccgggcgctcagctgtgtctaccagcaagtgggtgttcattattttgctagatcagaatgtaaagaaccttctaccaaataagtataccaaaaaacgtgggggtcaaacacagtaccaacacttttatatctgatttcccaaaacatcgacttcaaatttaaataatctttaatatttgctgtgaagcttgatctgaaaattaggaagaatggtgctatacgcactctgatatacagcatgcttgccctgtggatcttttctacaaattctacccagccgtgtaaaatcggctttctcaggggttacaggccagaatcagtatagtagggctgctaaaatctagcggcaacaccaagtctttacactgatcctaaatatttatcttgagctcaaagcagagccaacagcagaaacaacacgaggaggaagaagaattaggcataacacgagttctctaaatgtcatttaggggagttaaaatcctaaatttttcttaccaggtagaaagatgggagggaagcaccttgctattcgtatctcaacattatttgtaaaatcagctgccactgaaagattggttcctttccggcagattcattggaaagggccctgttcggcttccgccttcacccagcatgggctgggcgcatcttggagccccagggctctcaaacctaggcccaccctgcccgtcccccttatctgttctcccgggggttgtagcgcagcccgtgcggcccctcggagtcgtagctgtcatggtgcgggagctgggcccactccggcgggaaggtggccctgctgtacacgaagcactgcaccgcggtgggcgctggcggctcctctgcgcccggggcccggtcctccagcagctgtacccgcagcaccgtgcgctggtacagggccgggcaactctcgaagtcatccagaaagcgcagcatccgctcgtctaccgcgtagacctcgccctccacgaggcgccccgagccgggcaggtgcagcagccacgggatgttgtgctcccccgcgatcaccaacgggtagggctccagcgtgcggccgcgcgcccgaaaggctgcggagccgtgggcgccgtcccgcaggaccctgtggttgggctgaccccgcttcagggtgccgtacacgaagactagggccatccgggcagagctgcagggagaggggaagtcacaggtcagcccgcagtgggagctctgtgtctgcacctgggacgtggctcccggcccacagagcctccactggggccgcaccacctgaatgcgcctggctgtgctcagataaggcgttacttaccgacgcagatgagaatgacctacagttttcacacatcatgagatattttgactttcggccatttaaacatgtgaaagccattcctagcttgtgggctgttcacaaacgggcaccaggtcggctctaacctgtgggcatggtgtttttgggtttgccagtccctaggctagagaaaggggcacacattggtgacttccttgatgtgtctgtagcagacaggacacctgcgttctgggcaggaggaccgtgccctcagcctccccacaccacctggatggactaatgttcctcagccctgcaggggcagccctgcctcgcctgcacaggccacccttctctgaggaacacagtcctgacctgctgactgcgcagcctccccgactccctgagggcaccagccttccacccttcccaactcctacccccatcgtagcagctcaaggccagaagacgccctgtccaggccctagtatggccctcccagacacaccctgtccaggtgagcaactacccctgctcctgagcccagcacagcccataccttactgttctcagcccttgtgtggtgggcgcggaggttgcggaggttccaggcaaggccgccaccctctagagctgctgatctgggaaaaggcgctccttgtattaggacagtctgtcaaacctgtcccaacagcctgccctgctacctgagccctgcagaactgccattttcttgagcagttttcagtgtttcttaaaggactttgaaaattgccaataactattagagaaaaattagaaataaccctaaaaatacatataattttgtaaccacctgctatccagctgcagtgagaacccaggtttcagcactgagttccactcaggtcctggcagtctgacgcagcggagctcagcacccacaccttctggtgtttccccttccaaggtcttagagggcagtggtgcttcacgggactccccgcagcgatcttggctccagcgtgaaggtaaatatttaccacttgcctgggtctgggccacagactgttacataaagacagaagtgatttgcgtgaaagtgactcaaacaaaaatggaaatgaacattaaaggggtgggggccgctctccccggcccctcgctccgctgccctgtgtgcccccgccatgaggtgacagcctgtggggcgactcgttgagatgggctttgcagacgggactgcaggtgcaggaaaacaaatgcggctatccaggaaacagcagcggctcgtgacccgccagaaatggccccggacaccacacttgccaccaatcatgtggacaagtggaccctgaagaaactgaagaagtcacactgaactcatgggacttctgttttcttctcagcaaacaagagctgctctggggggttctaggcctcattttgctcaagaggcacgtctgctgcctcttggttctatcaccagcctgtgcaacaacagtattccccagatttcaggcacattgcactaggaaaggtgtggccgtgggaaaaacacaaggctagccagatacgtgcgccctgtgggcctggccatgtgatagccctgggacacccttcccagtgtggggacacagattagacctggggggcatgctgggataggaaagttgagatgtgaattaaggagaacctggggtaggacggtactgaggaagagaagaggcaagtgctcaggcctaaaattgccaggactcggctgctggggtgtacgtgaaaatgacaaaaggcaccagctgagagcagcgctggtgtctggagagggcactggatggaagcagctgtctacaacagcgggcaaggagctatcccaaaagacgagcacctggggggcgatgatggtttggatcctgctgtgcagctgccttggggactcagcatttggaaggattcatgtccctccccacacctgcatcccagcccccagcgagacccatcagcacttcccctgccacgtctcccaacctgctctcctcctccaatgcctgcctgcatccctgttgtctttgttcccctggatcctgcccccagtgcaccacccagagggtccttgtcaatctcctgctgcagacttaactctcccacctcatctcctgcaccctctctcccctcatccaggtggctcctgccccgaccagcgcctgacctggagggtgcaggagtagtaggcagggcctactcagtctgtcacatcactctgtctggttgtcgttatagcacacgtgctctctaaatcactggtcttgtttgttgctggaacatgaagggccagaagagaacttggaaactgtttggtccagcacctgcaggtgaggaagccgagtcccaggctggtggcgatctaggaccagccagccgggcagggccgtagtcacactgcagaccagctctccactgccaggtgcctgcctggctttccctgatgcagttttttaaaatggcatgtgtccaaaatgtcaatagattgctttgtaagaaaaatgaagtttcctacccctttccactccctggaggcaacacttttaaggcttttaactgttgtgttcagcatttatctccatattgttacttacgctgctacttcttgatgtcttaaatcatatcttgcccttctactcaaaaagtgggtgagcatagtggttctaaagcacagactttaactgtgtgactttaggcagatcatataacctctctgtgcctcagcttcctcaactgtaaactgaagtcacagtagcagcctgcctcagagaccgcggtgggtaccaacacacgtggtcctgtgtgatctgctgacatgtagcgtgtgccgctgctgtcatcactgtagaagcctgacccttggctctcctaccacatcccgccatcctcccaacagactcatcatagttttgggtcagacccagatctatttcggcattagaaccatgcaaacacggctcttggctaagacacagagcatactatgattacatttcctttcttggacaactttatgttttccttgaaattaaaaattgcttcaagtttgttttttttgtttgttttgcatttcgcttagtttctaggattgtaattcagcctcgcagtttctgagagcatggccagaacccgggtcctgaccatccgctggaaggtcctccctgccagctctagtctgggctctctgtgtcgctgccatccaggccaccctcattcctgtcccgtcctctggctgggatgttggccacattttgctgaagtgtattctctcccacttttggttaataacatggctgcgtagaggattctagaaatcatttccctcagaactttaaagacatttcttcattgtcttctaactttccgagttcttgcagagaagtcagtgtgctgtgatccaggtcccctgtgtgtgtgactcgagctcttccctggaggctcttaagggcttccttttatccctcagattctagaattttctgatgatgtagactctgttttcattgattgtgctggaattttgatctgaatgctccttatcctggatcacgggggcattttcttacccctccttcctctctgttctctttctggctctcccaatattccggcagtggaggtcctgacttcagcctccaatgtttttatattttctcctttcctccaggtctatattatattctgctttatcttgcatttcttctattaaaaatttttttgccatgatatttatttccaatatatttttcttgttgtgtgttttttttttcaacttcttgttcattcacaggctcaatatatatatattttttaagttttcttcattcccttcattgcctccatttctcctaactccctcttttctctctgttttggtatctgtgtttcaagagattttcttcacatgtgatcttggctgggaaagctgagccactctttggaagtgaggctgagctgtcaggtggcaggcctcacacgggactctggggagcggcgctgggagctctgcactttcccccaatgcttgttttcaggg

SEQ ID NO: 94084 - DNA, 854989 bp, Homo sapiens
  misc_feature (1)...(854989): n = A,T,C or G
tccccttaggctttctatactctctgctatgtggaaaaagagtaatgctaaataatgatctgcaatgaagttttaagataaaaatatgatagttattcataatatttatttacctgctatgtactaggtactatgttaggcatggaggataaaaagataagacccattaaaaattatcaaggatcttacagtgtaggggtagtgtaggggtaggggtagtggaaatcatgaaaacaaactgcagaacaagaacagcacatcgttcattattcagatgattaaaaattgatgattataattttatgtaggaaaacagaatgagagccagtgactgagagagggaaatccttctggagtgtaggtttttctttctggcctctgattaaaaacagagatctgccttttaagtgccacaacatgctaaattgcaacggtgttaatatatggtagaaatgtactattttggtttctaatggcacttatgattaccacccaggctagcatgcacaggaaatgactgagcccatctccagaaatcacttgccttggttgattttcacacattcaaccaagtgagtatatgaatatgcaattacacatacattgcaatcagagtaatacttcaaaatacacacttgatcataccattcttctactttaaaaaactttcatggcttcccatttcttatagaataaagttcaaaaccctaaacaaagactaaataaaacatggcattcttatcttgcagcttcaccctgggtcactctcccactagttgcttaaactccagccatcagggccttctttccctgttggatatctctgaccctggagcttttacactttgctctcctttcccggaagtcttttaataacctccttttgcctttttaactcttacgttgtcctttaggtctcagcagtaaggccattacctcaaggactccattgatttctcagggccctctactataacagccttttgtttttcattgatgttgccatttgcagtaaatatatttttgtgtgattattttgcaaatgtccatctccctaactaatctgcaaagcgcaggagaataagagttcacttttattttgctcatcacggtacctctagtgttttccactgaacctagcatgtgttcggcacataattatcagtgataagaatgaatgaacaaatacagaaacatctcagaacaatgaaataaatgatgagatttaaaaatatgggttaatttttatgtccaggcatgatgataattaagcatgtacattttacatgcagtatagaccatttgttaattaatatacagaggtaacaatgcagcttaggttcactaggaagcagactttgcaatagaaatgtgtgtgcaggaagtatattcattattcagtgctgtctgtatgaggcccagtgagagcaaggaaatgaagcaggatgggcaaagggagaagctgaactctacagacgtcccaacttatgtcccagctaatcccttgagggacctctgaaggtgggatggcccctaaaaggtgtcttgaattgaggcaagggcccagcctttaaattcccacatcaactgtcattggatatctgctaccccaggaaagggcttgaacttccagtgagatgtctctcttagccaggggcaatttccagagagggactcagcagacagctgtcaaccactaacattcccaggagctgagagaatgagtgcctcagttttgaatgggttgggggatgggtggtgatctgtgaagcacatcataacatctgctacagataaccaaaagggaaaatacatactttaaggcaaggatatgaagaacttgctcaaatgtaaatgaactagaaattataaaacaataaaattccagcaataaaacaagaaaccactttaaatgccagttcttggaattgtgacaatattagatggtgagaggaaaccaacaaggccaaggaaaagacccctaagtagtaaggcaaattatttcaggggacattcattctaaaggatgttttcccccactttaagttagataagtctataaactttccccttacactgcattttacccaaaatctttcataggcaatcatgcattaatgacatttttctagaacgtgggaacgtgggcattgaaagattatatctttaaatttgtaatatttaatttatatgacactgttcaatttacaaaatactattgcatatattttgacatctgactctcatagtaatccattcagttaaaccactcatttaaaatcactaagcggcaatttttgtttttcatttagtggctaaaggtttgtggtaacagagacaatgtctctattgtccactgagatgtcactaatgcttatgacagtgtctgaaacaattgtactcaataaataattgctaaataaatttatgggagaggtttgtagtttctctgtgttatctgtgctttttatggcatttacataatacatgctgatatactgcatatctatatatgcaatatgatagacttgtagttgagcacattatactgtttgttccatgaaatatgaaccaacgtattccttttggtctttttaacaggaatgctggaaatatttgggcctaactgatctttagtcattatcctactggtcaatatgggtaggaattaatttggcccttgaaaatcagacagcggaaaaaatgcacctcatgatcattcagcctctgactttttgggaggaaatcattttcaaagaaatgtcccccaccaaaaaaaatctcttaatgctacactgcaaagggaaaataaaggcatatggaaatctgaatttttgttgtgtttctaaatttgtaatattgaataactttttagatgtgaaattaaagatgactcataagtcctacttctgactttggtagtaataatattcatttatgtactgtaaactattaggttcaaacataagctgtttctccaaagcctacaaaaaattaatgtggaacacctgatatttcactgtgcttccagatggagggacagcttgacaaacgccatcataatttacaacttttaaaaagtgtggtgcaaatgcatttgcagtaaaagctttaaacagcttgcattatttacaggtacaactgtgcttaatgtgcaatttcaatgaatttaaaatattattagattaaatcactgatcacagagcataggtgtggcacgtgagcaatgtgattagatgccttaattaatatgtcagaacaggatacatctgtttgatgamgttgggggggatggtaaatagcatttaaattttatatttgattattgactatcaccgatgaaactcttatctttggaaaaccaccgtatattggacttatcctctatagttgtttaggagaattataacagaaaacgaatatgaaaatacactgtataactcttaaagataacttggattcttgtacacataaattaactatcaattgctaactgataagatgtatgttaaagtgtaacctgaaagagcaataagcctgtatccctgtaagttaggaaattgaacattgaacctgactgattaaattggggaagaaatcatatgtattataattatatatattatatttgtaaatttatatatgtttatatgtgtatatcttttctcaatatatacatatgtgtgtatatgtatgtatgtatttgggtgtttatatgtgtatttatatatatagactgatagaaaaatagatatagatagatttatctatctctctatatctccaagaggatctagagtaagtgggtaaggtgtggttgtagggagatgcaggaacatctgactttggaacattactccatgaaaagataagtagttattttgacccattttaactacaaattcattgatagatattgtgacctatttctcagcagtaagtaggacaatgagaatatgtgatgcagagaaactaaagtttctaaaatgaactgcccagtgtataaacgaatgtactctgttcattcaatcaccaagtgttcttggtctcttatgcttcagtcctgagctaggaactgagtatccagtaaacaataaaagtacacatgggccccctcttcctggagcttcctctctaaatagaagacatatattaaatgaatcacattcaaataaatatttaaacaacatttgaaaagtctatgaagacgaaatataatgaaaaagacagagtgggtgtaattttgttggtgatggggttagatcataaaggcttcagtgagacctaaatgatgagtagaaggggaagaagagctccaagtggagggcaatgtgcaaaggtagagaagtggatggaggatgagaagattaccttgtggttggaacataatgagtcagggcaagagtggcggagaagcggagtagagcaggttattcagcggttactagggagtttgtattatattctgactgcaatggaccattgaaggatttataccatgggtacctgggtgtgtggatgtatcgttgtatggcatgagccagttaatactttctaaagctcaatctggtatggatatgaggtaagaatagaagctagaataccagtagcttggaccatggtggatgcagcaaaatggagaaatgaatgattcaaaatctatttaggaggttgacttctgagagtttgggcatagattaaatgaggcaataaggataaaggagtcaaagatgattctaaggtttccatttaactttctagtgtctgttaatatttgattcaagaaaaatgtatctgtcttttagtaatttccaggttctggaaggtaatctgatggtttgttcagagaagccttctcaaccacgcaaggtacccataccctagttattctgtcctatttttcttttatcttacaagcaggcatcacattttcttacttgcttattttgagtataatctccatgacagtgatgtgtattcttgaagactatatccggagaacctagcacagtgtctgtgtctggcatattgaaaatgctcaataaacatattcgttgaataaaacgatgaatggactaatgaaaaaataataagggagaaatacttgactccaaggtgtcactacctagccaagtgcatgaaggagtgccgcaaatgtcctaacggaagtagaaagtgttatggtagaagagaggtgggatgcatctaacaggggtggggggggggcggggagaaaaggagagaggtctggagtacacatatcctcaaaaaacgaggtgaatgttttctggattgggaccaactctacaggaaatctctcccttctcctcagcaagctctagagcaaaaacgaagagcaacttttcaaaagagtttcacgttttagaataaaaaatatttaaaaaaataaccattaaaatgagactttcctgcaaaaagacaaccttgattatgtaccacctgcagcacttcctgtatgctgctgcgggctgtggatgtttttgctcgcctccctcccctccccgctggggctgtgaactctcagaagaccggtgctttggtatcctccactgcagctcaaaccccgcccacctacttggtggatggatggaggaacatctactatttcatccttgaggagttcctgaaaatgcagttgcccctcaaacaatgtatctacatctcgcggggtttctgtggaagaaaagaaaaagtgcaagttgttgcttggagcgcggactgcttttacctttgcctggggatccctcctatctggccccgcctgcctagctctgtttttagcagtttagagattaaaggccagtccccagagcgggtgctctactccctccctcccttctgcttgcaggctggggcgcggagcgggctgaactgggaaggccgggctgcggctgccgtgcctggcgcgggagccgcaggaccgagagcgcagcccgccccggggggcgttgccgccccgcgcccgctccgcccccgcgccgccggccctagtctgcctgttttcgactcgcgctccggctgctgtcacttggctctctggctggagcttgaggacgcaaggagggtttgtcactggcagactcgagactgtaggcactgccatggcccctgtgctcagtaaggactcggcggacatcgaggtacggacttcgcgccggctcgtcggtggtggcggggtggtggggagtgctctgcgggtaggtgccggggaggcccccgcggcccccgcaccccggagagtgagagacgcgggaaagtttcccccgtgggagctctgcgggggagcggaggagcgcggagccacaggcccgcgtgggcaggcggggagctcaggggaggactttccgctactggaggggttgccctttgcgtcgggacctgtttacttcggaagagatttcaggaagcctgtcttgtcctcctctgaatgtcagtgactgaagaagcactggagttccagagaggtggactctagggggtaggagtgcccatttcccacacgttctaccccttcacctcctgtatgtcgtttctggacacctccactgcccccatttccaatagctgaatcctgctatttgcaaaggtgaagcatagaaataaaacatctgtgtgtcagctgtagcagtcgcctctagtcatagtattgtttatgaaataatttaacatggagagaatggaacgaagtattcagaacatgaaaaatgcagtgccctcagaaaaactaactgtatttttctctcctctcaacggtttttgattccctcttgcactccgtttctgttaaaaaaaatctttttttatgtaaataaggtcctacctgaaacgacatggcatttcctttctctctagtatcttaatatatgcgatgaaaaggatttaattatcaacagtgattttacacatactaaacctaggtcagcacttttgagctaagacaaactgatttttagttttctgttttgtttggggcttttctttatttgagtcttctactctggtagaaaattatgtgtgtgtgtgttttctttagaaataacaaaattttcctttcgtcagtccttttggcggcttaagtaaaagttttgcaaaccacctgtttgcaaaatagctgcttttgccacattttgcctccgtaattgaagaaactttatattctgggaggaagtagtcctgttttctccaggctccataacttggtttgaaaaatcattttagtaacaagagccaaagtgtattatgtggacatctctggttagtttacttttggtttctgttttggagagttgactttttgatattgagcaatatgatatatttaacaaatakttgttcatctgtgtgcaggataatagatacttgtctttttctatatttcatttagggtagtctattcctttttggtccttgtgactttgacttaactttttaaaaaattttatttactaagtcgaaaaacaagcttctgacagtattaaggcagtattgatttaagatatcggagttgacttaggatgggtggcttttggctctttaatttcagaatggtgtgttatctgcttaactgatttctttctctgcagttgtcttcgaaatcagttcttacattctactgaggagaaagatgccagtgaaacattgaatgccaagcttgatttcatatattgtttcaactaagaacatttaagaagcccatccttcccactccctccactcaattcaaccttagtctatatggccagtttgcctaatattacttttaatctagattgctggtgttcaaacaccttcagctcttatgtagttcatatgtgcaacactttaatcagtaacatctttcatcactcacagcaccttacttttccctcaaagtaatacccgtgattcatgagctagaataccatgaaagagcatgaaattaatcattaaaatataatgcagtgaggaaaaatacattaagcttaggggagcacattcaagcataaatgcctcagttgatcctattgatttaccaaagttcatttttgtgttgaagaattagaatgaattataaaggctcagttttccatcaaatttgaatgcttttcttgaacaaattcattacaaccattgtctagagatctgattgtgatcattgttttagcttcaaatacatggataagcaagtaatattttaaaaatattggtatgaagcagttaatgaatgtgataagaacacattgataaatgtgaaaagtacttgacaattgttaaaagaacagaaggtgatgataacaacctactctaatagtgactgacttttccctatgagctaactacagaacctcaggtttcagtgaaacagccaagaaatatctttgtttctgggggaaaagttattgaggtatatataaaggtgctttgtgtgcctgcttcataatttctagtctgaatccaatatcacatcaggatttgacggttaggaacatggaaaacaatcagatcaccaaactccatagctggaatatccctgggctgggagataggcaaggaaaggatgtgttacttggtaataggacctagctcattactcagaattgttgttgttgttgttgtaatcatagaagttgcatgagaaatcatgttttttttcagatatattaatgtggttcagagcctggcttctgaaaccaactgcctctgattgaggtctaactttaagctgtgtgtttgggcaagttagcctctctgaattgcacatggaaaatctgctaaggataataaacaaatgtcacaagttgacagcatcttgttgggaaaaaggacaaaaatgttaaaaaataaagataacagaaaaatatatcttattctcaggaaaatcacttccaatgaaatgattagcattttaaagtccgttaatagtagttatatgcttttagaagttattttgctttgtgagtgtactgtttggatacagtctgaattttgtcaacgatgactttaatacaaactctcctgggatggtttcaaagaaggttagtattggacattggtcactttcccaggcctcagcagtaacttaacagcacttcttcatttagattgaatttacagccagtatattgtgaatatctgcacacttgaaaggaaatgagaattattttgaaacagtactcttttgttcaagaccttgttcccctccaccggcaaggataatgagaatagactttgaaagtatatatatctaaacgaaatgtatgcagctgcagcaagcttttaactatttgaatactagtacttttgatatatatttgtagccaaaccaagttgctatctgttactgtactgctaccacagtcacaatcacaaggcccattccttgaatgatcagttagtgaatgttaaagggttataaacttaattcacatttaccctraatgaaaaagggattttagtccattgtccacaaaatcaaatgcattttaagtcaaacagaaatggtttcggaattactgatactgtgacttctattcatttgaaaaggtaattgggaattttctgtatgattaactaggaaaatgagattaaaaatagcgaatttggaaaatagaagcataatgggaaagacttggagaaagtggactttacaaattttgaaacaaggaaagtcatgggttataaattggcagagatggcaaaaaaattttcagaacatcttttatcataattgcctttgctgctggggaggaaggagaatcatggatccaaaaaagataataaagattccactttatacaaagccatgagttgtttattgatttaaatggatatatttttactgaatgtgtaagcatcagtcatttcttttctccttccttttattgactgggcactgcagatcttttggaaatatattcttaaataaattaagacttttaaagctttaactttttaaaactattttgtgagttagagttgttgaaaacatgcttgtacttcctactttaagctgttttgtgggccatagttttactttaaagtgtttctcctttctaaggagtttagctggatagtagaaatgtgtctgattatctgatttgaggagtcactgattctaatggtagcttcctgtagttttaaggtactgcatatttctgtagttgagtgtgttgatatgtgtttcagtgcagttttttaaaatagagatgggggtctcagtatattgcccgggctggccttgtactcttgggctcaagcgaacctttcagcttggcccaccaaagttgtgggcagtttaaagaaaaattctatcctttgcatatgaattcagatgaatagttttggtagtttaattaaaatctgggagattaatgactaatgatggatcttgatggagggtgatttttagattggatctgcttaatcttaatgatagcaaatggtgttgactgattgcttaattgtaaagtgtgctggaatttggtagattcctttgttacattctagaagaaaaattcacttttaaaaagattatgagttcatatcctttgtagggacatggatgaagctggaaaccatcattctcagcaaactatcacaaggacaaaaaaccaaacaccgcatgttctcactcataggtgggaattgagcaataagaacacatgaacacaggaaggggaacatcacacaccggggcctgttgtggggtcgggaggagggatagcatttggagatatacctaatgttaaatgacgagttactgggtgcagcacaccaacatggcacatgtatatatatgtaactaacctgcacgttgtacacatgtaccctaaaacttaaagtataataataaaaaaagatgaatattaacagtaaggaattgataaggacactaagaagatctagagtcaaaatactgattcagttatggaagatctttaagcaatcatacctttctttaactatttgaatacagcatcttaccaaactctgtataaactggcaacaacacaagggctgaaagctggaacccctagtaaaataaagatgtctgatcactgtgggagaattctaataattagcgtaaatgtaagtaatagtttggaacactaaaactagaagacaatgagactgaaaaaagattgtcgtaaaatatcatgacaamgaaaatctgatgagatttgatataatccaggcttcaatacagctaaagaggagatcaaaatggaggattggccaatttatttttctgcctctcagctgtatgaatgcatgacaaatatgttgcagagcccttcagtccttaaaactgtaaagaaaattttattttgtttatattccaccttaattaaaaatatttaataaggcattgtaagattacacctttatctataattgggactttgattttaaaatgtgacatatttaccttctggacttcatttgctcataatcctccatatcaagacagaaggtgtttttggcctcaaatatcagtcatgtgggtgttcactgatatcctggagccaattatactactgagataactcttaataggattatgtctttcctgtggtttataattattactgcttccattgcttttaattaaaatgttacactagtacatatgaaacatctgcattcaaactcaacatataacttttagccagttcaccatgaatacatatatatttatatgtattgaggaattaagtacttttatatgaagttatttattttgtatctccccaaatcaagcttcctttcatggttagtacaaaaagaaaacattgtatttaaacagacctgggttagaatcctggcactattttattttatttgtgtgactgtggtcagcttctttcttggactgccatttcttcttctgtgaattgaatttaatcctatgtatttcatgcaatagctataaggattaattggagtcacatacacaaaatgcttcagacagcatttgtcacataaatatatgcttttttaattggttacacttattttaaatgttattactgcgtctatcatgtacattatataaacatcaattggcaagaatttgtttttgctctagtaatcaactagtggtattgaagtctgttagaatctatgagaaagggaggagttaatgaagttaaaagattatgaaagaggtgcattatagatttataaatgttgcatatatctattgtgaaaaagttactgaattaacatttgtcaatattatgagggagattggggagtttctgaaattcagatcaatttaaagagacccatttcatttcatttctgtctaaaaatatgtttttagtacctgttgtactgcgagcccactggtgtaagtttcagatggtacaaaggaagtatatggcctaggttttgtttatacatgactattcacatctattacgtaggttaataagattcaaatccaggctagccccatcctttttttactgcaacatacatatggattgattcttctgtgtttttctgagtgtttttgagactagatcagggctaatgcataggtgaaaattattttttggcattctcatagaaatgtagaaggcatttgacattaatttttttctgaaaagaaattcctacataattaaaacaaacccttgtatttccatgtgctaactggagtaaactcatcttctttctaagcaaacatattagcttcaaaaacaatttttttctaaacttttaagcatccctaaacacactgcatttgcttatgaataactcttttagctcctaggaaacagttggttggagataacctattttgcaccaggaaaaggtaaagtgtgatcttactgagagatgactcatatattacactttttatactagctataataatttcatttctttgagaattttaccttggctgtgtaacagcatttttgctagactttacctccatcataataattaaagagacaatctgtgtccctacctcccaggtgcttggaaattgatattataagcacttatgaatgtccccttgaggcactcttgactgggccactttgaagaaaaatctcttcatcaataattaatccctgagggccacttctcaggggacccacacaaaattacatgtcaactccaggcctgatttatataggaggcgatcatggatggagccctgactgcacttcctcctcccccccatgttttattcctcacctctctctgctggttctcctccacctcaacccctcaaagcccccagcacttttacttctctcccaaaactttatcctccaacttacaactcagtgtacctacacagaattgactcacccggtagatcttaatctttatgaaattctttaagactgacatgaaaaattgtagcatgttaaaatttatagaaacattaccatgcctaatgaaaaggtcgtgtgaaaattgccagcaaaatagtagaatgtgtatttactatttgttaattaaaataagtacatttcccaagatacaggataagcctggggataattttgctctatgccatagatcccttgctctctgaccttgtgggaatcattcagccactgtgaagagttttctgatcttcagtgagtttgctgttgatcagtcttttaaggatggtttgaaataaaatatggcaatggtgaaattgtttggaaatgtgacctggtgtgtgttcatattaaggaaatgctgagatattggctcctcgatttacatacttggtaggattgagtgtactatttataccagctgtatgaatttcatgtgcttattcacctgattttaaacttgtttaatgtctgcttgctgccttttcttttttaatctgatgaagtagctaaatctaaatttcgcctgagaatacaagaaaagttcaatcgtactatatatggctggagttctgtgtaagggtgatctggaattaacaaatttacattttgtatgtttaggattatgctgtctttaactagaaattaagaccagagattcgaaaaaggagatgggactctttatgccaatttcttcagtgtgtttgttgattgatgattgtaggtgaaaaccatggcataagcaatggggtccccagaattcaagctatactaatctgactccttgtaccacagtgacctgagagctttgcgggacttctttcagatatttctctatgccaaatattgaggagtgctggggtaaaaatttaaacttctccacagttcaaagaagaaaggcattcagttccccttacagatctctaggggtaacgtgtgttaccgttcaccacaaaatgttcattcctgttaacttttagtgtaaccttagtgtaataaaagtgttaacttttattatgctttatttccccgatttgatttttaaattatttttcatgattattacagaagatttaaaacatmcaaaaaactaaaatcaaaagatgaccccaaagatacatagtcatcccactcaagtcatccacgtaatattgatgtagtacatttctttcctgtgcacgaggtaatctttccctaaatacttttagtcatatataatttgatatttgttttcttgtcctatcaaaagcatttctttatattcatattaacttcagttttaagtcacggcgtaacattccttgtgagtggagatatcaaaatgtattcaagcctctctcttattatcatacatttaccttgttttttagtagtcagttattaagaacaatgtttcagcacaatttttttttatttgcttaaagcattgtgctggaaatacacttgagagtgttggctcaatgatatatagtgcattttggttctgccgttctcgtttgcatgcttcaactgaattaagtgtctttaaaaatatgttttaaaaaaggaaaaggggaccattttggggtgcaaagacagaaggagcaaaatggaaatggaaccagtttaaccgtttgcctcatcttcctaacactgattctaggtaacagaacgggcaggcatctggatgtagttccctttgatgtggatgtgacttccttttaactcagtgctgataatagcgtttctttctggagaatggcttgacagcgtgcatggttcctaattttttctgccctgggagaaaaggaagagtaaggttggacctcaggttgttatcttggatggaacattcataaacctcagattattgtcgtgaatggataaatctcaggttgttatctagaatgagtaaatgtaatactaactgcagctgtctcattatgtgatggaaacttttatattatcccagccttctcaccctcaccccaagaacaaaccactctggcagaccagattctcaaagaattattttatcctagcctgcctttactttgaagtatgggttgtcatgtgtgtgcatgtgcatatgcactagcatgtgtgtgtacattttcttttttttttcttcctggtactcagagaagaaagggtccgtgagtgtaactacttttgactcaacacatttttctcccacatacaaattaaatgaagcaaaacatacttcttccttgggtgtgccaaccaaaatgactcttgatttttgctacattttaaagctaaagtttacttgcaacccagactccagacattggtatgcttaaggctctgtcttttctgaaagagataaaaacatttgcagagaaaaatttgtatgtagctcatgaaaattagtgcccatcacccctttcattccaagactggacagtaagaaacaaaacttaagcatcctttatgcttaagatcacaatattataggatcctagaagggaatcatcaatggtaggtatgactactttaaggatttgaaatattttcaagttgatgtctacatagtactactaattaatatagctgctagcagctgtatgagtatgtataaaatgataccctttcaagtgttaataaaaattattttttaaataaacaattaggtgaaacttttgtgtgattcgtttaatttgtatttgtttgaatattggtaaattttaaacatttttccacattttaaaatattttgggttttattttaaacaaattattttaaaaacattttaatgtaagagtaaaataaaaaaatgtaaataagaatacaaataagaaaagtagaagtataacagattttaagaaaactagatgctaatgtatcatgagatcacaacaaaatgaatgttatcttggaaacataaaatctccccaaacctcagataaattcagaaacagcagtagactgataacctctgtcctttataatatttattgatgatgagtaacagataattaatatttagtctgattgtagtgaaaggacagcatagatttgtggttaagagtatagactctggaattagagtgctaatgttcacagcctagctctgccacttactagttttgaccttggcaaataacttaaacattttttgtttcagttttctcattgtaaaagtggggatagaaatcatacttacattacaggattgttgtgtggttgaagaaaatactacagattcatcctttttaatagttccagcatgtggcaagtatgcaattaatattaggtattaaattattaataatggctaccacctattgtttgacttcagtgatttatctctttgacaatatgttattttagtcttctttaaaacacaggaatttactctctttttttaaatctaaaatattaattttttcctaatgtgctaagcactggtctagatgttgtaaacacattttcaaacaagacagaaaagaattctgcagtcaataaaattgcattctaatggaggaacaatagtaaaaaaaatttctttaatatacagtaatttcagataatatcatgagcttttgtaaaaataaaccaagaaaatgtgatgcagaatggctagtagggtcttttttcacatggtagtcagagaaggcctccctgtagaggtgacatttgaactgaaatctagaagatcataagaagtctgctaggggcttttgaggaaaaatgaaagcaaatcaaagaggtgggactgaactttggtaaacaaaaaaagtaagaggtgtggggaacacaaatttaatatgtaatggcattcagtttgaaatcactaytagatagcacagtaaagataccacgtaggcagctgaaagtaaacttttggatgtctgtaaagaagccgtagctggagatagaaattgaggaattattgacataaagatgttatttaaagtcttgggactgagtaagattacttaaagacagcgtagctcaacaagggactgaggactttaggcattaagaagaggagaagatagccaagaaaccaagggaggaggaaggatgtgtatatagtcaactttcttgtctgctgttgggagggtaagttgagggcataaagatttcttttaacttagtaacattgaaaaagtgtgagcttgacaatagccattggggaaagaagcctaataaaaatggtttgagaagaaaatagaatgtgaggaagtaagacaatggcattgggaaatgctggagaaaagttttcctgtaaaggggaacagaaaatagggaagtagctggagagggataacagagcaggtacatatattaagggaagagttgcagtggggaaactagagttgaaagacatagacaggataattacttgtataaagggannnnnnnnnnnnnnnnnnnnattacttgtataaagggattcttttggtgagagggaataggattgataatataaggtttagaataggtggtgagacagaggtggcacattgggtggcggaacaaaaaataagttccctcttccgatggatggttttaattttctcaataagagtatgaggcaggattaccaactgagggtgagaggaaaacaggctgtaaaagtttgaagaacaggtgaaagtatgaatagattttctgtaaagtaggataatgaaaataataagtatagtaggattgttaggcagtatttattttctacttgatgcttgcagtcaagaattgaacatgagagcagtgaacataatagtggattgttctccatccacttttaactgcttgggttcaggcaaagaagatgtaaagagataagtttaagtggattagttttgcttgggcaataaagttggagtgagagaagagtagggaattaaggatgttgtgaagaagtcataatagtgtatcatggaagctgatctgagggacgtcagcataggagaatgagatgactactgaaaacaccagtgatacgctccatggattgatggtttcaggaaggtcagataattcttggaaagtggaatgttgtcagaggtaaagattggagtggtatgtttgaaataaagcttttagagatagtgcgataatcatggtaaagtcaagactataaccaagggtgatggtggctgcagtggggtggaagaacaagaattattggtggtgagatggtgagtaaaaagaggcagatgctaaatgagccaagagtctgttgaagtcactaagactggtgtaaaaaattgagtggagttgaagacatagagaattagatgttaaattctcactgaatctgggtagagggtgtggtggcaaccccctggggttggtagatgacagaagcactgagttatagggagtagaacacagaggaaatatgatgggaagatacataagaaaggacagccaggccaggtacgatgacttacgcctgtaatcccagcactttgggaggccaagtggtgtggattgtttgaactcaggagttcaagaccagcccgggcaatagggcaaaaccccatctctacaacacataccaaaattagattggtgtgctggtgtgtgcctgtaatcctagctacttgggaggctgaggcgggaggattgcttgagcctgagagatggaagctgcagtaagccatgattacaccactgcactccagcttgggcaacagagtgacgccttgtctccaaaaagaaaggggaaaaaaatgaaaagatagccttatgactatgcagacagtgattggagtgatgcatcaaccagccagaggataacaaggattgccagaacctagaagagacaacaaagaattctcccctacagatttcagagggaatatgacaaggttgacacctttactttagacttctagacttgagaatgagtgaggcagtaaatttctgttttaagccactaagtttgtgtaatttttttaatggcagcccaagaaaatgaatacaaattttgatgtgaactgcaaaggagctgggatatttgtggaaggaagaaaggaaggaaggaaagaggaaggacaaagaacgtaaggaagggagggaggaggaagcaggggaggacctcagatactttgatattaggaataaatgagactggggataactaacatttgtaagagacagtatttattaaattcaaatttttgtagttgaaggaagtaattggggttgactattcctaaatatgaagaatcctaaatatgctattaaagtcctggttctggcacttttgagctttgtgaacttaagctaatttccccatctataaaatcgagatcgtgatccttgttctgcttatcttataatgttgttgtttggaagaaataagttaagaacaaatgcaaatgtaagctgttactatcatgaagttgcttaacttmcagatatgcacagtccttatatgaagggaaaagatgtttgttatcaaatatggaaaagaaccaggtagataattttttaaaacccacactaaaaattaaacacagcagttccccttcatccaatttttgctttttgtagttttaggtctgaaaatattaaatgtgaaattccagaaataaataattcataagttttaaattgcacgattttgggtaatgtgatgaaatctttcattgttccgctccttcctgcccagcccatgactcatcgctttgtccagccagggtctccacactttctaagctccctgcctgctagtcacttagtaaccatgctagttctcagatgactgtggcaatattggagtcctttgtattcaagaaacgcatattttacttaataatggctctagagtgcaacagtagtgatggagacaattcatatatgccaaagagaagcagtaaagtgcttcctcaagtgaaaatgtgaaaattctttacttaaggaaagatactgagattgctaagatctatggtaagaatgaatcttctgtccctgaagctgtgaagaaggaaaaagaaattcttgcaagttttgcagttgcaccacaggctgtaaaagttacagttcatgagaagtgctcagttacaacggaaaaagcattgaaaacaaatatatatgtagggttcaatactatctgcagtttcagacatccactgggggagtcttggaacatatccccgtggattagggtggactcctgtatacatttttcgaaagcttaagttaccaacaaaacatattattccatagttcaattttataagtaatttttaagtacttgctgtatcttgggaactatattaagtaccacttagagtctggttagaaagataaatgcatctcctctaaatgtgcttttgatacagaacagaagatgaggcaatttcaccaataattatatatcaagacagaaagtcataagtacttggggatgatggttcagaattatggtgtaagagttaaaataagcatgttataaattcacattcatgcaacttaataatttagttttacaccattatttagattatatttaataaatgataaagaaattcatataagttttgttacagtttcccttcaccttcacctcaatatccagtaatttaggggccagaaaatgaattaggtgatcattttccaaggacaggtgaaggaaggctgtcctggctgaaatgggtcaggtgtgaggcaggtgtaagtataggagctggcagagttagaattaatagggatcatcatggatctatgcactcagagcatttttttttcttgttccctacttaagaacatgtttccagtcttaaaaagatgtatccgtttcagaaatggtgaaaccaaggacatagaaaggttaaatggtttgattaaagtcagtagtgaactggaaactaaaatcaatgaatatgagctcagttttacattgctgtttattcagacattaaaatacatgacatgaaaattaggaatcatagaggtatagaagtgggaagtccttcaaaagttacctcatttttcctgaccgtatgtattcactgagtttctcaataagatgtttaatattcggttcttcaaggagtccttcacatgtgtaaatgaagcaaggtatgaatggcgtctaatccacaggccagatggttgcagtggagggagctgatgagatatcatcaatcacttctctacatcatgtcaaatgaccagttttgtcctttgccggccactttggcagctgacaggacagaatctttatttgttgggaaatttggaaaaagaaataggcaaactggattaccggactggaattggttttgggattctatatcgtgttttcttttctttaaagtctgtatacatttagatgtgttataaaactgattcactggagcccttgactgaaggacatttttctttttatttctactttataatgataatgatgtcattgtcaagaaaaccagttcatattgaggactgaaaaaatataatgacaaggatatgatctaaggttaattttatattagtctaacccttgctccctttgcatctttagtcctgtataattttgaattaattatgctacaggagcaaatagttagaggtgcatattgggtaattataatttgcactacagtgttcaaaacaaagcaattctagtctagttctcagttaatctgaaagtgaaataaatccagaatctatgaaattctttattttatcaattctaaaatagtatacttccataaaaacatatattgggcttaaaataaatataattttaggtttggtaactttaattgtgtaagtcaactttcctggagaaattagattacattgactatgcaggtgcccttgctattactcaagatcagtagtgccttttaatacccatggcaactgatttggattgatatggaattttgagtacaaactgtaagggagtaataactttcagtaggttcttagttggaacatacccctattatgaaagatggattaacaagagaaaagtaaacaagctgattaacatatatatttcacaagtacatgggagatacccagagaatgagtagttttcccagaagtggttttgaaatagctccttcaacaaagaacagtacatttttagagaactgaaaagacaaaggatggcaacttgaggagaaggcaaatgcatggcagacaaaagttagtaaaacttgttaatataaattcctctggtactgttgctaggctgataagggtctaaagctgtctttggtggttaaccttttttctttttggtagagaggtgggcaggataccattttctttgtaaatctatctactgcttttaggcaaataaagggaggccagagaactctcctgtgtttcttcttaactgccttcagtgcaataacccttcatattttgggaaggtatattctggtctcccacacttccattatgattaagatattgtcactgaaatgttatgattaccttgccacccagtggatcctgtataatcatttctgaattattccattgttttaataatgacatctttaaatgtgtttgatttccatcatgatagtacatgcatatcataaacatttaaaaataaataaacaactttgtggaatagtggttctattcctcccagtgatatgatggtaaactagtaaatgggagttaggggagggatggtgcagagaagggacatcctgatgtgtagcccttcctgattaccctggggtaaatacagcctctgttgctgattttaagccctccctaagaatagggagttggaaatagatgttagctatcctctctccagtgcccactgggtctagctttcacctcacccctctccatcttctcctatttccctttctagaagcaacactttagctgtttctcttaattcatttgctagtaaaattcaaatttttattcagccgtcagatttttggacagttaaaatgttgttgttggccatttgcctagcagtcttggaaaggcagctttttaaaaggctgcctaaagtttgaattaacattttaaaactctagatatttggatttcttagttcctctagtatagtttgaagtaatttaaaattaccaaacaatgggcctgaatgtgaaaaaagatgaattgtaagacagtatcaagaaagattttctaaggaatagttttaaaaagatactgttgatattaaacatacttatatgttaatatataattaacttaataaccaaggacatttacttagcgttgtccatgttagatattgatttgctagaccaacatgttttgaccatttcaagattctggttatgacaaaaactcaaatttggaattgatagacagaactgatccataaattgtgagaaacaccatttacatacgtttctaaaaattttcacatgcttcatccagctctataacctgcattttagggggttatcattcattcggattaaaacttttaaaaataaatatgtattatattcagtaaaacaaattttaaagcaaaagaaatcggagctatttcattctttgtgatattgttaaatatagattgtttctagttttcaagttttaattttgcttcgtagtaaataagagatgtattatcaagccttttcttacttaaatcttaacaagtgtgtaaatagtatgaatgttgctcacaacccacactgtttgtaattaagtggcaaacttattaatttccatcacagaagtctcccattaagtcaaattctcttctgtgccagcccagtaaccttaattacgatgcaatatttatcatcctttggaataatgtttatatctttgagtaagtctaagtgttaggaaggtttaaagaaagcgtggaactatgtagtgttgggaggtacctctttctaaacacctggaagttattgcagttatttagattgaaatgaaaaataatagctgtttgttttctagtggtatgctccatttaagaaaagtcttaaaaggtagattgttttgtttagtatgctcctttaggaaaatattctgtgtataaaataataaagaaatctcattagaatctgaatgttactaatttgatgaaattacctcttattatatagcaacatacccctgcttttaatttattttcagtcttaatctttaaaatgacagagaaagtgtaggaagcattgtattaaagtgatggtgataatttacatatctttgagatgaataacatttcaatggaaacagcaaacttaatgattaaagaattacttgacatgtgggcatcctgtaatctttcctatggaaattaaagaaaaccagttttacccagtaaatccaaaacactgaacttctgacctcttatgcctctctggtctatattatttatgcatcttctaattcttgctcttatgctactttcaagtatggtttcttatcagaagtaggctcgtaggcaatgtaaagtcatggataattcaaagtattcaggagcctcattgtagtgatatttttgtatgagtgtggtgatgtcatagagttaggagacttggttctaatcttgactcagtctttaatatggattgttcttttacttcactaggcgcatctgtaaatagaggtcccttgtggctcttacactctaaggagatacaattcaatttattgcaagtctctatatttatgccttatataagttcctggagatactgagaagggtaatagccagtcatcatactcagtaagctgaaaggctagtggggcagacaggcatataagcagagaattttagactatgtggatttcaattggaatacaagaatttgagggtttaataatatatgtaaactattttataaattgataaatattaaacccagaatttctattttaatggaagtagcattacctgacatttctgaatggtaaatgtatttttgataccagagcatctgtgatttttttacaattaaagaaaaatcttagctttttagacaagatgtgtgaacttaattcaaatccaacaattaattgaaaggcactggagacatgctgtatttcactgtcagttttttgttattgttgctgcttatatgtcatttgtaagatgacaccattattcaagtgatgagccaaacagtactaaatatttttttctaagccagttttctatcccaacttttattttctgtgcatactattccccttataatcacaaattgttaatatgggaggtgtatttacttttctgtctctttacaacctatactcattgttatcaagtcctgctagagcttccttaacaatatttctgaggtttgtctctttcttttcatttgaagtaacactatataagcaatgtgtaccaggaagtttggtatatattgtggcttaatcagcatataatagacttttctttaatctgacttatttcaggtcttgtttctgtagctgcaccagcgcaaaattgatttcagtatttacagtgaatatgcagcaatcgttgagttactacattaaaatgaaactaatattagctgcccatagaagaagtacagagtagtgaataacagtccataatctgaagccaaaatatgtgggttaagaatctctgttacttcctggggaagttactcaatctccttgtgatttagttttctcatctgtacttgaaaaacacttgaaggggtgcctggcatactgtaagctctcattcaacatcaggtattaccaaatagtcatctgatataagaacattaaaaaatgttcttatatcattttttaatataatttttttcgaataaaagacattataaaattttgataaaaagttgctaaactgtcttattgttgaagtatatattagactgagaacacatccagaaatcaagttagaatattaatagagatagggtgttttgcatggtgtatcttgggagcacagaaatgtgttatctactgcggcttgataggagggagggatttaacagactggttggaagtgtggattttggggagggagttgtgtgcatgggagattttcaaaaaacagtttgcaaaggagcattggatatattttattcacatcattatgctatattgtaaaaaaattatgtcagttaaaatggagaaacctattagcagtcaatgaatggagatgaaaatgaattactttttttgtgctggcacaataaaatttccattgatcattctttgaaatgagtaagttttggtttaggatttttgacatttgatggatttcaagaaaaatacttaagctgatgtgatttcccacttatcttttaagtacataagccaaatgcttttattttgaagtttccatgcaccctggttttgaatattttgccttgttgattggactatcagtccttcccatacctagttgaccaccagaatcaccttgggcactgtaaaaaccaggtgttggggtataacatgggaaaaattgctaaaagcggcttaaagaagacagaactttatttattcctcatgtaaaagaagtccagagatagatactagagtgcgtatagcacctttttgttgtcaacaggtttctgtctttccattctgatatcctcaagttcacctctctgttgaagttagcagctagagctccaaaagcagagaagaacaggaaaaacaaggtatacctctccctttaatgagactccttaaaagatacacacttctaaatgcatattatttcctggtacttagctgaatggcttgtcaaagcctgggaattatagtctgtagctgagaactatggctcccaaaatgtaataggggtttgctactaagaaggaaggatggagtgcatactgaggcaggagagctgcaaagtctgccacagacatttgttaaactgattgattcccaaggcctatccatgtataattgatagatgtgtagggaaatctgagatattctgatgcagctgatttattcaggagtatctgtgataagttaactttttctactttaaagcccatggtcccatgaccacgtatcaatctctaatacatgtacctaagattcctatataaaagtgagtaaagaaattacgtattgccattttgaaaatttttctgtattgtttgtccaggtgctctataaaattaagccatgtgaaggagtggccactagagtatgatactcttactggaattctgcatacactcaaggtgggacactagggaatagatgtacattttgtattgggggttccaagaccacctccaggcacaattgatttactataaataccctcaggatatagaagttgttgtattcatggttatagtttattatggtgaaagaataaattaaaagaaacaaagggaaaaggcgcatttgtcaaagttcagaggaagtcacccacaagctttcagttgtcctctcccaatggagttacatggcacacatttaattcttccagcaaatgatgtgtgacaacatgtgaagagttgccaataagggaagctcacccaaaccttagtatccagggtttttaattgcgtgttagtcatgtatacatatagtgctgtgtgactgacttcagttattcaaggttcagaccaccagagaaaaagcagatactcatcattaatcacactgttaatgtaaactagccaactgttacaacgtggcccaaggcctttggcattaaaaaaaaaaacaaaacaaaacactcttgtctgacagaatagtcacagcttggttcctaggagtgagctgagggccacttcttctgaaaacaagcctttcttgggaatgcttagtgtattagtctgttctcacgctgctgattaagacatacctgaaactggataatttataaaggaaagaggtttgatggattcagagttccacatggctggggtggcttcacaatcatgttggaaggcaaaggaggagcaaaggcacatcttacatggtggcaggcaagaaagcttatgcagaggaaccaccatgtagaaaaccatcagatctcatgagacgtattcactaccatgaaaacagtgtggggaaacctccctgatgattcagttaccttcacctagccccacccgtgtgacatggggattattacagttcaaggtgggtttggttggggacacagtcaaaccatattgctcaggatttgagcaactcaggcctatcaggttctttcctgtacacatttccacctgaaacaataaaaaagaaacaaaatatatgaaacaattatttttaagatactggctatcaagcaatgaaatacagtgttccctgagaaacataaacaaatgaaggaaaccctaatatttttctagtttatcctcttgagagagtttataggctgcagatcagaagggggaaaccacacaaagcctggtggaatccttcaattggagagacagagctgaaagtctagggagaccaaggaagctagagtttgtagaacagaacaacagagaggctagagctgctcagagagaaacctgcagatcagcagagggttccccttgagtactccacagagtaatgattagtatacgcatgtgggaaaatgacccatggctgcgtaaagaacagtccgacggaactagcactcacatgggtctgggaataatgcctcctcccaccagccagactggaaaacttcatgattcatacgacattgggtattcagaagttttttgcctcagtagtgggaaataattagccccagagcaaatgctgcttgattccctcctcacaaagcttaaaaccaagacctgagaggatcaaatcattttcaaataattcaattatgtcctagaacaaaactcaaaaacatttataggaatgcgaaaatatcatgtacccaatatggtaaaattcacaatgtctatcatccaattaaaaataactaggcatgaaaggatgcaggaaaataccacccataatgaggataaaaattaatgtattgagacaaatccaaagccgacacagatgttaaattagcagagaagaacattaaaactgtcattataactgtattctatatgttcaaaaaatgaagtagaggtgtgcaaaatagataggagacccaaattgaacttctaaagatggcaactgtaaggagatgaaaaacacactggataatattgaagacagattagacactgcagaagaaaagatagttaacttgaggacatagcaataaaaactctaaaatgaaacacagagagagaaaaaaatgaaaagactatcagtgagctgtggaacaacttcgagtggcctcatatacatgtaaatggaatttccccagagatgagagtgaagcagtgggaggagagaagaagaaaatatttgtaaaaatgaatttgtaaatccaagaagcccagtgaaacctaagcagaagaaatataaagaaaacaacgccgaggcacatcataatcaaattggtcaaaactagtgataaagagtttatcttcagagcggctagaggaaaaaaacaggtgtactggatacagaagaacaaagataaagcaatagcagatttattgttggaaataatgcaagtgagaagacatttaaagtatcagggaacaaaaactttcagtgtagaattctattatccagtgaaattagagttcaaaaaccagggcaaagtagagactttttcaggcatacaaaagttgcaaacatttataagcagcagacccgcattacaagaaatattaaaggaaatcacatccttcaggcaaaaggaaacaatagtaggtaaaaataggggtttgcaccaaggattacataattgcaaaaatggtaactacataggtagatatatgatttttacttactatttaaacctcattaagagaattggtcatttaaattaaacagtaaagtatggggtttataacacatatacaagtaaaatgctatatgaataatctttgaagacattatgctaagtgaaagaaaccatttacaaaaaaacaacatattgtatgattccatttatatgacatgtccaaaacagacaaatccaaagagttagaaagtagattaatggtgcttaaatctggaggtttggggaaaactggaagtgactgataatgggtacatgtttttggcagggatatgtttgatgaaatgttttaaaattgactatggtgatggttgcacagctttgtaggtatactaaaattcatgaattatatacttaaaataggtgaatcatgtgtaagtgaattatatctcaataaagctattgtaaaaaagtaatactttacctatgaagaaaaaaataaagtcacttaaatrtgagacggggagaagtaaaacctaacaatgcacaaagaatgttgggtaacatgcacatcatcggtgagacttgacaagagcatttgcagtagtggtaggaaagtgaagactcagtgggtagctgaatgtttctctttttcactttaaattggagatatgtatgcattcttctgtgatctgttcatgcccttttccagcttatctgataatattttcctgttttcttatccatttatgtgagctttatataagagactaacactatgtcatttttgattaatttgattgatatagttcaatgagtgtttggaacaggatttctaaataggacgtgaaatcaaatgttaatctctaagagtccattccaactctaatatactaaatcctagggacccaaaaaagatgccaagttaattttattaatccctggaaagaagctagattaggtcaaatagtatgtaattacagtgtaagattgggcgttatatttttatatcttgctttaggtataaacttaaattattttaagtgagatatttgttctcttaaattggaattcctaggttgtttttggtaaaaaaattgggatatcttgatgtgactccatactgcatatacagctaatactactgtttaaatggaaagcattctctctaggcattgaaacaaagtgtattaattaagaatacaaaatattacttattaaggaaataaaagtagcttaaatagtaattgtatgcatgaactttaaattcataaatttcatgattttaaatagtccaactcctcaactcacccaattccccaactcctcagctccttgctctactctgatccttctcaaaaaatagatatgataatccttcaattaataaaatccagaaatgaaaactcatttttatcatatcagttcttatttttaacataagtcacttgccagcccatatatatatttccttttagctgttaaccatatagatgaagggcaactagtcacgctatgatttattacagttttgtgaacctgaaaatcatgctacttcctctatttacttaatttgtaaaacatttaaactcagttagcccaggtcctgctttcatctttcccttgaagtcctgttttccagcatctctatttgttgactggtattaaataattttagcatgctggtatacacttagcctcttttgaactaaaataacccttggtcttgtgagcagtgtcttttgtaaatgagagtattttatacacaaaaggtactagattaaaggtaaatcataatacttttcatactacttgaaaaaggccctctaaggccaattttacataggagccaggcaatttctgtaaagcaagttttgaggtaaattgactaatttgttttgaatgaaaaaaagtataaatgctaaaatatagattttcttacccaatgaactggtgaatttttttggtaacgtaataatccctatcaactttcttttcacataattctgtcttgggattttgtataaatttatacatatgttcaactttttgcaaatgcaagatattccaacgtgtattttcatagttacacattttytacatactggttttaatttaaatatgtaatatatggatgctttgccacattatattaaattgaaaatagtttataattaaagtaatgaaattttaaaataaagtacagtataggttatcccattttatatatttttgatatctctttataagtgtttgcatttgacactttatttctcaattcctataataaaaatatacaaacagtatatataaagtatatatgttattaatgttttgctgtttaaattgtttaaagaataaagatatataattaatagctagtgttacattatttggtaatattgttttcttttcttttcttaaattaagcaatactttaaaatatctcctttggttattctgtagtttcttcttgataaaataaaatggtacagtcaacatggtaccatttgaactcttaggctaaaggtgactttaagttgatgcccaatattaatagtatttgcatacttccacaggtggtggaatcctttccttgtctgttatgaactgtttatgtcccctcaaaattcatatgttgaagacttaacttccaatgtgtggtatttgaagatggagcctttagaaggtagctaggggtagatgaggtcatgagggtgggaccctcatagtgggattagtgcttcttataagaaaagactacagagagctttctctcattctcatcctctctctctgcaacatgatcacactgcaaaaaggtggctgtgagtgagtcagaagagggaaaaggattcttacctggaaccaaattgtcaggcaccttgatcttagactttccagcctctctaactgtgagaaataaagatctgttgtttaagccacccagcttatggaattctgttataaaagcctgaacagactaaattgtctatgtcagaattagtcactacctttggcatgctctgttctgtattaagaattgtgaggttaatatcagatgttattattcttgtgtttgaattgtcaatcttttctgaaagacaataaaaagactttttttttcacatagagatcatttaggcacctgttgtgtggtgtgtattttagaagtgaaggagagtcacacactgggccttgcaaagacagacgaagagcttcctctggctcaccttaccttgttgagtgtgagagtgacataatagacatgatattttaaaatgtgtaaactatttgtgttaactatatgctcagtagaaatgaatcaaatattccaggcgatatgatgagcattctgaagggattcatttattttcagttgataacattttttgatgttttacaaattcatcatttttcatctgacatgcccttcctgggaaggaaatgtaatgtaaatttacctaaacatgttgggaccaaagacccatgagttatatacagttctatggattataaaatgatatctccattgctatatatatatatatatatatatatatatatatgcgatggatattaaaatctgtttttgaatttcatgacccttccacactgccatattaatttgcaaaaagcatattgtattttcaggcagtctgcctttgaaattgcagggcttagggcaatgataagttcagagacccatgactcagtcagtgatttggtttcctctgagatacatctctattttttgtactaccttatttatagatattttctcacctgttgtcttcatcctttttctatattcctgtacttaaaaatatgattcccatgtatacattcagaattgacaatataggaatatgagtatacattgggttaatagtggctaaaacctagttctattacatacatagataacatgtggtaagcacttactgcatgcaccactctaaacatcttttgcattatcttatttaatcatcacaacaaccctatggggtaagtactattactaatcaccattttacagttgaaggagtagagagcttgagagtttaaataaccaacaagaatagtagagctaagatagaaacccaaatttaatctcaaacactatgcatattgcttagtgaatacttaacaaaatgaaagttgtaagatttaggactatcagagattctttccttcataaatttttaatcaactgcagtgagttacccactgtgcataaagggaaaattggcctttgtacagagctagtaaaatgggaaaaaaagtatgataagttacttggaaaagtagaacaacctaggggcttagaaacctgtgtctgggcaaagaatggaagtacatttaaaaaattattaggtaaatgtaagtctttgaccaggactgattaccatgggtttctgaaattttcagactctaaggttgattgtatctcaagtgtgaacctaggatgcaaaataaagctgcattctctcctcttctgttccctacctagcaggagatgggccgtatcagttctgagcttattcaagaaccaaagatacctttgtgaatttctgagatattaattaaatcactctacactatgactaatgagagacatggagaagcgtgggataactggctgagactggggcttttaaacaagagactgttaagcaaataaactgaaaaatttagttctccactgaccagccttagttagattgttacctggataaggcaacaaatactcgtcaaaagcattaatcaatagatatttctgtttttctgttagctgagaatatttattgrtaaaaaattggcaccgcagcacaatgttatattgaaatcaaagtatttctgtccaattatgaaagaaatgggaaaaacatgtttattattattattatttgtttacttgatgcattggaaagtaggagataacttatagagaactcagaataagccattaaagaaaaatgtaagcataatttaaataagacaaaacttagtttatcatcttaagcatgtaagtacaaaatgtcagcaacatgtgtatcattttaatggctcagaattatagcaagtaattaccagtattgaataggaaaaatttgtttataagttcgaatgcaaagggtaaaggaagcttaatggtacactatgtttggataattactattgtgatataaaacaataccacatgttaagaaagaggacatgttggtcaagtagcttcctgcaattggaattcaagctcttgaataatactgaagctccaatgttttaggcctaagatttagtgattttgtttgtgacatgagggcctgtgattgtaatcaatacaggcttctcttttttgccctcaatggtaatacagaaaaactctctttagatgtataattctagtttgtatgtttccgcattccactgcttcacagaatagtgttaacagaccaaacggtgacaatatataactcttatttgatttcatttatacttggccctggataatattccatcatttcttaaactaggtaaaattagtacaattaaattttttctaattttgtttttctgcgtctggaataaccagtgtatctttattgtgttactgaaaatgtttggtaaagccaaacaagtcaaattctttgatgagagaaaaatctccctgtataagtaatgtaccctgtatctgaaagggttaatgggcttcttaaagtgctcaattcatccagagaggggactctgtgacctgttggaacgtgcctttggccatttcttaggaaaaatgcaatttagaactctcctgtattatctgtcagctgcttagttattgatgatattgacttttagttttttaaagtcttgctttggaaaattatttttaacagctctgaaccactcatgtcttgtatttttattttatatcacatttcatttgggatattattaagccaaatccttggtaaccattttgcacaatccaatttatttttacccaagatccattgaattcaactcactgcctttttgcaaaaggttaacccaatatttcatgttatgttatgctttctacttatgctatgtgaaagaaaagtagctgtgataagtagccaataaattacattcagaatgtttattctcaaaagttatattgctatgctgacatagataaacatgatcatttatcacaatatggattatggaaataaaaactaaaataaatgcagccatctttcttgcatgttacctggctggtttgctttaaatgttagaataactactttaaaaaaatgtgtctttttatttctcaatttgaattaatggatgagattagtaatggttgaaaactgaatagataagcaaacattatattctggaataagaaaatgttttcactttttttctataagcatgagattacttgaatcttctaatactggctttgtaaaataggtcctgttagtattatttcatcataaggaatacaccacttaaaattaaagctttattgtatatttttcttcaaaaagacacagatgtctaacttgagagactgaagaaatatgatttctgtaatatttaggagttactaaaaataatcttgttacatttatattgagctaataaaggaagttttagtggtattacagtgaataaagtatatggctaaatcgactgaatgtagaatttaatagggttttactttggtaacagctttattgatatacagttcacaaatcaacaattaaccaatgtaaattatagaattcaaagtattttttagtgtattcagagttgtgccaatataaccataatcaggtttcttcacccaaaaagaaatcacttatcctttttatagtagccatctcatttctccctaatccgccagcctgagcaaccactaatatactttttatctctatagatttgcttattctggacattttatataaatggtatcaacaatatgtcatatttgtagttgacatctttcacttagcataatgtttacagtattcatcatattgtttttgaattttccaaatttctttctgttattgatatctaattctattccattgaagagggagaactattttgtatgatttaatatttttaagttagtagaagttgttttttcatctagcatacaatatatcctagagaagattccatatagagttgagaagaatgtgtattttgctcttttagagtgttatatggatgtctgttaggtcttgttgatttatagttgttattcaagtcttctgtttcctttttggtcttctgcctagttgttctatccactgtttaatgtggagtattgaagtctttaattagtattgtttaaagatttgtttcctttcaaatttgtttgtattttgggccttgttgttaggcacatatatgtttataattgttatattttcctggtagattgagcctttatgatgataaaatgttcctctttatttctagtaaatttttttgtttctttaaaagtttgttgttctgatattagtatgggcactgcagctttcatgctgctgctatttgcatgatatgtcattttccatcttttactttcaacatatttgtgtcattgaatttaaagtgtgtctcctaaagacagaacatagttgcatcttgctttttatctagtctgacagtatacatttatactattataatttcataattacctatactttactgttgacctttgtttttttcgtgtgaatagtaagttatggttacttactttctgcctgaagaacttcctttaattttatttttttcactttttattttcatttttatttatctatttattttgagacagagtttcactcttgttgcctaggctggagtgcagtggcgtgatctcggctcattgtaacctccacctctggagttcaagtgattctcctgcctcagccttctgagtagctgggattacaggcacccacgaccatgcctggctaatttttgtatttttagtagagacagggtttcaccatgttggccaggctggtcttgaactcctgaccttggtgatccacctgccttggactcccaaagtgttgggattacaggcgggagccatcatgcctggccaagaacttcctttagtaattcttataagtcacatctgctaataacaaattctcttattgtttgttattctgggaatgtattttttgaaagatagttttgttgggtataggagtcatggttcacatttttttttcttttaatactttgtatgtcttatcccacttctctctggtctctctggttgttaatgagaaattcactgttaaacttattgaaactatttttacatgatgaattattttttttttgctacattcaagattttctttttgctattgactttcagcccttttactgatgttctttgtgtggatctctttacatttagcatacttcacattcattgagcttcctgaaggtatagtgtaatataccttgttctactttattaaaaaaaaaataaatcgggcaaattttaagccagtgtaacttctgtattttctcctgctttgtcttttctttttcaggtaatcccattacagtattttggtttgctcagtggtgtatcacatatcattgaggctctgttaatttttctttattctttttctctttggtcttctgattgtgtaatctctcttgatctgtctttaagtttgctgattctttcttctgctagttcaaatctactattgaactctagtgaatgtttcatatcagctattgtatttttcaagaccagaatgcctgcttgttgtttttgttaaaataatttaagtgatttatatctgtatatggatattctgtactctctaagacattgtcatcatactttccttgtaatggctgctttgaagtgtgtattagttctcatgctgctgtaaagaactgcccgagactgggcaatttataaaggaaagtggtttaactgactcacagttgtgcatgtctggggaggcgtgagggaacttacaatcatggcagaaggggaagcaaacacatccttcttcacatgacagcaggaagaagtgcttagcaaagacggaaaagtcacttataaaaccatcacatatcgygagaactcactcactatcatgagaacagcagcatgggggtaactggccccatgattcaattatctcccaccgggtccctcccatgaccacatggggattatgggaactacaattcaagatgagatttgggtggggatgcagctaaaccatatcaaagtgttaaatttgacacatgggccctcttaatgggagtttctgttgtctcctttttttgtgtgtctgtatggatcacacaattctgtttctttgcatggctcatacttttttaaattgaagactgaacatcttacataatgtagctattcttgccggacactaaaccccctctagaggagggcgacttgttactagcgactggatatactttttttttttttttttttttttaatgcagagtctcactttgtcacccaggctggagtaaagtggcatggtcacagctcactgcatccttgacctcccaggctcaagcgatcctcctgcttcagccttctgagtagctgagaccacaggcatatgccaccatgcccggctaatttttgtattttttatagagatggggattcactgtgttgcccaggctggtcttgaattcctcaagcagtccacttgcctcagcctcccaaagtgctggcattacagacatgacccattatgcctggcctggatatactatttagggatgtacattttcctctgtgtgaaccgctgatgtcattctcacagggtgcagccttggatatgtgcagtcattcttgggtgtccctggttttatcaggtgtctctttgcctttttctctgatctctctcttaagatgtctgcctgtagtaatgtcacacccagatcttagttccagtggcttctggttgatttctttattacttttgctgtggaatatgagttgttccacagtgtgattcagttaaatttgggccttttttcagtggtagtttttgaggtgagtccttgaggttttttgtaactccaggagaactcatcttatgtttctttccctgggtttcccttatgaactacctgccttatggttcagttttttgttttcaggaagctacctccctcttcttaattgtttgacatgaacatttttattgtttataagagtactcttaggtttgaacttccctgcatacaggttcaaataaagtcagttcctttggggggacctctctgttcttatggcttgtgtcttctgggaaaaatctctgggccactgctccagagctgaggatagtgacaatggcccacttctctcagagttaaatttctgctttatgagcaaagtactaggtataggcaatagcctctagtcctctcagcttgctcttccttgtgtgcaawctctacccagtaagtgaggtgaggcaaggataatcagggccctggtgttattggcatgatattcctgaggtagaaccttggctctatgagtgggggctggatggagtaacagaactcctgacctgtcagctgcactttagtctcagctgcactcagttgcagttttgtctctgtgtagcatgggggagagagaaaatgagaaatgctggcatcttacccctctctgggagataccatagccctcaactggtggctggggtagagcgagctctgtgttttgagctatacccatctgaggtagaatgactgtcacactggactgaagtggtgtgggttatacttcaaatgccatagaccttcactccttttaccagttttagcagattttcatgtattattgtttcttcatttgctgtttgccttaaggcaaatttccagagacttcaaagagttttcatttttactatttttgcagttatatgtttatttttatgggagtcagtctgcagaggtccttactctaccattccatgacctcttaatggtcatgtttactggcttgctcaagacagggtttgaaattaatttttcattgagctactcaggtgcaaattgatattatttaaacatgtggttaaaaatgtttcctaccttatatctcaaaaagtgacttttaaatatagccctcatctttggatcaggttcaatataagtcccatactcagaaaaacagagttccaattcaattctttttgcatattaactgtgagatcttaagcaggttacttaatcaccctcaatttatttgctcatcctaagtattgagagagtagtagctgtttgtaagttaagttacataatggatgtgaaagcttttgaacttttaaactctaaaaacttaaaacacaaagcattgttattaccactttaaatcaaatgcagaatgaaatgaagtgactttttctgattttattcttgtctaagaatactaagtataacatttattttagaaagtcatttatgatttttaaattcttcatattagcatgtgatactcttataaaatcagctaagatatcacctagaaaatgattactttagatatgttgattgtggaattacattagtagaggtggaaaataacatttttagcttgtgtctgttgttaatagtataataattcttttatctgttcatttattgtggtctttttgatagttctctgtggatctcaataagagttcatttttatatgtgaaaatgatgaacatgacccaataatttttaaagaatcatggaatctagatttggaaggtgatcttggatttggttaaatctagtaggaattgcattctcaggtccccttcaaattcttacttggccactacatgaacaaatcatggacagaggattactgttgcacatagcctctggattccattttcactacacttcaatttttagggtttttgtagtttagaaaacatgttgtatcatgcatttcatttattctttacttctgattcaggtgttgccctattttgcatgtgaggaaatcaaagatcaaaaagatcaatggtttactcaaagttataagagtactaggaattaaaaattatatttatgatttttgaattactattttacaggaataagcatatgctacctacctggtactgtatatcataaactgaaagatttttgaaaagtcaggaatcccgcaactcaacacattcacagtttagaagggaagaaaattcttaaagcagcagttactgtttagactgaaatactgtggtagagatgtttcagtgatctgaaacagaaaaatggatctagattagttaggggtaacttcatggaagaagacttttgaaatgaacatcatttaaaatgactgcagtaatgtcagctggaatgatttctaatacaatctcagctgccactttttaatttatatctgaatccaaatcttcctccattaatttccacagccttggttctgtgttaatacaaaacaaattaaatctctcttccatgtgaaagttcttcacctactgaaatacactgtgtctctcccagatcttttctccaggcttttcttcagctgttgcatctaacttttcaacacataatcattattgaaagatggtaggtaataatgttaatttggttagacagaagcatgtgctactaccatgtttcctcctctctggtgaaataatggtatgttgttcattattgattatatttatttgtttttcttgaagtttttcttctggtcaagaattgcttctggctaattagtagaaaatacaataacaattactcgatttatattttgccccatattagtctattaatgtaagctgtttgagagccatgcaacattttaaacatatattttagctttttgtcaatgtataatgatatacattgatataatgatgtcattatatcaatgataacattattagattttttctaagacaagtatatcttctcactttttccatataaattttcattgtattaggattttcccatactgaacttttttttggaaaaccaaatataggattcctcacttgattttattaaacacaatcttgcaaatttggggtcattcttctgatttacatgtatctttttttttttgtgattcctaagttttctttcctggctaaccctttctttaggggcctgtaagaggaaatcttagataaagtttgattcctaaaaatgctaccagacatggtggctcacacctgtaaccccagcactttgggaggttgagccaggtggatcgcttgagaccaggagttcaagaccagcctgggcaacatggcgaaacctcatctctattaaaaatataaaaattagccaggtgtggtagcgtacgcctgtagtccgagctacttgggagactaaggtgggaggatcgcctgagcctggaaggcagaggttgcagtgaactgagattgtaccactgcactccagcctgggtgacaaagtgagagagaccgtgtctcaaaataaataaaaataaaataaaaataagtttaaacaaatgccaacatatttccatatatttacacattgtttatgctgtctttagagtatcctggctttaaatcctcgaacacaaactcatgcaactctgygttccacttcggccaagaaattagacaagaaacattggaaaagaaatcctgataagaactgctttgtaagtaccactgatacactatttcatgctgaaaattacctcactccacacattgtaaggcaagattttacatacacttagaaataaggtattaaagtacagccgtgattttaaaaatattttaaatatttaatatttgaaaaagtttgaaagtgtatttttaattacactgctttaaaaaatctcctgaaatacaaattatatacaggttgagtaacccaaatctgaaaattcataatacccaaatctgaaacaaatctgttgtcaagcatttttgataagggatatgcaacctgtaaatttagtttggtgccaaaatttcttttttcaaaatctttaaaatttgttttaaaattgttttgcctaatgacacaatgatacagaagagttttcatgttaaagatatagtctaaatgaagaaagctatagatacactggtatctgtggactttaaaaatacaccctcacaaaatatatgaacattagatgttctatgaacacctaatatttccaggtgaggtgtaggagcaaaacagcatttctctgagattattgctagaactttgtttaactgtatataggaggtgattatagagctgaaactgacaccatagatcggatataagtacaaccttaaaggtgatgttagaaattccatcttaaagttatatacgtttttaaattttgaaagaaatgtctttttatctgatttccccagattaccccaaattaacattcccaaattaatgagtgagacagtagtattagtttaacattagctcaattggaaccgtgtatatactttcttatagaatgtatgattttagtttatgtacttctttcctccttcttatattatgaactctttgaggatggaaattgagggtgtgtgctcatgtgtgcttgtatttatctaattttaagtttttctatcaccagccactgggcaattttttttgaatgaaaaaagaaaaagaaacagagaaacaatgttacatgaaaagatcccatagtcacttaattacagacatggattttgaattcmgtttttcttgttccagttttgggagctttgttttctatcatgatgcttctagtagaggtctctaaaaggaaaccagtgtgattcagattgttcaaggaataggccacttacaagccatgacgcagtttaatgataagagcaattgaataacactgaaaaaagaatcatataatttttttattatagttttttttcttttttttattattattatactttaagttttagggtacatgtgcacaatgtgcaggttagttacatatgtatacatgtgccatgtgctggtgtgctgcacccattaactcgtcatttagcattaggtatatctcctaatgctatccctccaccccccaccccacaacagtccccagagtgtgatataatttttaaacttagaaagcccttaaagactatcaagcctaaatctctaatttttaaaggtctgagaactatgatcaagagacactatgtgacttccctaatgtctcgcatttataagttttcaaagtatttatggtcaggactttatttcgaaatggagactttctttattttgattgctgttgttgttattttatggaaattagcatttgtatctcataatgtgatcctataaattgagtttattttatcattttaaaaataataaccaaggtacagtgaggtccactttctctgtcaaatatatattgacccaaatatttataaaagcagtttgacaatatctttgacaatattcatttggacctgtgatgctatacctagggatgctatttatacctacggatgctacaagaagataccacagactaggtggcttaaacaacagagacttattttctcacagttctggaggttaggagtcccagatcaaggtgatttcttccaagacctctctccttggcttgtagatggtgtcttctccctgagtttttcactttgggtgtgcgtgtgtccaaataaggacatcggctatattggattaggacataccctaataacctcattttaacttaattacctctttaaagactctctctccaaatatagctacattttgagatagtgggggttaggacttcaacataagatttttgaggagatatagttcagttcataacaatactttaaaattatcaaacacttgcaccagtaatttattttctaataacatatctgaaggaaagaattaggaatatagataaagaattaagcacaaagaggattatcttaggcattatttactcaatggagacaaatgtaggggaaatcccactgaattccaaccagtgggtcatggttaagcaaattagagtaaattaattcagtggtatattgtgcagtcattaagatgtttttgaaataataatctggataaattctatctgcattacatggaaaaaggatttaacatcactgtattcaatagtgattgtgtacacttacacataaccatamctttatatatatatgcacaaaagaacaaaaaaatgaaatattaatattgattatattttttggcacttttgtatatttcaggtcttctgtaatgagtattagtagaaaaataaaatgaaagctttagatctatgttaaagtagtaatctcgatttataagatcagatttattgcactgatgtctgttagtttgaagactctctgtgacattcatgaatttctcagagcagtaaggtttattcccaaaagtgaaatatgaagctagggttgaaagttattctcggtgtggttgaataatgctgctccttacgtatttgttattatcctcttcatgctggcataaataattgaatgaaagtgtcaccaaaacatatggtttgtttttcaattcataaagacccaagtaggatgctggaacttttatccccactagctagccagtaaccagtaactgatgagatacgaaaaagttttcttcttacctcactgacatctccttcttgtttttcttcacttctttgttgattatttctcctctcatccctagatatttcagtgcccagagctcaaactctctttctttcttttaaaatagtcactacattggttatctcgttatctccttacttttaatactatctttagattgaagattcctttatatttctagcctgcattactgtctctctatctatatattgaaatatatacatatatctctctctatatatagatatctatctatatataggctatatgtttcttatgttcacttacccaaaacagagttataattggagtcaacaattatagaagtttttcttgaggcattatatagtcctctcttactatctgccttcttcttccatttttctatttctttggtgctcgaagcatcttatttcaggcactgtattgaatgctactcagaggtgaataaaatctagcaaaataagtagtctaaaatcgtttattaaaatagatacaaattttgtttaataagtaaatcataggcttcttagaaaataagcatgtgtttgaccggtaaaagtgccttaagaatggcagttctgaaattattgcccaggaatatcttcacttggtagtttaatattcttctagtactaattggaaattctgacttcagtaggggatttaaactggcaaacatgtttatactggttaatgaagcatgaagcagttatttccagtatattttaagcaggtgttccataactgctgtttatttttgccatttttgaaaatgttgaactatcctaattacataaatattttgtactcatttttcctgagcaatttttgaagaccagaaaatattacaaatcagaaaacttatgctaggtgaaaattaaaaggaaaggcagttaaagacagccaattagccaattattagacttgtttttaagaattatagcaaatttgttctaaatgcatgacacatacaaggtgctcaccataaaaaaaaatacaatgagaataagctataatgtatattaagaatttgcaatgctttttgtgaagtaatttatttaagcttcagaagcaccctgtcaggtatacattatattttatcatccattcatagatgagggaattgaggcacatggaagcataagaaacctattcacagttccacaactgaatggtagaactagagactgaacctatgcaattgccagagagctcttttagtagaatttttttgaataaggaaataaaagaaaatcattgacttattttccttgtagacaatgaaaataactaaataatatatgggttttgataatttttttttcttgcatgagcttcacaatctcagtcactcgtttgtttcacatttattgtctgtgccacttgccacattgaaatttatgtgacataggccttgccaagaagttctcacattgttttgaagaagactgaaataccaataaataataataatactcttttgaaggaagaacagttaaggcgttttaatgatcagtgtgagttgatcatatttgcctttaggtgaatcagtctagctttcagtgtggaccatggatttaatgaaaagatgggaggcaaggtctctgggactgggtttagaaagttggaagacaggtgatgaagactaggagggaggatgagcttgaattgatttaggagataaaacacatatgatttgggagttgactttatgtgtatgtttacttgtttatagcataagttgagggtaaatactaaactcacttttggattatttgaggtcttgtgcctgtggatcactgcaaaagttgaagattagtaaagggtctgggatggagataaagaatttttgaatcatcaggatatatgtaaataactaaaagcctagggggagagttacccaggaagagtgtgtaaagtggaaagagggtgcaggttagacctttgggattagggcagaaattagagtgaggcaagtgaggcactggcctgaggttcaaaatataaggggctaacaaagactcagtaatctagaaaaacaataataataataaatatatataggcacacacctttttccttttgcctcaggctccaatgtggctcagcatggtactgaacgtagcatggaaaaggcaggcagagatgagaatttagctataagcactatgagaggtgagatgagaaccacaagagcatagtaggggacttccatggaggaaggatagattaatatgtttttctaataatatttcttatgttccaaatacgtttaatttttatacttttggaaattatacttaatgtttgtcttgtctgctggcaccatttttccttctcaagtttacatggctattaagagatgaaatccacttaattagtacaactagcagtcaatctcattcacgctttcatggatagccagctactgggatctgttaaatttgatggagaatatatgtccctccattgacatatcaaattcacaatatgaatttttatttttaagctccaaagtaaataaacttttcaccagatacccagtaagaaagcaatacctgttctacccttgcctcctgttatatgatatttgaaaatactttctcaagcatgagcttgcttttttgattgttgacaattattttcttccaaaaatagacagtagttgagtttctgaaataaaaaaataaaaacagattctttgcaactaaatacctctttcagtatgtgaaaaatgcagtgtttgtatagagcatgcagatatccaactagaaactcaggcatgcaagtcacgtgacctcttttattttcttgtaactgaacttaattctattgtaagtatctgtgagagtggaaacctgtgtgtcacttgtagtattcatttttccctgcttgtccccctcaccccttatttctgcgagctgatacctaagttttatgagggttggtggcaagtgtgggctgtgaggtaagcccagctgatttttcatgccatcttcccactggtcaccatcatggggactttggagtcatctttcattttcattcattagaaccctttctatccctcacttctctactactttgaagccattcttgaaaagatgacagtcattctgatgttccactcaacactggggttcagagaagttcatggttcaatctactctcccagggcttcgtttgtcgagtcacagattctccatctttcatttacccacacctggtatttgtcagccctctgagaatagcctaaggagctgggcattgatcctctttctccaagatctgccaatatctctgggcccttcactttgcttttggtcctcattttgtctctctgtccattaaatatttatatagactgggtgggaaggatgggagtggaggaaaaaagttacttttaatttatcacccatttcctcctaaatccactgtcaatcactgaagtcctttcaatttttctgaaaacgtgacttctaaaattctaagtccaaaagaaacaccctttgtttctctgctttctgtagttatattatttccttcaagaaatgaaaacccagtggcttctctgcctaataggtataaatttctaggtggaatgggaagggatggtagcaaaactacaaccacctcataaagactgattttgaatttgaatttatcatgaatgatgatcatctcctgccctctatccagcaagttctcaaatgaaggctgttggagtggggagagatggcagagtaagttcctatttkggatgggaaagattatagaaaggtaggcgagggcaggcaatgccagaggaaccccatgttgggaagctgggacattacttgcgtgatcctaaaactgagtgccaacttaaatgtagtgcctcagtgcctcacttacttcaccctgttactggcccaaagggcttccactgtcctggaggtaccagccagcctcaagacccagtagtgtctccacaggtgtttaaacttcagtagcaactgcaaaaccgcagtagcgacccagatggatttggatgtccaggttgagtcagaagtacttgctggctcactctgtgggatttcctggtcattacattaacttctgaattgcactaccagtcatgacgcattattgagtgttttggaacacttgataatggtatgattttactgtgaataatatattactaaatatattattattttcctatccccaagttaatttaactcaaaattggtagacatttgaataaagagatcagtttgcctatgacatcttgatttgagaaaaaccccgtattcaactagttctgcaagtaaattatgtaaacataaatggcatacatacattttaaaaacaattttcctgtggcatttgttgagaacattgcaatgaattagaaaaataaaagtttactttgaagtaagtatattttaagtgatcattactgggcaatagctttcttatttctaacaaatgttagatattattaatgtgtaaatttaataattttgcgtgtgtgtcttaggaaaattaaagaaaataacactttaaagaaaatgcgagcttaaaatttcagcagagggaaaaaaattagagagggaaaaatatactgtgaaatgtgactacctagaaatcccttcagagtataaagctcatttacacatattgtagaacttgtaattttgaagttgaggtggagtctttcattgtatgaattctgacatacaacaggtatttattttaaaataataactggctgcttatgcaaaggcattttgggtagaaagtttagagtctagttgtagatttcaagatgggaacagtggaaaatctcaattatgcctctcttgatagctacattcactccatagttttaatgcccatctatgtgtttattaacagccaaatgaatatctccatccaagatcctgtctgtatccagatgattcttatgatagttccacctagatattgtattggtttctgattatgactatgtcaaaaaccgaattattcatgcctattcctgcctggcttttcttttgctatgttggtagcaaaaataatcactttgtcatctaggcaagaaaactcagggcaattcttgacactaaaaatgctattatcaacaacactgtattgtaactaacatagaataaaagaagactcaaatgtataacatacattcatttaatatttttatgccatttgattttcatttctgcatgaaacaatgaatcattatgtcattgtggtacttgccatatttgatcaattctctgatgcatattttatcacagtttcacatctctggaattaagattcattttatagttaatctgataagaaagtttgtatcagtttaattagcagttttttgttgttgttagtatataaaaataacatatcttaaaaatctctgttgtctttggcactataaaataaagcatgtacagagagaaggcagaaaatattttgaccgaagcaaatgttctccaatttttattaatgttgttggtagatgtgatagctttccatagcactggaaattcatgaaaaggaaactctttgaaaataaaaacataggtatatgaacaatagtcctagtaactgcaagattgcagttcaacttagtttaggataattttgtcttgtatttccagaataaaaagcaattcctctgagtgtctgaatcacatcatttttaaggattctcaaatatattattttcctgtcccaaattaatttaactgaaaatattggtagacatttgtatagagagatcaatttgcttatggtatcttgatttgagaaaaaccctgtatgcacctagttctgcaagtaaattatgtaaacataagtggcataaatgttcatgatttgtaaaatatttgtagttctccttccttatgaatttatgatatgtttaatgtacacaaagcatttttgagtatctgatacaaatacctaatttagattatatgattcagtttctcatatattctttccatctctgtgctgagaagcaaatacatttcactcattttttctgaagttctatgatgtagggagtgcatctaacaaaggatttagctgtgtgacacagtgctgtactctgtaacagtatctcaaataatamcggtgataatggtgatgatgaagacaatgaggatggtggatagtgaaccaggctgtttataataactaaattagttgatgaacaactctatgaagcaaatattacttcatgcatttactccttatactccctttcctgctttatttttcttcatagaacatattgccatctaacatactatttttcatattttacttgtttggttgtttagtcattttctccccacgagaatgtaaggtctgtgaagacctattttgttcacaactgtatcttcagctcctgaaatagtgccacacatgtagtaagtatgcaataaataacaattgaatatttactgaaatcttagtgtgtgttaaacactgcttttggtgctgagaatacaactgtgtactttactcttccaaaacttatattctggtggatgagaactattactgttgttttgttaattattatgattataatcctctttttattaatgggaaatacgaagcttggtgaagataagtgaattgctcaatctacacatatataaaaatgtattttgatattcttttgaagaatttttatgtaagttttatctactaacatacacctagatttctgtaagaatacaaagtataccctgaaacagcaagtaaaatatgaagctattgattggtttccgttgtttatatatatatatgaagtatgaactgtgagtattatctcctgaatatttttgggcattaattcaattgctggaaataagttaccttctggagtaatgaacccccttaaagaattaatttattgcatcacacttttcagtatttctgtaacaccactacatataaattatttcactttgaaacttatatagtataaatatttgaatctaaattgtacatatttattaattactaaatattaatggaagatctaacatgttccagccactgtgataagtcatgggaaagggacaaaacggtttttgcccagacagctaagtgggcatttgcacaggtgttaacctcatttcacgatcaagtttcgtcagtacagccttccatgggagttacagctgaagtactgtagcctggtctcagaattcaaggttggcctccctgaggaaccagaatttaaactgaaaataaagatgaaggagggaaggaaggaaggaaaaagaggaatttcacgagagtagaaaacttgtatctgaaagtccgaagatgggggagcatactgattgaagttaagggattgaaacggtgtcagtactgcatggctgaagtcgtagactggagcatgaagaaaagtaccaagagatgatgctgaggacctctccacagagtagtgacaatgatgatgatgataaatatttttttctcgaaaagttctatagtctggttatttcattgagaagtgcatgttatatgttaaaaaggcacattctttgtttgtgatatgctgtaatttagagttttgatatatattagtatccctctttaaaagtatgttttttcctagtgcttcattccacacatggaccagtgttgtcagagatttattctccaggcagaaatatgtaataagatgataattgactaaaaagaagaaaagtgttaactcttaatttcctgaggctgttacaaaaatgctttgctttaattatttatttcagactgattgcaactttctccacatccatgtgacacacaaattaaactcgtttgtaattgtcagccatcagccttgttacttttattttgttcttcactggtttgaaattttaataatggttaagcagggtgctctatttttttaaacaactttatggttaatggaatatagttatctactcagggtttaaactgaactggaaaaaactttcccctgtgtaaggtatgtttcaattagctttatttgcaaaagaagaaaaattttcccttcacagcttccttatctttgaggttgggtttttatgagggcaggcagtggaacccaaagagctcagttgtcagtagagagtttggttaagagagtaagctctagggataatctgcttagctccaattattggttttgccatttactagagtatgaccttgagtaaatttctgattcctttactgtctccatttcctcatctctaaattaagagaataatatctacctgatagagtaaatgagtcaatgtgcatagtattcttaaaatcgtggttggcatatatataaccttatgtaagtattattgcttatcattatcagcatttataagggggatgctccgaggtttctgttactacatatggaagcgcatcatgatagtggatagagaacaatgtatatggaaaaaccatggagaagtactgagcagcaagatactgaggatggtaatggaagacagaatatttcctctactgcccagaaatttcctagtagcatatttctacagaaacagaaagaagagagagagaaacagccacaaaaatttttttgagcactgtcttatatttgcatatggatggattctttttctgtgatttttttttttttttgcctgtatttctcccttctccaaaaagcctcaacatgatgccttggtcttggagaatttttatcataggatagaggtttgtattgtcgtggggaattccactctggccgaagctctcttgtgtgagctcctgcagggctactaactgctaacctgaaatgtgttccctctcttagaatggcccaagagtgaaatatttattctccgtgtctgacaaggaaatttctcttgggagaagaagttgttcttatagactacgtattagtccaagaatattgagaagggatccaaaagatctggaaccaaatagattgaatttgtttacacagaaaatctttgcataatcataaatattaaactggaattgtatgatgtattataggtcaataagtagtatataataaagcagatgtgtgttaagactatttctatgaaaacaaaatatgtatattttaaaagatattaatgaagcatattactgtatttgcaaataagaaacatctttgcatatgggaaaatacagtgctctgaacaaaagaaatcagcaaaattgtctttagagtctaatggtatattttacctttgcaaaacatttatttggtgctcatagcaaataaatatgtgagttttgctgttttcccgaatgggcatacaatggcagctgtctttctaatcgttcccctattcaaacactaatcggtggaacccacgtaaaatgctagaggcctgaataggtagacaatggcagcagcgtttttaatcacagtcctattcatgcactaatcggagtgatgattaaaggacattagagggagcattttgacatctgatcctttgaactgacgtctgtgcaggctgcactccatagagctcacttggccaaactgatttccttaaataaagtgctgtgatttccaatgtaggaaatattacattagagcctattgaaatgattaggaattgaggagcttttctttaggtgggaatgtggtgtatgctgtatactcacaaaagtgagatcattaatattgcatgtactactttgaatatcagggaccacagagaaatagcatgagaaacgccttcctgcagtcatgcacttaaaatgaatatgaacaaaaatgtggaactctgctgtcatagctctccgttattgaagtttatgaattttgaaatatttgtatttttatataacacgataaagatccacacatcctaactgcatttcatatttttgttttcattaagccaggatatttttaatgttacctatcttgaagttgctttaattacaaaaaaaatgtgttataccctatttgcatggtcatgctttgattcagtagtcattagtgagacagaatggaatattttattttctcttttctttcaaatttctaatatctatttagattttactaacctattccccagaatatttcatgtgatttatcctaaaaatgttaatatctattcagcatttgcaaattgaatcagtagttaaaattccaacatcaatatttgaatatggagctccaaatatcaataactgtatatactacatttatgtgtaatgtatgtaggggaagaaaaaccttttcctttaacctcttatgttcagtggctggggcatgtgaattaatctgacagaagacagattgacaggaaaacatgcatacacattgtatttgatgttcatattttaatttatatgtgcacaagaccttcacatgaaagaaatgaagacagaaagaaggagttaaacccaggggcttacataccattttaataaagggagataaatcgtgcagaagtgataacacaaaggaaaaggggtttgggattctaggggtgataaattgtgggaagataaatatatgagggataccaatggaagataagggctattttagcaaggtttgtttgtgcaaatccatcttggtgccaactttctgtatccagtgataaaggattgttctcctcctggtatggaagaagggaggggaacaccttcacaaaaggaaatttatgtctgcttttaggcagatagggagagagcaaagagcaaagagctctttctgcagtttgttgtttcttaagtgctttcagctcaaaatggtccttataccaaggtgacatattttggggtgacattctgaacccctcacatacagcctctttggattgtttcctttgtttattatatttcttatttataggattctttcctagaagataggaatatttatcacaaattctggataaatttgactgtgatgtatacttctgaaggtacctaccacacaaatccacaagtttattggcatagacccttgaagctttctttgtaccacctaactctggccctcattctggccacttgaatctgatggagagaactgaccgaggctggggaaatcagattctctcctagatatctatgacaagagattctttttcattctgggctgtttgagcaggaataaaatgaaagcttggtgctgcagggtggccattttccacttgcaacatgtactgaaaatcagaaaaggccaggctgaggagagagaagatagaggcagtcatagaaaaagaagctgcgcaggtttctcatggctttgtgtagggagagttttgcaactttgtgttttgtgagatactcttggatagactctttttattggcttaaactatgtaaatcatgtttgagatatagacaaccaaaaaatcctaaggagcacagtggtatatgtcaagttttaatgacctagatagaggtgttttatttttatgggatatgttaaaattacgattaagttgtgtgaggcagtagggtataatataatcagctctgactcagagacacatgcccaaactgaaatcgtctctacatttactaacttgatcttgggtgtgattcttcaccttaactagctagctctagtttctttcactgttaaatagaaatcttgataattatggtaatctaactacattattttgagagttaaatgaactgaggaattttaaaagggtataatacaaagtttagcacatggtaaatgctcactaagtagtactttttattattaatattttagttttacctaaatattggtaatgactggtaattggtaattcagatgattaatcatttagctttgatttcttcgaataatattttatcttttagtaataaattacagatatcatttgaagtcttttgtgatagttcttgttatcaagatagtatgttatcaagagtgtatgtgagaacccttcctttatggcctactgtggccccatttgtcaaggtatttaatgccgttgactccatttagattctgacaacttttacactttttgtttctcttcttcaattgttttcttcaaagatttatggttttcatgatataaatagtttaactccttggaaacatttgttcttaattatatattttttagctacttgtaaatgggattgttttcttgatttcttttttttttgggtggtttattgttaatgtgtagatatgttactgaatttagtatgttgattttgtattttgtaaatttacagaatttgtttattagtttgaactatttttggtgttggctttcgggttttctatacataagaccatgtcacctgcaaacacacaactgaaccttttcctttacgttttggatgccttttatttctttctcttgcctaattgctctggctaagactttcagtactatgtaaaatagaaatggtaaaagtgggtatccttgtctcgttcctgatcttagaggaaaagctttcagctcttcaccattgaatatgatgttcgttgtgagcttgtgatacatggcttttattgtgttcacgtacattttttctacacctaatgattacagtatttgtataatgaaaggatattcagttttgtccaatgttttttcctgcatcaatwgagatgatcctatggtttttgtcctttattctattaatgtggtatatcacacttattgatttgtgtatgttgaaccatccttgcatcctgggggtaaataatgcttgattatggtgaatggtccttttaatgtgctgttgagtttggtttgttagtgttttgttgagtagttaattttgctttttcatttacctaaaggcttctacaactcaaatctttccttcatttcaaagcagttttcttctcgtatcaacagtggcataacccacaattattcatatggttcttccttttttgagtacataagacagaagatgtagaggagtgttcactgcagactgaacggttggttatgagaactgaggtccagagttaggacagagtttagaactacgtgagctcttaataccaatatcagactgacagaagcaggcactcgtttaataaatttattgtgtttatgtttgagatatggaggttctctaaagtgaccctctgttatccatgtctaatgacagtattgaactctaatattctcctatctgatgtctctgcctctccccttgtcctcagacattaaaaaaaatgcaactgtattattattttgaaacctaaaatagattatgttttccattgtcttcctgtgtcactcagaataaaacctggtcctattatagcctacaagcccctatcctcatctcctgctgcttgttttcccaggctcctagtcactgtcttctggcttccttgatttttcatgaacacttcctgcggccttctgcctcaaggcatttgcactaccttttctttatgttgttttatatacatactgcacttccttactttcatcacatgctagctactcagtgtgaattttcctaacacgcaacatcatatgtaacattcatcatccagcattccttattactcctaaccacattttatttattactcctgactacattttattttctctacagaatttattatcatctctatctttactgttttgcctaatgcctctttccgtctctagggttcaagtttcctgagagcagtagcttagtcagttttgttcacaactgtaacttcagggtctacaacaatacctggcacctcgtggctacttaaatgaatgaaacaaagattccagagactaaactatgctactatctcaaatctaatcaatgatataaaaaatacagtcacacaatataaaaattgaagttcacatttaaagtttggtttttcaaattcatttgcttctttaaacacatccatcagtatctgttgtcatacctctaactcattaacagaaggccagtaaagaagctgtcttgtggaagccatgcttagccaccacatgagtaattgctctgcacgagccgtcctgtggcatctctcaactgaaccgaaagtcttccacttcaaagtctatggcaaggtggttaggagaatgaatggaaaatagaggtttattttagatatacttttggaattagtttttgaggatttatcccaatgctaagtaaggaagttatctgtctgtggccatgtaactgcatgcatttccatctcttctattatcaaattagagaaaacctcacaatatagtaaactcttcttaattcaaagataatttgagttactagagggtagggaattgtgtcttagtcttctttgtttcacctatgtgtatataaccacttatagctcaatagttcaatgaataatgaaaaaatagaagttgtattgtatatattaatttcaaatatatgccagtgttgatattttcaattcatttaggtacttgtttgtattaggcttcttttaaaaacctggggttttaggcagagacatttagggcatggttcgatcagaattgctgttgctcagtcttcatggtctgcccatacagttctgccaattacatattcatagtataattggcacataattgttattgatctttacgctcatttgagatctacctcttatactgttaaacacacacatttactgttatttttagaaaaaaatttactgcctatatattgtgagaagaatggaactgtgtggttaatcagagggtgaaggaggatggcttgaaggaacagaacaagatgcaataagaaaatgtagatggaaagtctatggtaacttttccatcacataaatgaatgaatacccagtattgaataaatcatggattttaggtcttaacattccatattctttgaaataaattattttcaaatatccccagagatatttccatattttcagaaatattatcttagaacaaccacaagcacagagtatatagaagcttgagaacacctgtggtgagaaaaattaaatgcatctcatatggttcagtcaacaagcttactctgcttgttagagctgtttattttaaatttcctataaaatccaaataataggcagacaagtctttacctgaccaacttgttgtgtaagttgtcttatactgtttgattctcaaaccccctggtgagaatgtcccaaagcctatggaagaagcagacacatacaaggcagtagacattttttccctctccttctgcagcaatatttcctcctctacaaacacatagcctaggtttgttacttcaaaaaaaaaagtgaaagtatgttattacaactagaagcattcacagatataaccagctaaataaatctcttgccctcacctagaatcaggcttcaaaaacactatccattctctagaaatgccaggctctcatatcttactcttaaagccaccataatgtggctttcacctcctctgcaccggtgaaactgctgttatgaaggtttcaaatgacctctttgttactattaataaatctggtgaacatatttccaggtgtttccttaccagaacttcgtataatttggcactgtggataccttccttctcgaagtatttttcttcttagaacagcttctcgagtcgccatcctcactattcagtattccttctgcccatctcttccttggcctcagtttttatctaacatctgtcttaagctttctcttatcaagatttattatctacagaggtgtggggggaggaggggagagagagagaaaaaagagagagatgcctactagacttctttcagatgtaacttcctttcttccaaatcaattccactccttagtggcctagagtcatctctttgactcaggcctgaaaacaatcaccattcaaatatgtttactgaatccaatcttgaccttcaggcttcaactaagatttcataccttctggaaaatgaatctttcccaggcccccagccccctgagcctccctctaatatagcccactctgcccgcttctgcttttctttgtccttttttctttcaattaatcaatctctgttgagggcttattaagtgcctagcactgccttaacatttggaaaataacaaaacagaccaaaagttttgcttcatgggactctcattctagtcacggaaagacagacaacagacacttataaataatcacattatacagttttaaaacttacttatattgtattaatattgctcgtttacttgtcttttttcccaaggatataagttcctttacctactaagttcctggcattttattgtgtgcttaaaaatatttattgactctagaatctccctttcacacgaaatcagtgagtgctcttgccaaattaggctggtctgtattccagggttttatataaattagctttagtccaatgtcaccttcatgctttattaagactctagagataagttgcctctggacagatctatattactgtgttacatgcattaattattttatttttattctagtttgaagggttttttaaaattggttgctctccaatattatatataattatatatcacattgtaacttagcgttataatgaattgttcatcgtataaagacttctagaaaagtcttctgctagttgttacatacaaggcagaatttaactgatttgtgggcagtacatattgatctattccattaattttaatgaatgcataatattctataatatacatatgtaattatatatttaatcatctttttctaaggacatttactacttctgagtctttaccattgcaaatcatgtgaccgtaaacctctctgtatatatcttcttatgtatatatctgcatggttctctaatatagcttcctagaagtggaattgttggtttaaacagtgaatgctgacaaattattctctagaaaggcattaccaatttataatctcccaaatagtaactgctgtttcccttccctttttcagacctttactttatagatataaatgctgttatgtgtgtgtaattttttcatattctgatgatcatatggcatttctttatcaaagaaaggggagggtaacctctgaatctgtggcctaggtcatgttcctctgctggatgccctcaatgcataccatatcacattttatcctaatgattaatatcattattattatatttcactattatcatttcttgctttaacagtcataacttcttgagtaaaatatatcactaagattaaaaaaataatgattacagcttggataggtcttgggtataaacattttctcattttattttttgaaaagtatttttcgtattacagttttgcctagtagatattcgagattgatgtgatgattttgtccaaatgggcatgtttttcctgttgctatatttgttatcattttctcattcacttacatggtagtgagaaagtatagaataattgccttttttgaattgactataaaatgtttttaatttgatataatattaggtcattattttttaatgttctaatgtttattgagagtaaagtatatcccctaactgtgggatattatgtttgacatataccaattaatttgagtttttgagttacattgtttaaacaatactgtcaggtctctgtttgaacaagtcatatcacacagtgtgcacagtgtagataaggaagatgaacaataaagaaataaacaaatagacaaaattttagatactggtgaatataaaatagrgagaagtaagagttgttgactggtcagggaatttaggttggatagtctccaaagaggtatcttttgtcatacttgggtagtatattattgtggcttttctttttgcttatttaatatattttttctctatgcttttctctttaattggatttctcagcttgtgtctggcttgtttctccttagtgtatgtttgaatttaaatataattccaggtgaaaaatgtagtctattattgatgactggaaaccatttaaactcataataataaatgataaatttgtttctatcaagtgttaaatgcttttatgagtttgtttttaaatctttttactgttttctgttttatcgtacatatactctggtatattttattgtcttctgtagtgatttaggaggaaaattcccctttaaaaaataatagtggttatctttaagaccttattaactatgtttaaactgagattgttctaattttctaagtcagtgattaaataatagtaaggattttaggatctacacttctattcatgaatattttcattgttttgcatttcttactttatgacatctttgttttatttacatttatacatttctcctggtacatatgtggaaaagagtctttagagtgtagggggtcatagaggctgcaaatgtagaacattgtagcagaatgtcaaattgtttatgctatttatacttccacagcaacattttagaaataatcttaatccctttccgcattgtctccaacaattagtattgtcatcctctaaattttggttcacgttggggtgtaaaattatatctcaatacattcataatttgacttttcccaaattactagtaagggatgaatctaatgagtttgaacatcgttttatgcttagggctttgcatgtttctcttgtgtgccataactccatgtcttatgtccatttttttgttgttatattgtctttttattattgatattgaagagcactttatataacaaattatataatttttacctttatgtgttgcaaatatcttccctcagtttgtggcatatcttttcactctttttaaattttgatgaataaatgttcttatttttaatttggttgaatttatcacccttttattttacagttatttttttttgtttaaaattcattgaagttatatctcaaaatgacattttcccactacttttgtgtaaaacttggtaagtctttacaatgatacaaagtctttttttcttcctgagttaaggagcatcttcttttgctatactcagcttactgtttctgcatcatttgttatgttttattcttttaagatatccactatccatgtattgaatttcttttactagtacaaaatagttatcattttcccttaatttattttatgtctattttttgcggtgtattttgagaaatgatctcaaattgatctgtgatactagtaaattgtctttctgtctgtaacgtcagttctattttctaatgcttacaaaggatttatgtttctattattgcattttagttttctataagtgcctttctctcatcccatcctcatcttatttagctagattttatctcaaaagatatataaaccttaaaaaatgttgtcctgatctcttttttaagtcccttctttttttttaccctgtagctttttatcgtttgagaggacaaaacattttctttgtgtattaaatatctttagagtaatgctttccaatgtttcatataatgtgatttttttaattactagagttgtttttatatggcttttgttttcagtattttaggttagaaatagttttagccattttctgttaactgactttgtatctattatttcagttgcaaatttcagtttctggtttgtcatttgtatggaatgtcgttgtgcactgagaatgtcactggttatattttatttttaacttaaagatttgtccagtactcaggtgcctcatatttactggaatttgtgtatttaattttttactttgtgcataattctctgctatgtgttggtttccactatagatatgttttatttcatttgttttagaaaatttcataataccttaataccttatgtcccacagtaagctaattttatgtttttctcttttatactttttagtacaaatatggtttgcatctctttgtaattgttttcccgtagtaagtaagatatgtttaaatgtgatctcaaaaaatgtttagaattttatttatctgtgtagagacagggtcttgttcttgggctcaagtgatcctcccatctcagcttctggggtagctgggactataggagtgcatcaccacacccagctaatttttgtatttttagtagagacagggtttcgttatgctgcccagactgttctcaaactcttggactcaagtgatcggcctgccttggcctcccaaagtgctgggattatagccgtgagccaccgcacccagcctaatatttagaatttttatctcccatacttatgaaaatctgaggtatctcgtttgatctatcagagaaaaatatggaaaaatatcaaatggttacaaatatttatattcataatgagccaccacacccagcctaatatttagaatttctatctcccatatttatgaaaatctgaggaaaaattattaaattgttacaaatatttatattcatagtggaacatatctttgtcatttatatctttgtttacatttataatgagtaaatacgtgagtatttatttttatttttactattattaaataatgagtaaaagaaaggttttgcatactagtatactaaagagacttagagaaaggaatccttgtcgttgcttgtcttgctggagcctgttgacttcagtagtgatagcaccatgttcaagagaccaaagaagagacctggagctagtgaaggacacatagggtttaccaagagaacttacatatagggtggtccagtggtggtgggctgtacaggagaactgctaccgcttgtaaaaaacatgcagtttatatagcattttcacttagcgttctccccttagcatcctccatctgacaacttttaacccgaaacaaagggccttgatcccctgtacagcccatgttccccatgaggggccaggttcagatgttctttatagataaggaatgaatctccaggttgatcattcctggattccttagctcagaactccaaataaatattagttattgctttcagatgcatctgccatacgctgctctttattgaaaagggtggtgaatggtgttgctagacaacacaatcataccatagagattcttttttttaagcttacatattttatatttaaaaagagtattgcttagagttatttgtgtaataggcaaacagacagaaatcttaaagctgaagaataaaacataacacagaaaaatcacttatttttaagaacaaagaaggaaatgattcaaaaaggagggaaattatcaaaaattaccactagaaataacagaggagaaaaagttgagtaaaaatttgaaaaccgagtaaaattaagtagtagttaaattaagttctatgaattgtaaattcatagaactgtaacatgacatgttatgctgaatcaaaattaagtactactgctacataatatttgtcaaacacattctgcatttgggattaaagatttcatgtatatattcattaagcatatattatgactactattaaaattgttttgacagtagcaaagatttgataatacttaattgaatgaagtactaggtagtaatgcctattttttccccaaaggcttgtatgtttacgtagtttcattttttttaaaccagtttattttggtaaatatattagtatcataacttgattaaatttagtctttggtatacagaaataaagtttgagtttcaagcatcttaactgaagatttccctgacaaaattctgattacagccaatgttaatgggactagtcaaacaggaaaaacagatgtactatctttataatatctggaagtagaagaaaggaagcaatttattcatgaaattcacttttaaataagctgcatttattaaaacactatcctagaattgtaatcctatcaaggtttcataattacttaaatagccataacacaataaaacaaaaaatcataattttgaagacacttgttgtgtttctggattattttagcagacttaacaaaaacacttgaattcgtggcctacaaatcaaataagattgaagcaatttagttatgcacttcatatataaataataatctaaagttataaaatattatcttacagattccagtcctatcaagcttccatttgagccactgtataatcacttaatagcagaagaaataaaagggaagaagttaaaattccttaagtaaagagacgagaaaagcattttgctataattctgaatctttagaaacagactcattggaagaggatcaacttatgtttcagaaaaactcccaaaccaacatttgtttttcctctgctctcatacaacacagcaatcattcacacagaagacttgtttgaccaagaagccccatacaccaagcagtagacaccagttgagtctcttcctagtcagactaacattatttacctggagatagtgttagattgcacaagctgaaggctcaggcctcgagactgcacccctttcagacactagtatcaagtcgggtctccagaacttcagaccagctagcttcaaattgagattcccatgaccacctctttgggtttgactaatttgttgaagcagctcacaggactcagagaaacacttgtttacacttgcctgtttcttgtaaatgatattacaaaggatacagatgaagagatgcatagggtgagctacggaagaaggggtgtggarcttccatgccctcgggaacaccaccctccatgaaactgtatgtggtcagctatgtagaagctctctgaatcctctcgttttgggtttttatggaggcttcattacataggcgtgactgattaaaccatggccattggtaatcagcttgtccttcagctccttttcccatccttggaagttgggggatggggctcaaagttccaatcctttaatcatggcttggtctttttggtaaccagccttatcctgatgctatcagtcaacattaatatacaaaaagaaagcactttggagattccaaggattttaggagttgtatgccaggaaacatggaggaagatatatactccatgatagctaggaaattgactcacttctatgtttaggctattttcagtgtatgtcttttaagacatatactccatgatagctaggaaattgactcacttctatttttcaggctatggggtctgaagacaaaatccagtgctggtattgagacccttcttgttgtcaggggaagatgtactgggcaaggcaagtttctgggaaatagggttcttggagaggttcatctttatagaataggaggttggggagaggatcctcttctcagtacctgctactggggatccctttgtaatagctgccgtttaacagaatgaatgataggatagattcagagcaccagaacctgaaccagaaactccacatcagtgggagagttgagcccaaaggaggtctgcagcatctgccaatgccagagataccaggagaaactcagttttgcrcttatggaggacctcctatgtcaggagggagtggtctgttggaaggaccctgcttatgcagtcctgagcctgggctgggtagtgggtggcatccggtccatatcacgcatgaggccttgcatttgcacaccttcacaacttgatactcctccttcatcagagatctggttagccagagtgtgccctggtggtcctcagaagtctctgctaaatgtttcacttggaatatcaaggatattaggatattttttgaaacatgtaaattgttaataatttgtcttatgtgcaggcattttgttttcttacatgattaaggtttcactcacacaacagaactgtcaacctgttatttgagtattttgctcattgaaaataatctggctttgataataggccaatgacctttttttttctaaaaacttttaggcttatattttataggtgtccatctcttcacatgcatgactgatcttttcacctcccttgggaagattctcctctatctttatggggtaaacacagtctaaataggatattttgtgaaaatatatttcatttctttgattcagttcaagaaggacttgaaatttccaccagcaattttgcctctcctttctgtgtgcgttttcctgttagtttgtttctgagtgcggtgaagctttcccagtttgcagacttttaatatgacctcccctctttcagttaatttagtgagcattcatgttttttgaatcaagattttctaaataactcagctccattagtaagattcttcaaaattttgattcatcttctaagatgtctccgtttctgttgcatttttatatccaagttcttagcatccatgtcgtcgtctccaagaacagtagcccagtctctcacctttaacttgtgttcacacagaagcttgatcagacttgtcatattttagaacttgtttcctacacattttagaattttctagcattttattctgcttagtatgtttgctccctcttcccttttccactcttcagcttcttgtgaaagcagctctgtgtttccctgaagattggaatttttatccgaagtgtctttcaatgctgtctgaagttgttcttcattgttctgatgtatttcgaaggctgttttggttgcagctacgtgaattgtgtttcgatgaatctcctaaaaactgaaacattctgtctttaagctaccaacctaaattgttctaaacatttagattttttttggtccttttctgagagtctttaatataagcccaagtaaagagttggggctttctagtgctttattaaagatttccagtttgtgaatttctaataatttgttcttaagtttgtcttctaccaaagttgatttaaggccatttttttttgaatgagacaaatctcataaatatgttttttcttctaaagtgacaaaaactccagtagtctgttctttgtccctacttgcatccagaaatctgcagggacctgtgcctgggcttagggcctctggcagcactaccgtcacctgtcatagcagttccaggaccagcttgacacagagcaccatggccaacaacacgttctctgtgactcccgaggccactgctgagctatctcaggtcgccagaagcctgcctaccactatgaactttcgagaacacacgtatacaattcttctctgaaccgaacaagtgcctggcaatgaggacagacctcagtggaggttgggaaggggaagcaaacagtagaacacagctttcccacctccttcacatcctgacactcagagactataatagaatcacctggcccctgagatatgcaggaggctgaggtgatgggcttagctgatgggatcaaggtcttgtcatacccataaagcattcatggkttctctgttgggaagcataaactgcgttggatttgcatctcctaggcttggccagtgctcctccttctcttaataaacttttcrttctgtggccatggacatctcaccctgctcatgatgggcacaagaatctcctgaccctgtaccctcttttgtttgtatttggctggtcttgaatgtacataagcagggggtatgggagtggtttggaaggctgaaccaagagtttcaacttacttcactaataccagctttcaaaactaaggaagagaagtattcagtagaattttcaaacttttcacgtatcagcaatgtgctatctaagttgattttaaactcttcctgaatgtgataaaatgttttctgacacaaaagcctttctacatgctagtgttcagaatcttaaactgggggcatttgatactgaatagaactctctctgctcccatggtaggagtgttggggcacctgagcttcttcccagtgtagtggatggctctttgaactataaccatgtattacataaatgtattatatgttatttttagctactattgagtatcagattgagaatatgcagtaagctaaataaacttttggaaattgatgtatgatattaaagatgctgcttattaaagtctcaacatctgtaaaaaaatctgcaaatacagatattttcatgaattcctttgcagaaatctcttgtgtttctaaatttatcagagaatcttgcacatctctgtctttgctccaaaatttatttgcatagaggcttgaaaaatcaagaaaaaaaggcaaacaattaaataatatgaatgttttctttttatgtatatattttctggataatagaaatggtgaattggtatttcctttttattctgaagagttaacaatataatcagcagtcaaatgtgtgagcaacagacaggaagatgagacaaagcaatattttaattctgttcctataagaaatgtcttttcattttttttcttatatgagattcttttttggccataagtattttttgcaaggatgagacagatttgcctccacatggactggtttattataacattttcttttaattgtctgagtatagttttgtaaagcaaaacaatactggaaagtgggagaacactatttatgttaactacgcaatcttagacaagtcacttgacttctgtgcattatctgatgatctcttgttatctgatcatgtccttcatgtctacttcctagtaaaagtgttagtctgaagataattgaagatgatgtgtaaaacattttggaaaatactaaattttaaataaactgtagctgttaatttattcatatggtttaatagatttactgaaaatcttcatttgggtaatattctagttatagactctaggccacatgtagtgtaatatgtatcacacttggttaggaacaaaatcagccttaaggttgtgctcagcaatatcataaagactgatgtttatcaagtaagcccacatttggcaacacaagcttaattgtttttatcagagcagttcacctgcttcagaaacttagtatgacaatacccagagagtttattgaatgaagatatgcttaagactgtgcataactgaactaacagcatagaagtttctgaaggattgatttaaatataaatcaataattaattcagtacattgatattgagcgttaattcaggaaactgatattaccatataataaactatgatagaacaagcactgggttatacaacagacatttatacatagaggacagttcctgccctcataatgtttagtgcaggagggagacctacagaatgctacagtaaaacaagagaaacaacttgacacatgcccaagtgctaggatgcccttctgtgcaaccattactcagaatgggctccctgggtatcaggggagacttctgcctagaagtgatgtcatgatacaaaggggtttggatattgacagccaattgattttcaataataaattggtgaagtatccctgagggaaatacatctgaataagtcttgctaaagtagcttccagtgtgccagcttactaaattataatgaggaaaatgtgtatgagtatttgaattgtgacgaacatcattttttgcctgtgtttcagcttcatggggtaacacatcatcattataaatatgttgttgatttaacctgagaaatcatcatccttgaagaagaaaatctattgggagtcaaattgtattcagaaagttgctatatgagcatcagatcagttgaatttgagtaagacgaaaaatagttggcattatacaaagcagtttaacaayggaaatcactgataaaaatgcagtgttcattgctcaatggctacactccacttgtacaatttggataacatcatcattaatacaataagaattactgtaatagattccatgttattatgttttattcttcagtttaaagatgggaaaactgaattttggaaaactaccagctctgtgatgttgaggaggttacttcaactgtctagtcctcartttcctcatttataaaatgaggatgaaagtaatatatactaatattagtaataacagtaaataataactcttatgtatgtgactccttaggtctggcacataataagcactgttatgttataatagcactaatcaggtatgattatcccacctaagagaaaatagaaagtaaattaaaacagaattcaaatgattagtttttaatgtaaggatttctgattttttaaatctaggtaatagctacttgaaatttcctagtgctggtccttgaatgcttgaatggcttaatttccacattctttcatttggtttccttcaggcatcaggtagctgcactttctttttctttctttctttttttttttttttgtaaattgcacagtctctggtatgtctttttttttttctatactttaaactctagggtacatgtgcacaacatgcaggtttgatacataggtatacatgtgtcatgttggtttgctgcactttctgcctggttcaaagatgcaagctttaagcattttcttttttacagtcctggttttcctgaattaaacacaaacacaaacatgtagacaaatgtagacagaaaatcctcatgtatagtgcattataattgatagaaaactttcacatatatttgtttagagcctagagcccagtttcttttttttttttctttgctactgtcaccattagccaaggtagaaatttcaaaagttggcctggtatttgctgagtttggaggactagggttaaatatcatatttggacttcgggacagaaactttctgtaaaatgttatgattatgtagagatttgaaaagactacataggggaggtccgaatgcacctgcatatttaaattataactatattttcttgaatttccgtgatgctgtatgccattcatgtgttttacctttatttgaccttgaccttacatgcactatgtgcatctaggagatttaatacatatagttggtgaaaggaataaagaatgaagtgacatattacactaacataaaaataaggagaatcctaatctgacctcatcataagcaatactttccacttacttatttgaataagagtattaaataaagggcaacagaagtgacatatatatatatatatatatatawggtaattagacaatgataatttatgttccaaaattataaattgttagaaacttatcatagtgtataaaagtctaaatgaaaatgtccttccctatatatttttgtattaatagagattatggctatctgttcttcaaataatatctccttgagcatcattgctttgtgaaatgacaaaatattatgacatatttaacttatgaaagatcctaaagttctgttttaccctcagcttttcatagtatgtgttactgtgttttattacatagacaatttaagaaaccagaggacaattcatttttttctgtgaagtagcaaattggtaaggaatcatgggagataatatatcatattcttaaaaaggacatgtgttttaaaaatcaccattgatttgatttttaatatatcatttatagaacagatggtggagttatagttataagcaatgaagtacaaaaatcaccttgctggatggttttttgtaggcaatttgctcgatcaaattaagttggaaaaaatcggtgaccgaattctatagatgacactattggtagttttatttttactgtgatctcctgtgtttttatctgtcatgattgcacagcaccctttatattcttcttcttctcatttttccttctattcagtcactggcattctgaggctgatattttagatatttaaaaccggattctactccagaaaatccatttgttttaaagaattcatatgagataaaaggactgttgaatcaaaggaccaaatagttcattaagaagcattgtaaaagtgaataatgtactaataaaaagtttcatacttcattttcatatctaagaatttagttaagcatatcttaatttatttctttaattaatacctactttagaagttaagtaacagagaaaattagagatttaacctacattttaccatttgcaagaaaggtacaaaaatattctataccagctgtaatcatgcatgactttaatcagatatttggagacctatttcaattgcctgcggtgttagctattcaaactcaaaatattctgtaagattcccttataacttgagaaacagatgactcatttcccttagacagctcagcttgtgcaattttagctgtggagaatgagctgtccattattttttatcaccattctctgctgaatgcatttgctctttcttcctttccattgcttgtgtttgtttatctaatttggattattagcatgccataatggtctataattttttcccctcagtcatttacttctcaggcaggaaatttcttagtgctcctgaggacaacaacaacatgtgatattttgtttttgttaaagtcacaaaattaaaagtttagaagacactcatgtcttcaggaaaagctctattcaaacactgctgaggaatattggccagtattgtttcctgtaattttgtagaaataaaatttgtaaatttgtagaaataaagatagaactgatctttgtgatgaatggcaagtgtggcaaacttaaaattaatcaaatatcttcctttatttttatcattattattaaggttctttgaaaattatgaaagataatacagttcttatttgtggagtgcttggagtgtgctggttctggtgccaaacttctaaggttcacatctaggctctgtcagtttctactcaggaaacctaggcaagtcatttaagctccgggcttccgttttctcagctggcgaaaaaaaaaaaaatgaatgtagaaatggctcttttacagggctgttgaagtgtttacaaattaagacatataaagcacttgcttagaacaatgccatatatagagtaagaactcagtaagagttaactactaaaggatttttagtgtacagaattcaggaaatacatatacatagaacaaaagcaaatagaatcacttgaaatcctaccacctagaaataagtcaataacattttgaagtgtgttcatttaatcttattctatatgtctatatttttatttaaaaatgagattgtagtgtatattcctagtttgtaactttgttcatttaaaataatatgcaaatgttttgcataatcttgtattatactacacattatttaagtgacttcagtatcacaataatatggtaattyggttatctaatgctctagagctaatcattaaatttttatacagggctttttttgtttgttttgttttttgctatcataaccaatgcctcaattggtgtaattgtaatcactatcatttcacgtatttaagagtatttccttaggatatatacagattttctttctaatatttagatttcagtcattacttacaactcagacaagcttaaattgatccaatttcaaatgtttggagacatatgactcctaatctccttataatacacagaaaaaaatcccgaaacctttcttcattgttttcctctgaaaacctttgttctttatttgagcttctctaaaacaagtgtaatactcaagatgctggttaatggtgccatgcagagggagattctgcttatacttaattatacaacataatctttcctttataagtgtgatgcaatagcactgattcatatcaaattaagcattattgtatataataattgtgcttgatattttcatgctagatacgcataaaagaaaactaatacatctgttgccctaataacataaaatataattgcatttcacagtccaacttcctgaatactctaaagtaacactttcacatcctcttaaaagatgaactgaatttacttcacttcactcaatatgacatttttggaaaatagtcactaaaagtttcttaaatgtttttaaatagaagtggtatttgtgcagcctgcaatcccagcacttttggaagccgaggtgggtggatcacgaggtcaggagattgagaccatcctggctaacacggtgaaaccccgtctctactaaaaatacaaaaagttagccggccgtggtggcaggcgcctatagttggaggtactagggaggctgaggcaggagaatggcatgaacccgggaggcggagcttgcagtgagccaagatcacgccactgcactccagcctgggtgatagagcgagactccgtctcaaaaaaaaagaagtgatattttctcttgttcgttagaggggtataacaattttcattaacattgaatattttaatattttaaatgctatattttcaccttagtttcctattattgtatgttctttgtgggtttcaccatttatgaatataaaacaatcatgtgctttgcattcacatagcccatccttttatttttaaattctggcatttgatatagagatatagcttgtgtatgacagagtaagctttatttggttatttttgattctgagaatcttttcctttaatagaaaagtttaaccttatttttaatttacatatttggacttgcattcaaatgctgtattagctcgcagcccacccctacaatgtatatagtatttctttcttttgttgtttttgctgaaattttaagtttttctcctgattaatgtcatacactatattttaattctgtaagtacttaatattaaattttaaacataattgaattgttttttataattgtcaataagtatcagagtcaataaatagagtcaggctccattgagtcccttcatttaagcagataaaattagcatgcctttattccctgcctgacaataccttctgttattttgttagaatatgcctgtgtttgaaatgtgttctactttttattttttggcactaggaatcctttttcaaagaatgattttaaatatttttattaagcttcataggtatgttgaagacataataccatttgcttaagtttgtaacacttttatttttcatttattttcagtttgtatgttacatattccttctatttaagaaattatgtaaatggagagagtttttgtttgagtaattatttgacgtgtttttgtagagattatattcttattctttagcagtcactgtattccaaatttattttgtggttcctgggaagaaagacagttattttgaggaaaaatataaaactccatgtccagttctaaattcacatagtccagttctaaattcacatagtccagttctaaattcatggcaatccgttggaaataaatgactgattcttaggtaaaagttccaaagtgtaagtgggatttgaaggtgaatagctaaaaatgatacctggggcagccatccctccctccactttatggttttgaatttcacaactgaaaagtgctgtttttttgaaaatctgtacttcttactgaatatttctgttatgaaaacatacgatgaactaatgttttattagttgtacattttgagaagttaaacataggtgaacaaataatagtcattaaaaaatagaaagtatgatgtgattgttttcctatgattttaagacaatgatgctacataactatttccctgtaaagacttcatactgtaatttgaataaatgcaaacattatcattgttgaacaaaataaacaaatattgtttcttctttatattcataccaatctcagtacttcacttctaataccagatgtgtggggttttcccaccccaagtaattctccagttctctgaggacaccaactaggtgttctgcaacttaattctgacacgatctacctggatgtagcatcacatcctgggggttatgggctcagtcccacaagacttcccccgagtcagatgccaaacacaagtccaggctgtctcttgtgtctctgaacaactatctataaatcagatgttgcaagagcaccctccttaggttcaatcatttgctggaatggctcagagaactcaggaaaacagtttatttattagattcccagttttttttaaataaaggaatgcaacataggaacaaccaattggaggagatgcatagagcaaggtatggggaaaaaagacacggagcttccatgtcctgtcttggttgtgccaccatcccagtgtcacgtgatccttgaggtgtcacttcaccagccggaaacctctgtgttcaacaacgccttctgcctgagtattgcccatgccacctgggctcattctgcccactcggcccagcaggctgttctcggctcgcaccaccagtctggatcccatacctgcccagggcaagccagttgcagagtggcaagaggtgtgtgagtgagtgagtgtggggtccacccattgcacacagccagggatgcttgctgctgcagcagggtgggcagctccaggcactggtacaggtcccggctccatgtgaggctgcagctggatcagatgtaccacatgcggcatctgctgtatgcacccacacgtggatgaggggaatgtgatggtgcccggaagcttggaaatgtcaggagccacagagccccaaagaggatgtgacagccctggatcaggtaacccctaggtctggcctccctgaagggccacagctctcctctccttcatgtctcccacaacctggcgagcagtaggaggattctgtttcagccctatttttgttactgctctttcattcccaccatttggtgggtcctgagttcttgtcccatgtccaggaagaatgaggtacgcaggctactggagggagagcaaggtagaaaggagcttcactgtgtgacagaacagtactcgagagacccatagtggttagcagctttccacaggcaggtcgtcctaatgagtgtccagctctcagcagaaaggagacctggagtgggtagcttctttctgtaggcaggtcgtcccaactagtggtgaagacccaaattgggtagctcctttccacagctggttgtcctgatgtctctgagtctggctgagtccagagtttgtatgggcttcagaagggagtaagtgtgtgctgattggtctataggtggctgtgggcaggtccagaaaaagcactgtaagttctaactccagggactccacctggaactgacagtccagccctcatgcttcaggaagtccctggcttgaaggtggggcttcactggggacccgcccctttccatgcttgaggctgtctgcgtattgctgccattgatcaggtaatctacagtgcccaggctatttgtgccaagagtgcctgcaggcccatgctgagcacccctcagcaccccctgctttccactgttgttcatcggtacccaaagtccagaggggcacaaggtgagagacagctggcctgtcagcactgctgcaaatgtgtgcacacccagccaggttgcgacagcacctgggctcaggcacaactttgctccaaaatcagagcaggtgcctgggtggggagagaccaggtagtgggagcaggcacttctgagactgcaggggcagtggggggtttcccaggcccctgagaaggcagggttgcccaggtctggagccacagctgggtggctgcagccgcacccaagagggcaaggctcccaccctgccaactcagaagtgtgtggggctcccacctgtacctggctcctgctggccctatggagggtgtagcgctggccatgcttcctccagccatacctccccagctgcagctggtgtcttcacagcagccactccagatagaccaccgctgttatcaccagcacctccacatgttcactgacccaaagctctgtgagcccctttcttttgtttttataagggttacattatgtaggcatgattgatcaaattattggtcatttttaactcaaacttcagcccctctcccttctcctaggataggggatggggctaaaagttccaactctgtaatcacacggttgattgactggcaaccagcccccattctgaagctgtacaggagcctccaggcatcagtcatctcatcagcatacaaaaagacacttacgacttctgagattacaaagcttataggagctgtgtgccagaaaacagggatgaaaaccaaaatatgtattttttattatattgcagtatcaccatggtttggcaagattctctgtgatctgaaacctgtctcctatttttccttctaccattatgtaccttattatcatattttaggcatactgactctcttttagggtctttgcagttcctttccctttgttaagatcttgaaaatgtcttccctgaccattctgtttgtaatagatctttatttccctatcactttattctcctttctttccctgtagtgtttaacactatctgataaactctgatagtatctgaggttatcacatagtgttaaatgtaaacatttgaagtatgtatattttttcatattttaaaaagatattttaagtatatatttgtatcatctctcccctattcattaaaatgtaagcttatgagggcagatgcctagaatatttagaataaatatttagaataaactctaaaagtattgtaaatttttttctaggaaattcatacagatcaaattcatacaaatgctgtacatatgaaaataattatggagggtttagagtattgcttactaaattaatgaacatttgacttcttatggaaagaaacatgagtatcctttaggtattccatcaaacaaggtcagtctgattgaatgctataaataagtgttaaagaaaaccaagttcacatttctaacttgtctaggaaaataaaatttctcacacagtcaatattgtaatgtccactggggattgttcagaaggctccatagatgatggctttgggccagacaatcagattatgctaagggaagttaagataaaatcctgttgcctatactgaagagaaacatattatttgctatgaggtaaaatagcctcttctactaaatctgaatgttctagtgagttgaagtgttatttatattcaaaagaacatatagataggtgtaggggtgagttattgctatagtgagaagctgtaaagcaatattttgttgattatggtaaaaattggttaaatgcattgggtaacttttccaattttaagctcaattaataagaagggaaattgagaccctgagtaggttttctgagataggcgtctgtataaattgagacttaagagaagtcaggatgatgaaggaaggctaaaagattggattgttcaggcttgagactagaagagtggggagttaataacagtctttaaggatgaagggttcttataagagaaagaagactagctgttttccatctccagtgagtacagaacaagaagatgggatttaacaaatatttattgaacatctccaccaagtgcagaacaagaggatgggaagtataagtgctttagatgagaactaaaaaatgtactaagatgaagattttaaatccttgagaggttatgaattttgttttttagagatcttttaaacaatatagattttctcttcataactttataaataggcactagtgtcaattcaccttaacaaacgtttattgcattcttaaagccccttccagtttaatgatttcagcaatgtgtcagtgaatagagggctgataactttgtagaactagtcaacatttaagctgtttaaaataataatcgtgatgttagttataataattaatgaaatcagtagaagagtaaaaggtattaatagttgcatttagtagaatcattatgcaacataagttcctgtatgaattgtagaaagcattgaaatatttggattactcaattgtattaaaatgtcttctgatagaaataaatatatattagtgagagagaaaatcaacttgaatgccacctagtatgatcttcctttgaaagaccatttgaaaattaagctctagaatattttcctctctgcaattaacatatgcactgacaatttaattttattatacttgttattctattgatgattgtagccaatatttaattattctaacaaggataacaatatagctattcagttcaagttgaaatatttaatatgtttgataaaaatgttactttatatatcgccaaagttgattaaaaataaaattaaaatatgcttaacatctttccctgtgtagcaagtcagtttttaagaattttatcaacaagggactacatatcaaattttccagtgaaattccactaatagtaaaaaaagaagcctctgactactagagaagatccaggcccttagcccacaaaaggcaatatctatgaagtctttatttaattttaataataatgcaaatttttattctacatataatatattttttatttattccttgaacttctagaatgggtcagactctgtttaagcccttcagatacagtrgtgaatgaaatacaggaaaatttcttgtctcctagagattgcattctattttaataaaattaataataaaaacaaacaaaaaataagcataatgttgagtatgttagattcctataagatttgctcattttgacattaaaatgatatatgaattttccatatctgggaacaaacattttttttttcccctgctactccctttaggtaaattggtgggatactgtttctatgatcctgtcaggttcaggaaactggtttaaattaaatacttatgtcagatattcatttcagcaatgaggcgattatcattcttgagctgtcatagcattgaagattgcatacagtcatgtggggagagatgccatcagtttcctttttcactgcttgtaaaatacatcaacataatcactagtaagagatactcagaattaagtcaaagaagcagtacagtgcaatatttccaggctgtgttgatagaaattttgataagtatattttttgatgacaagttaagccacttgtggattatgatgagatgaaagggtcactaatcttttggtcaatcttctcttgtctctgtgataatctcataaaaggatcagttcagggaataatgatgagtgataatgccattaattttaaaactgatactgtaattttcatcacatgtaaattatctgagccttgcaatctacataatcaactctcttcattcaattttcaaatttcattttcattgcagcattttggtcatgtaccataaatatactgtttctttacattttttaaaaaatgaatcatgcccaaagttgtaagaatactttaatgggccaaatgtgcaaatgtctgtgttagggtgaacaattaacttaagttgttttacttgtagtttttaacctctgatacagcatcattttttcttcatggagaaaaattcttacacctacactttcttccagtgaaggtcagaagagcaaactgtccacattcatgcccatttgattaaaatggactaaaagttataattttggaaacttcgtatgtatataattcaactgttttatcactgaaataaacctattgagaaaaaataaactcttggagacaaagtataatttgagagtgaggctgttgttccttgaatttggaaagtggccaggcctagatgcagtgaaatcccctcatgcttctgcctttcatggatttcacatcatttgtgcacataactccattcatttttccaattaatgtcatattttttaataattaaaaagaaataagacaaaaaacttaccctactgatgttttcttcacatattttaattttaaatatttgggaaatgaagacatcataaaaaataatgggatgaaatggtgaatgtggcaaagaataaggaatattgttgatattcatcctttaatcccagaaaaatacagtatctagttaacctccattttcaaccagttattcagaaattatttctatgtattacattttatggtttagacttagatgaataacaaccccattttccgcttggatgcttcactttggcccaaagcagattcaaccaaaatattacagcactgggcttaaaaaattactcctatttcgttgattaagggagagggtgttctgggtttttttttgtcgtgcatttaaaaaaacactttataattttcaatactttattgttgtctcctgatttatattttgatgctatacattttcctctaaaaatccactatagctttatctcaaacattatgtcattttttggttattcttaatatcctttaaagagaaacaacaaactattgtgtggccaaagttactctacacaagtgaagggaaaattattgagaatatatttatgacataaatgacaaaaatggcaaaggatatgaataggcaatatctaaaaataaaatgtaaatagccgataaacacatgaaaagatgctccacctcattagtatccagggaattataaaatgcttttcagtctccaactggcatatgtaggagattaataatgtctagcactggcaaagtttcaggcaactaagctctttcatacattgctagtggattgtgaattactacaaacttgtggtgaattgtctagtaatgtatatcaaaatggttaaaaaaagatcctgtcattttcaccataatttatcccctagtaagagaagtcaccatcacacatgtacaaggatatattatagcattattcctaacagcaaaattctagggaaataaaactatgattccatcattaagaaaattgttaagtaaaatatgtaatattgagaagtttttggaattttatagtcatatttattgacctggtggtagatccacctgtttgtggtacacacacacacacacacaaagaattgctgactgatgtttttaagtaagtagaccccactgagaaacaagaagtacacacacataccccacacaaaaaactgcaacataaaacgtgttgtgtgagcatggaaaactatagaaaggtagtaatctagctcactggagtagaattagatgttaggttggagacagaaaattattgttacataactttgtattcagttcttataaaagggcatatattacttttgtaattgaatatattaagatttgaagttaaaaaattaaaccatttacaatatgcgtaattttcaacatgctttatatattggggagtatactgtgaaaggaaggaaggttaatagtatgtttgttactaaaacgttttttaaaggaagtggttttggaaagaagtggatgtattttgtaggagaaagttttgtttgctggttggtttaaccaaggtgtaaggaagtctgatttaaggctataaacttatttttcagaaaattgattcatgaggatctgcggaaatcacggattctagttcctatagtccctgttgttctagcattggccctgttcatttgatgtgattgaaaagtttatgttaacttcagtagtaatactcaagttcttttatttwtttatttatttttttttttgagacggagtctcgctctgtcgcccaggccggactgcggactgcagtggcgcaatctcggctcactgcaagctccgcctcccgggttcacgccattctcctgcctcagcctcccaagtacctgggactacaggcgcccgccaccgcgcccggctaattttttgtatttttagtagagacggggtttcaccttgttagccaggatggtctcgatctcctgacctcatgatccacccgcctcggcctcccaaggtgctgggattacaggcgtgagccaccgcgcccggccaagttcttttatttttaagttacatgactgtttctactccgaggaaacacacaattggaaagaacacaatattgagtaacttgaaaaatctgactctgttgattacagttgatgagcaaaattttaaaacctttttccaaaatagtttccgtgaacctaatgttctaggaaaatatattctgtttttcacttgtctttgaatacccacaactctgagccacataccgttactattatatctggatttatatggtttatataataaacctgagtttgatatgctacagcattaaagtatttagagaactggatttttttatctttgtgaattctgaaatgcttgatagtattagaaacatactaaacaaaatgcttagctaatttattataaagactgctgtctgagacttgtttttaacatgattactgagcttgcataaaaattatatttctggtctaatctgtttaaccagagaaaataaaagcatacttataatttttgatatttggatgaaagtcaaaaaattcttttttattttgtatcttctaaaatgagggtcaaaattttatatacttaataagaaatatagaaaattggatagtatcagatgataagcaacttgatatgtatttcagacatctgtgtttcaagtgtctgtgctgttggaataaaaaatagtgggtgccttagaattctattcagatccctgcttctatttgcctactatctgctatgttagatttttacctaattaatatttttaaaaagtcattatcacattcaagcatttggtttttcaggatggagagtttatgaaaacagagtttatcttttccatattgatctatttattgctaatacttacaattttagaattgataatcacttattattctgggaaatatgaattatttattcggttccaaacttttgaaataactgtctggtgttttagaaaccagaaacagaaattataataggagtttagactataatatattgctgcaaggataattattaagggaaaacacagctgacattttctgatttatgcacacaatcagagatggagtccaaggactgtgacataattatcttcatgctaacaatttttgtaaatctcttgacagaattttagctaattttaaaatgccttctgaagattagcacttaaaattgttggggaaaatagcacaatttattagcaagggtataattgtaaaccttctaaatactcattgtgaatatcatttagacagtaactcctgctttagcagctggtacataagacacccgtttatggagtcttgaaacaacagagagtggaatctaattaaagaggattacatgccaaagaaaaattattaaaaacagactaatagacaattgttatgaatttagaagtctctgccaaattctctttttgatacaaattcatgtaagtaactgtcaagtaaaagcctttattcctccaaaaccagaaggatattggaaggctttatcttttgtgacttaaaaatgattgcttctctgaattttaacttaacacaaaaacttaaatggttctattaatctttcctcatgtattaaaatgcacacatgtgcttttaaagataaatgatcatgaatactattttaggttttttatttgatatctatctagtaccaaccattccataactgtgtacagtatatggaaatcttaggcatattttttctttgtaaacaaaaatcagtttatcaatttaggcactatttattgagacttatgttaaattggcttgcatatttttctttgtaatgtacatttaaaattcatgatacaccaaagattgttaatttttagagccctaatctagtaaattccttgtttctgtttgaactgacccactccattgtgatctcaaggtttttttttccaatcagagaattgaggtagcttaaggtaatacatattcatatgttaattgttttttaaacaacgtatttttaaaataagtgatccttctaagtatgttctagagaaaagactgtttacatctgtgagtttacctggtgtctaactttaatcttacacacactgggtggtgttattacagtacatcatgcactgcattacacagccataccatctaaatagacttttctatattttaactagattaagcatacattaaaacttgatttccaaagactaagaataacgtgttttctgtgttactaataaatgcatgaacaaaatcactggattgagtaaatgagacatttaacattcttaagtgagtgatagtcctataaacatagatgaaaaaattaaccatccaaaattgagacagaggaacaccactgatgttcaagtagtaacagtggatttatttgactttgccacccgcaccccatccctgataccaaagttttcctcatttgcttagacaccacttagtctagcagggattgccagatgcttcagcaaaaactccatcaaggacaagggattgttttaagtttaaagcctctagattacatcaaattttttatccttatagggataatatcctagagagcagttgtgtagctgtggtttccctgtggtggtaattaatttagtggagatgggtcagattgttcagagcttaaaggtgagcaggcttccctggttgaaatagtagattttcatttttaaattgctcttggagagccttccctcttgtcaagattaagtgagtaagtaaattataatggcttccaaaatagtaaatatcaatatttgtataatagtttgtggttggcagtacatgggacatagaactccacaatatatattgaaataatgatactgtgtttcatttgattatcatgtaaaccatatgagactcaatcaaaatataaccatacattatgcaaacaaacgcattgtaattttaaatatgaaattatgattaaaaagcaaatactttatcctgaactttgttgacctctcatagatataggaatgaattatcagcaggtaggatactgtagctaaacttttaatttatctcaaaaaagtactaaaatattacttaattcttactgtgtatgagagatgaaatcttaaaatatttcaaataaaattaacatactttcagactatgaaggcagaaatgagattcattctatcttttaaaaatatgtaataatgtttgaacaatgtatatattttcacatacatgtttttatttactttaatctttacaataacactttgagtggataatattactttcatcatcttcattgataccttcattttatgaaggactatttgcagattgagatgttaagcatttttgtaagaacacataagctgtttagttgtagagatgaaactcaaaaacaaattttctctctgcatagctcctacctctcctactgcattatattgtatttcactgtgactcatataagattctcctagacagggcctgattgtaagctggccacaattagtgaaatgacattagctaaatatgattacctcttaatgttccctgaaaggattagactagttaagacacaccaaagggaaaagcaattatctattgaaatatgaatctcttgattagaactggaaatcatatattgatagtagaatgttcatctagaattaaaaaaatatgaatatagtaattatttcttacttgtacttataaagaacttcagcagggctagttttgagacttcttgttgagtgcaaaaattaagatacaacattttccagaaagagtaagttcacctaattgactcatttttttttttttagaggaacctagaccttaggaaattctaactacatgagaaatgcatgtacttgtattaccttttcccaatttactttatgtcctaaagaaaagctttgtagtaaccaacattgaactgccttagaattgtagcagtacatgttggagtgtgccattttatttaaatattcctcatattttaaaatatgaaatttatcattgccttcataagagtggtggtttcccttgtgataattctctgaggttccttcaaaatttagtatcctgcaggttttcaaccagctgagatttgtaattattgctgatatatcactaatacatggcaatggatgtgaggcctatttaccttataacagttaccctattgaattggcttttttttttcaaaataaggagttaaaaaaaaggttttaaaccttggtgtctcaatgattagcatactatctagcacccattatgttctaaataaatattgaatgaatgaatgaatgactggttttcatttctagcttggcaacaggattgacttttgtgtctttttttaaattagaaatttgatgtttgaacttaagatgctttattgtcaaacagcaatagaaatttgccaacttttggaccccttgtttcacaaggttcttggactactgattatatttgtaacttccgtttctaagctgtctaggtccattgtgaaatcatcctccctgatactaaaatttgttgcacatagacgttgggccatagatgggcttcaggagctgtattggcccactgaaattgtatatagcatagcatattgtgtacttgtgcatatgtacttttgtgaaaatgtaattttttaagkaaaaggatcatggttttcattatactctcataggagtcttatgaccaaaaagtttaaaaaaatccataaagactttcttttactttattattcataaaaatcacctggttaaacatgaaaaatgcacatttttttctatttcaccatataaaatctgatccattaggattgagttggggttcatggatactcttcttctgtttattctttcctctttttccacctttattgaaaacgtcgttgctgaatgtactaatggatttacatatattacctcatttaatcttgttgatagctctagaaggtaagtatatttcacgatgaggaaactgagttaattaacttgcctaaggacttagcctgtagacagtaatggtaaggtctgaggctagagccaattttattaccttagccttccccctttttttctcttaatctggaaaattgtaaatcatttcaaagacaggtttggaagtaacaaactcatagtcatctcttgttccaagagaattatttcctttctctcctctgtattcttactacatgtgagcaagttgaagtcttgtcttatttaccttcatatccctgtgcatagtattattcctgacatgtaatagattttcaagatttttttttctgcactgaaatttaattcattaactcgagcctttgttacttagtaattctgagacttaaactccagtagctatgccattaactctttgtgacttttcatttgttaaaattggtttcctaatttattcaatttaggtttgtatataaattttagatctgatttagttttagttatcataattataacataaaaattcagtcccatggaaataaagtcctgtggaattatcagtgatttgttttatttaataatgtaatttgctagctgttcttttttttttttttttctttgcctctttccacctccatccagaatcagtaggtgtttggttgaattttgtgatttttttggtataatttgagcaaagataactcagtgaattttatttaaaatcctcagcgttctgaaatctccttgtatattattttctttcatgtgactgttggtgttctacttgtttcattayacttttatagaatccttaacacagatgagatataaaacactatgaaatctatcacagttgaaactctagaccttccctcaacccatggggattcatttggcaggaggccaccaaaaccagttctttttgatgcttagtttccagtttctacttcaattgctgccaaaatctgaacacttgggaatttaattgctcattatatttgtcacggtggtgtcacagacccaaataaagactgttgcatgcaaaatatttatgggtattaatttggcctaaatgtgtatattggattccatatttttctacattataaagtatagcacttccagacagatgtagacagaatcctgcaagagcttctgctacatttgactctgctagtaaactattttccatccagctcagtatttaaatttgatgacacctagaggaaggcctattcagaactttattatattcacttatgcagtttactctttagaagcggactcgcgaggagtttgagtctggctctgaggctagactgcttgggttcaaatccctgctttatcccttgctagctgtataaccctgggcaagctttatcttaatctcccctgtggttgtttcctcatttgtaaaataggaatacatatggttstcatgcagattaaatggttagacttcctagaaaaagtacctaacccagagtcactactcaatgttaactggtttactataattaatacacacacacacacacacacacacacacacacacacacacamaatacattatatattaaagctataatgtgtaccatggttgctgatacaaattgttccgaattttcagttttctaccaattaattagagctaacctgtgcctgttatattacatggcatgtctggtcggcattaaatttagtacctttgtgaccttccatttttcctgtgtattcccactttcttgctccacattgtctaggctagcaggcctgcgttttgttccagtattttattactaatcactgattatttttgttcttctgcttgctgttctcaggagtagtttgttcattcattctctctgtccccttttctctttttatctgttgccttttcctttcttctgctgtgatggttgtaggtttctcatgccattatattggtcaaaggaaattaggaggcacttggagggtggaaatcacaagccactaccatggataatttttttgaatttttatgaactttcctatcctgtaaagtaagtcccctatgtgatacttaccactgaaatcgtattctgggacagtcctatactaacttacagaatccccaagaatgaataacttgttgattacaaataatttacagtttttctcagatccatgttcatataaagtgggctgagaacagattttgattggaggccgctggctcaattttacctgcagttgtctttaatgttagagaagtgttattggtggtaaacgtgacagtgaatctgtttgccctttactcagtggatatttaatgcttacttttatttatgagaagtttgagcagataaagatgttagttgcttgaaatacttattctatatggcaagagcctaatattgtctgaaatataattcaaatcatgtgtctgttacttagtgcttctacatatggttcttgaagcataaaaaatagatttgatttcaatttctgtatacagaagtatttttagtcaaggtaatagttaactgtttaaatgctacagtgcttacttatttcctttgttgttctgttgggtataataaacttcatgcagacacaaagtgtaaaacatggagcatttgttcttctgttagttagcctaatactcattttgggtttcccattccacatcaaggcagaatatgccattttaaccacttcctgataaaattattattaaggttgccgcttctactcattatagtgaaggtactctgaaacacggtatttcagctaaatcagaaatttggctgtcttcaattcctggcatcactgagcgctcagtgtggctactcagtgtggctactacagtctctcagtgtccacgtgtccactttctctctctctctttttttttttttttgagatggagtctcactctgtccccggctggagtgccgtggcgcgaactcagctcactgcagcctccacctcccaggttcaaggaattctcctgcctcagcctcctgagtagctgggactacaggtgcacccaccatgcccagctaatttttgtatttttagtagagacagagttcaccatgttggccaggatggtctccatctcttgacctcatgatccgcccacctcggcctcccaaagtgctgggattacaggcatgagccactctgcccaggcttctgtctcttattttaatccaagaatgtgtttatctcctgtctctgtggctagaaaaactagatagtcaagtaatcttccaaccctgctgtttatgctaggaatggaccttaaaaaatttatgtccaataattttgttatttctttaattcttttatgaacttgttcctctacagtggtggaggcccaagtaaagttaaaaattgcagtaggatacacacatatgtttattgaggcactattcacaatggcaaagacttggaaccagcccaaatgtccatcaatgataaactggattaagaaaatgtggcccatatacaccatggaatactttgcagccataaaaaaggatgaattcatgtcctttgaagggacatggataaagctggaaaccatcattctcagcaaactatcacaaggagagaaaaccgaacacagcatgttctcactcataggtgagaattgaccaatgagaacacatggacacagggtggggaacatcccacactggagcctgtctgggggtggggggctgagggagggatggcattaggagaaatacctaatgtaaatgacgagctgacgggtgcagcaagccaacatggcacatatatacctatgtaacaaaactgcacgttcctgtaccctagaacttaaagtataattaaaaaaaaaagaaataaaaaaaagattgcagtaggattggcaaagaggaggaagctgatgaggaatttcagggccaaaaagaaacaaacaaaaaattatgtgtattttttcttaatggtctcaatcaacaacatttataactttgagaaagtttttaaatttcttaaacagcacacaaaaacactgtacttaaattagaaaactaacaaatttgatctcagctaagcagttctctttattgaaagacacttctaaaaatgtgggaagataagacagaagaggatacttttaatgtatatacccaaaatggactttwtgaaaaatatataattttaattattgtagattcattttggtaatttcaaagattttaattataacaacatataactgtgtgtgtttgttaaaaggatctttgccttaatttgacttagttttaaaaaatatcaaggttaaaaatagtggtttatataccaatatatttcaaatcaattcattcttatacattggacattattaatataatttctgtaattttgtaaaattcaggatacttattcaagaatagaaagaacatattaatactaaaattttgtcatttagtttttctttctgtaaaaataagtaatacactaaatctagttattttatcaactaaatactagtaaattccataagaaatctagggtgccaaaagattcatatatatatgtatataaattgaaaatttctacaatttatgccctcaaaacctattcgggttctctcagattaagtgagttttaagtacgtataattatatttagaattgtagtaaaaattttttaaagtacttttagaaaattcagtctagtattgctattttaccaaaaagtagaaacacttatgaaatttaaactgcttatgtcatatttactcaatcttaaaattcttctaagaacctgatctaatctaattttcacctaattttaagattttaactttagtttcaagtatataaatatatatgtgcagttgtaaatattacacataaaattgttatttaaagatctgattataaaattttgattcaaaaattttgaaacttttattattatatctgtgctctatcccttcatcttagtcaatgctagcttatttagaacttggtatttattgtatactgtttatggtgatcaaaaacttaatggttttctcttttgagtttaaattggattttctatacttaagattattttagagaactaatttttattcctccaaacttaagaagttttcctacttttataaattcatttcttctgtttatccactttgaaaaattgataacgaaactccactttgaaaaattgataatgagacttctgtgacagctgtatcataaaatgtttttattttgttactgttggatttaactgtcaattttaatgaatgctacccaattaaagtggtatgcatatttttcatgagtccatgatcaatataatcaattacatttttgcataactgcatagatacaatttttctcaggatcttagagaattaatgcaatttttaaatatgttgcagaattgtgagaagctggagaataattttgatgacatcaagcacacgactcttggtgagcgaggagctctccgagaagcaatgaggtaagtctgggtcaccatagcaacagtcacagatgtggtaaagaaaaagtcattcttcattatttggggaacaaatgagttcattgccaccattcagctctgttctctaaggtattaatttgtcagtggagagacttcccttgaggctgtactttggttttgaagctgcataaatgttaagcctcagtgcacagtaaaaaatgtaaatgtttaatttgttacttaaaatgcttaaggggtgtcttgttttatacttatactaaactgtgtgattgaatgaaaatattgttcatctaaattctgcctgtatataaagaaataaacattgtacaatggtgctttaattgagtagtatttcctcctaattaatatttaatttaaagagaggtacttacattttcatcttctataacattttataggattatattatattatagtatttttagtgatttacatttttacactattacaaagcatataattaacttcctttcaactatagtggtctataatgagcctgactttttttcttttttcatttcttaacatcagtaattctgaatatttatatgaaattgccccaaatttgatgccttttaaataacttttagtgaagcatttttcaaatctatttgatcagaatcaagaaaggctttttattagacattgaaaatttgtgggaaataaaactcatcatccacagagtgagaaaacaacaaatgttagtagycttaaaagttctgagcttgaatatttgagtagcataatttccaatatctttgtaaagaaagtgtatttatatttatttagcctataaaattaaaatatgtttttaaaatacgccttcttctatcttaatgctcatttttcaaggatgttaaggctaaagagattaaaatgagagaaaggataaacctaagagcttcctagaaaggtagtttagatacaattttgttattgctagcacacagttaccatatactttagtttagaagctgctctcatttagtaaccttccttttaccatgcaagcagcaggagaaagtaattaaatttaatagaagctgccctcattttgaagccacttctatttaaaaccacagggggaggtaattaaatttaatggaaacagtagcttctacacaaagatacatggtacttctgtatagatgattatgatgtcacaaaaagaggaataatatattactagtatgagaaattaccagctggagcaagtgagcctattttattgttaatgtctttactaataaaaaaaagagggaaaaataaaactgagtacacaatagagaatttgtatctatataaaatgcaatcagatattctcagaaagtttaagttattgaaaattttagcaaattaaaaataagttgtaaaatatttgttttggaaaaagctaatgcagaaattatgaatgaatttctaattttcaccatacatagtggtttatcctaaaattaccactgctataaatttaacattttttgtaaatgcttattatgataagtttaaatacagtaaacatgcatgccaatatttacttggaaaactgcagttattctctatatttttatatctatttattttgaagtaaatacatagacaaacaggaagacaaagagggtggcaactcttatgctttgaataaaagaactgaagaccaaaagacagaaagaactgaaaagaggcaatgtgaatgaaaaatgatgtgaatgaggaaaatacaaggaacaaggaaaggatatgtaatcagtgtaggaaatttgtcctcaagaaaaaaacaaattgaattataagaattaacttcawatgaagagatgattaaattctgccaaatttcgttatacataacattttagaacataccaggatgtcctgttttttaaaaaactagagatgaactgatgataaaaacaagtattacctgcctggaataacttgccaaccacccattctatgagacaaagcagtagtctggataatttaagtgagaatttaattttatggcatgaaatgtacttgtttgcttaagttatacattttacttacacacacacacmgacacacattattggtaatgtctggattcattaaacacagtggaataatttagtaattaatagcatacaacaatttagtatatggtgggtcaggtgctttttaaaatgtgttcggaatatgcttgaggtgaagacccagagactgagtatttcagtcttttccctggcccagaatatttcatggtagcttctctgttagtccattggcctggcatagcttggctatgggaccatccgtttttctttctttcttttttttttattatactttaagttctagggtacatgtgcacaacgtgcaggttagttacatatgtatacatgcgccatgttggtgtgctgcacccattaactcgtcattcacattaggtatatctcctaatgctatccctccccccctccccccaccccatgacaggccctggtgtgtgatgttccccttcctgtgtccaagtgttctcattgttcarttcccacctgtgggtgagaacatggagcatccctttttcttattagcttgatctctttagcagcccctaagtggctccaggtccccacagtggtgttcttgtcctgagtgtgtctagccaggagtaactggaacagagttggacccacatctgaagattgtcctattgtggctgcagtgttggggggcctttcaccatcttgggtacctccttatttatttaggttttactatttctatgagcttagaacagaaaagagaggattcttagccacctcatccagtctctctttctggccagtctttgctgtgcagtcttgaatctggtttcttgtcagtatccgagtttacaaatcactttagatccctcccatgcttcctcctgatcccagtcttgaggatgccctgagcctgtagccctggtgtgtaaaaagracgaggggttacaaccttctctggaatatgctagctaaataaaacgttaaataaatacattaattgatgtagagagagagaaaaaaagaggattagtgaagatttggrttttcaggtgactgtgagatagctgaggttaactcgtgtaaatgtgcaataggcagagggaaaatacaatgcaacaactcaaggaaaagactgagagttgatgtgcgcatttgagacttgttagtattttgatacttgttgtagccaagggaaggcatatgatttccaagaatagtgcattgggataagaaagaaggagagtccagccagatgtctacgaaaatacagggcttaggaaaatacgtgccagaaaaaacatattttgggatttaaaattctgaataaccttctctaacagagtaagactagactgaaatataatgtgcctaagaagaaaaggacaggggaatggaattcctggccgtttttctgtggctcttagagacatctagaccaatgctgcccagacctttctgtgatgagagaaatgttctccatctgtgccatttagtgtgagagccctcagccacatatggccactgagtacctgaaatgcgatgagtgtaactgaagaaccgaatgtttaattttacttaatttttattaatttaaatttaaatacttatatgtggttagtggctgtggtttgttctgtgctgccctaaagggaagtttttgtgttgctaatatgacacttgactgcctctcacttaacagagttctcaacaatggagaggccagagtgaagctaaaccatgttcacacacatcacacatagatacacttactttcttagaaaactaatagtaaaaggtagatccataaccyggtaatagatgtaaaaccaaaactaaaaagtataatttgatatagaggagacaaggtagctcttattttataaagacataatttatacctagaaagcccaacagaattaacaacaaaacctccctaagaatttgacatcttttaatgtgattgtattcaaaatgaagatggaaattcttaagttcttctgcgtgttatttaaaacaaatagtgtctgtaattgataatagatactataaagatctgatgaagttattatatgatgaagtaccccaagtagttcaggacatgttcaatcacccagtaaatggtataaaaggttttttttgtttgtttgtttacttgtttgtttttgctgtttggacaaaaaaaaaaaaaaaaaaaaaaagactttgtagtctcacttcacatggcccaaaggaaatttcatgcatttttaaagagctaagggaaataaatgaaacagtcaaagtccagtggaatatagaagtgacttttgagattgagatgggggaagagatgatacgctaacaagtaggtgaagaaatcactaagctttgattccaataataaaaaaaaaagcttccgtcatttgcaagaaaatggatcaacctagaaaatgttaatgttaagtgaaataagctaatcacagaagggcaaacactgcatgatctcacttttatgtggaatttaaagacgttcatctcatagaagtagagagtagaatagtggttaccagaagcttgggagagtagtgtggagtggaaatggggagaggttggtgttctatagcacagtaaggtgactatagtcaacagtaatatattgtatactttaaaataacgtgagaaaatttggagtgttgtcacaggagatggagactatcctggctaacacggtgaaaccccgtctctactaaatatgcaaaaaattagccgggtatggtggcgggggcctgtagtcccagctattttggaggctgaggcaggagaatggcatgaactggggaggtggagcttgaagtcagcagagatcacgccactgcccttcagcctgggtgacagagtgagactccgtctcaaaaaaaacaaaaaacaaaaaacaaaacaaacaaacaaaaaaagacaagtgtttgaggtaatagatatgctaattaccttgatttgatcattacacaatctaatatgtattgaaacatcacactgtatccaataaatatgtgcaactattatgtgccaattaaaaacaaacttattttaaaaaacttatgcaaatggggacaatcacaaaaktaaaagacatcaatgtactatattgccatatgtatgacagattttaaaaattgggaactcagtagataattggcaaactatgattaagtaacccttggaaatattcaactctaatggcaaacaaaaagtgtaaatttcacaaaaaatacaccaatctcttgcttattgctgctaatgcagtttggtgggaagtttttgagtgctagagatggaatagcgagacagccattctcacagatggctagagatggaatggtgagacagccattctcacattctcagaggattgaaaattactgctgcatttaaggaaaggattgtgtcactaagtattaagagacttaaaacaaacatacttttttttgtattaatttaccttctaggaatatattatgcagaagccatagaaattatgcataatatgaatgtgatactcaaattatggaatataaccctgaacaaattttacaggaactaattgtctaccattaagacaatagacaaggcaattatatgtatataacataaatatatataaatgtatatattacatataaatatatattatttatatattcatatttagaattttacaatatttataaatttataaagtatataaaatctgtgtatatatacagatatataatatatttatatttacagatatatacacagatttacatatatttaaaataaatctgtgtgtgtgtrtatatatatagakagagagagagaaacaaaattgcttgtagaatattatctcaactgaatataaaaaatgcagagaaaaaataggaatgaaatgtggctattacatctggctggttggcrtaaagataattttttgaggcgtatgcttttccattctatattttctgtaatgggaatatattatgaataattagaaaaacagtgaaggaaaaatggagaaaactaaaaatatgaaataaatactggaatcaatagtaagaatcagatttgagactccaactgtaattttaggtaaattaattattttactcttacttttttgtaaaatrggatttaaaatctcctaggatttatatgaggaactaggatatagaggagagaatgctttgtaatttatgaaaattaataaaaataagatataaaatataatgtttgtatacatttttccttttaatgttgtatgtgcttacaagaattacatgtgtaatgtataaataatggaattcaatggagaagttcactgcagtcttagcatatagaatactagaagctgtatatcttgtccaacttctacatagtctattgtagtgccatgggtgtggaaatcttatacagcatttctgaaaatgataatcaaagaaaaagcattttaaggacaggaaaaaagtgcatcatctctaggtcaaatctctggtttatagtatgataatgaatttagaggtaaaattctcaacttcttttcatcatattctttctttatcttggttgattcaactctgtaatcatgccaaagggatttgatttctttactatcatattctgtacctattttagcccctgtgataaatcctgaacagtaaagggaaggatggggccacttttaacattgtgttgtatttttttttttttttttttgaggtggagtttcagtcttgttgtccaggctggagtgcattgttgcggtctcggctcactgcaacttccgcctcccaggttgaagagattctcctgcctcagcctcccaagtagctgggattacaggcatgtgccaccatgcctggctaatttgtgtatttttattagagatggggcttcaccatgttggtaaggctgctctcgaactcctgacctcaggtgatctgccctcctcggcctccaatgtgttgtctttttgtcccttttcagtctcacaggcagtagagggctatgggtaatagatatatgcaattggaaggtacttgaattgaataacttgagaaaaggtgacgtcagattctgaaaaagaagaggtacatatagaatatactcattaataaaaaaaataaaaatactattgggagttttttacagtgtatttcttaatacacataaaatatagattgttaatagatttatgagtatatctctatggcaagaatacaaattatttttggagtgccaacattgccattaggcattgttttatttgcagagcgaagtctattcagtgagatctgttatatttacattagtactataaagatgaactaccagtacagaatgtctctgaaatgtattctttttcgcttggctttatcacgtgttaagaattttgtcactagatggtgatgttgagttgcacagtttatctgtgctggcttttttactggtgtgtgtatactatttgtaggtgcatcataaacagccatttatacagagttaaatataaaagtatagccatgtaaacttggaaagtagcttttaagaggtctaacatttctaaatattatttgagtcaaaaggttaaaattgctttaatgtcattgtttctttaccttcaactcaaggacttttagaggtggaagcaatataaatagcaatctaactttttattgaaaggctgaggtccgaaaagagataccaagacatttaaaagaggtagtttttcagcttttcaggtatgtcccgtctgtgtgtattagcctaatgtatgtctttaatttcactcctctgttagtattcagtagtactggtgttgactaccatctgacctaagggttgtgttactactggaacctaggtattattttagctgtttatgatttgggttatgttaatattgcatctgttgctaaatataatggttgaattacactgatactttaactgatacttctacatgaaccatgactccgaggaagctgtgattagtaaaccatgaaccgagtaattttgttcctctgaataagatttaaagataataatatggccattattctactttatcttattcttagagatttgtgtgtgtgcatgtgtatgcatatttctatatgtggtatgtattatatagatattacatgtgtgtatatgtatggatatatttctctataaaatctccyctttgcagtcaaggaaaacttgcactgtgacagcatttggagtttggacttcccttgcctttcaggtgtattcattaggattacaaagatttaaggaaattytatggaattcttttaaaatagttaaaaatggaagagtggaaggacaaggcatgctaagtatttgagattagcaaattgattaagtagtttacaaagtaaatataaagctatgagggaaaaatcaaagtggcattgaagaagaatataaaataaataaaatgagaaagtattaacaaaatacttccagtgaaattagcaggttgtttaatagtatggaaagtaaataattttttaaacattctgaaaatgttatgtaatgatggaagtagtaatacatgatttaacgtttgtaacttttttttaattttcaaagtgttgaaaaacaaattcctttataatcagaaatgcccatgtataagggtatattttaactacttgaraagtttgagcagtgagattggattcagaagcaatgtttcaactcttttctattttaatcatttctaaaattctatcttaattatgtttttccaagttttctatcactaaatagatcagcaggaacctcctgaaagccctactccccaaatcagcagagaagagtattctcttgtcttctatgcacagagaacatgttatctttatcatttctattacagaaaaacacatatttcaccatgtccagagcaggttctttgatttggtttatgccacctaacacatgaggaagtcaatcaggatgagtactttcagatttttttgaaatcaaaagacaaaagtgcatgattactttacataatcatgcacctgccctaataaatatcattgaaatacaggtcagaaaatatatgtaattagtcttatgtaatttttgtaatgtatgtgattaatttcgtgtaccttgagtaatatgaatgtatgtatatgtctttatacacctatatacacaggcacacacatggatacacacatttggtaatttatataattagtttcatgtacattttgtaatatgaatgtgtgtatatgtctttatacacatatatacacatgcacacacacggatacacacatttggtattatctgtttgccatgtaaattaggaatattacttccattcattcactttaggagtgagtgaaagcaagatttgacactcagtttccaatctcactgctcaaatggcccaaatataatttaattggggaaatagaagaaaacaattatattagctgttaccagtgtttagtaaaatcaaccatatggtcggcaacaatgcttctggattatttatggatttgttattaactgtcatttataaatacagaattctttcaatttagaatcttttccttcactttaaacttgaattagaattcaaaggtgagaaatattgattacataattatcaagyacaaatctggtgaaacagtagaamaaatgaaatcagttaataggctaacacaattaattgttattaattatttatttatgaaatacattataatactcattaatctaagcrttggtttgttccacctggtgcctagtaggtactaggtgacatttgttcaaacatagtatttgcagaaaatatcaaattaatattgcaagtgatagtttgatatttttggaaagataaaaccagaaaagaaatatgtaccattgatatacagaatgtatctgtttgaaacaacagcattggcaacagcaacatgagtaagaagctctgagccaagcaaggtcaggaaaaaactgcattttccccttagtatcaaaagattgtatattaaggactaggaaagaagggatgcagcttttgttttgctaccaaagaaaagtgcagagctaagtcgttactctagaatgcttatcattttagatacagactttgaatgagcagctaatagctaaaattatttaggagataaaaattggtactgtgaggattagctttaattttaagtatccataattgaagtgccacattatgattttaatgttatgataatcttgttaacaagctgttgtgtatatactatcatattttaatgtagttgcaaagcttaagtaaaccttaaagtaaattgctttttgaatcaggcttttacaagtggaaaattagtggtttacatgttttgaataagtattttgtaattatatttgtcattttctacaactaaagaagactaatagaatagatttacagataatattgtttataagcacgttggcattttttattactcgttctaattatttggtatatatgtcacaatatactataataaaatagctggccctatgtttttttgtaagtcatctcttctggaagatagacattgacatttagttataatatttctcatttctcatatatcagcttgttccatttagaagataattaatacaatttcttatccagcatttctacaggttattatgatgtgtactaaataccttccattgaaggtatttgtgtttattttattttggggaaaaaagtctcccattctgacaagttgtttttaaaaaatgtgttgcctcttttgaaaatcgagtagaagtaaggaaacattttattgtaaaaggccagatagcatgtatttttagctttctgggctacataatttctgtcacaactattcaattgtgctgatgttgtacaaaggcatctgtagaccatatgtgaatgcataggtgtggctgtgttgatrtggctgtgttccaataaaattttatttataaagacaggcagccatctggatttagcccttgtgttgtartttgcagacccctggttgagagcaaacatgacttaagtccattagaagaaatttcaaataatgtttggagaaatatattaagaatttgtgattttctctgatagattaatacaaatactatgaagtccttccaattttatcaatgaacatgactatataacattactgaggtgccctatctactaatttctaggctgttctttgaaattgaataagtcacatttcctggattactctttcaagtaattagtgtgattaggaattaaacagacaatctagcttgtgaaatcaccaatatgcaacaaacatgagacataggtactagtgccactgaattaactagcattgattattcatgtttatgttttatagttaaaatgtggaataaccaccaatgaatcatttacattatgaaacagtataatgttgctcttagttggacaattagctttgtatagtatggtacttataaaaggacaacattgtgttagtttatttatgattcttttaagtagatgaatcatggtatctatactaaggcatatctatgatatctgctaccgattgaaaaaatattgattgtggtctattattttaatgcctttgtaagttttatacccatggaattatctaaagaattacttttattaaaaatttagtcaatgcatatttaataaattagtgaatcttgaatacttttcttgtagtctacaaagagggttttttgtttttgtattttcttttttttttctctttttttgagtgaaaggagatggtatataggatattctaagctccatttaaaaaatgtgtttggcacctgtagtcccagctactcaggaggctaaggtgtgagtaccacttgagtcacaaggagtatgaggctatagtgtacagtgtccacacctgtgaatagccattgcactctagcctaggcaatgtagtgagaatccatctcctaaaaaaaaaaaaattaaaaattaaaaatgtaaatgttcttggtgttttattgatgtgcaagatgttatttggtgacagctgttgtgatatgtgcagatatgcagtgaactgggaataaaccctaatttcaatggcttcatatggtggctggaaaggccttgctcctgtcaaaggccaacaccttcacttgtgatctggatcccatttcctctagtcttttcaaaagtttcccttgtgtaattactctctctctcctgaaacgttaatttttgcttttacatggttatttacatcttcatacttgcatattgtgcatcttaaagacaaacaaataaatgaaacctgtctacattttcctctccaggtgccactccattttgctcctcaccctcaaagcctaatgaaagagttgtcaataaaggtttttcattttctaatctcctggtctcaccttaatccactccacctggacatctcttgctgtctgttcagtgagagtgctctgtgttgccaaatctgtaatttgtacttgactggtctgcagcatttgcttcaattgactatcctttcttgaaacatttttcctcctaggcttaagttactttacatcattttattcttcccctgcttcattggccactccttttaactctccttggcagctatgtcctcctcttttcaatgtctaaatattgacatattataggacataaaattggaatgccttgtttctactattttctcctctgttcctaggtagttatcatttctttccttagataaccatctatttgatgataactgccatactttcatctctacttttgatgtctcccctaaaaaaacttcagctttacacttcaatgagacacttgacttagccacttcagtatgtaaataacaacccaaatttaacatatccaaaggtgatatctggatctggacttcttttcttttctcttctcttctcttttctcttctcttctcttttctttcttctcttttctttctttctttctccctctttctctctctctccttccttccttcctcctttccttttccttttccctttcccttttcctttcctttctctctttgtctttctttctttctctcctttctttctttctttctytcctctctctttcytttttttttttttttttgagacagggtctcactctgtcgcgtaggctgtagtgcagtggcacgatctcagctcactgcatcctccccatcccagattcaagcaattctcatgcctcagcctactgagtagctgggactacaggcatgtaccaccacacctggatagtttttgtatttttagtggatacggggtttcaccatgttggccaggctggagattcctggatttctcaccacaaccctccactgaaccaattcatccacaagtctttctatctgagtaaatggcagtagcatcatctttagttatttgaactacaaatctggaattcgtggaaaaaattttctctctcacatgcgcatctaatcagtaagaaagttgtataaaaattcctgttaaagctatatccttggaatctgtccagttttgtttctcccctgctaccctccttacctctcatctgaactactaatttccctttttacattctttccttaaaaatccattttccacagatcaccaggatgaaccaaattgtgacctttctctccaaaggcttgctattttacttagaataaatgacaaattccttactcctaacttgtcttgcaaaaacctttgtgatcttcctctgactcattaaccatatgtctaacctctttcagccttgctcacaaagcttctgaccaaccgtctttccatccctaaaactttccaggcttggacctgatgcttacctgggctccttcttacatgggctcttccatgccttgctgcttcttgctattcagctctcagcttcagtgtcatcttttccaaaagagatcaataaaggttaggtgaataaaaattgaatgaaagaggtaaagtaatttgggcatatggcacaaaattgaaggagccagaatttgaacccagactcattcctcttgcagaactcattacctctcagaaaattttaggggtgtgtgtgtgtgtgtgtgtgtgtgtgtgtgtgtgtgtgkctgtgtgtttcctatctaggccatgggataaaagtactttgtcagtacactttatgcacatattagagaaagcttcattaaaggaatacaggaataaaataatagatatcatgaaattatatacagatatttaaagatcagtcttcctaatgtttcccaaggggtctaggaaatttagtttaatttagtatgttttctaacttcaggcttatmgctctgtcccactttaagggacattattttggctggggaatagaagtaatagtagtaattttatttagagatcttccataacatcaatttttagtggaaatgggtgtttgtcattggaccacagaggtaatactcttagttgatatctgtgctatgtttacaaaccarttatcttgctagcatctttctctatctttcaggagagtttagagtaattcttttttttcttttagatggggaaagaaaaatgatttacaataaggttaaattacttactggcattatatttgtcattgtcatattttttcttcatatttcatttcttcatcctcttagatgatgtttataatttcatattctgggagggaatattgcttgagacatttctcacccagaggtaagaattgggttgaaatttaaacagcttggatgaaaaagctgtttggggaatcagattttttttctttttagtagtgaaaaaatgataagaattttcttcctgtgaatgaaaataattactagttttgacacataattaaaggtagatgattgcatatgaggaagctatattaaataatttaaatacattgggtagccagttcgagccagtcactaccattaactgcagtctgaaagttgttccttgtatggggcattccaccaaaatgaaagtctattgttctttggcattaatacaagacttgtcctgcatttcatatttactcgggattataatctgttcatctgaaattttttgagaattgattgttctttcagtacttccaccaaagtacctgtctgtttttaaagagcatgataaatatttttgtcacacatatttccatagatgacatagttattgcagaagggtttcttgactatatcaatactaacgtatactctttgaaacctataattaatatgagcaaactaataatttctagacatacctgaatcattgtatgcctgtgattatgatttttctgcttgtttataaaaacaaatacattttaaatatgatgatgcccagaaatagagtattttttaaaatgccaaataatttaggaccatgaatacctctccataagccaagttttatattttgtatcctcataaatatatagcatagtagataaatttgacttgactaaatctagattattgtgttactgttagggtactcagtcttaaaaatgtactttggaaaaaagtccttagtgtttgaagacatacataaatattatacacacacattccttgcaccatgattcagattgaatatttttgaatggcttatcacatttcaggtttatctctaattatacagaaagtgattgtagttactaaaaacaatatgaggcaaatctttttctgttcttgatcattaaattcagttaatttatgaggcctgtcaaataccaggcacaaggctgggtgctaaggtataagaatgaacagccctcaattcctgctttcaaagcttagtgcctaggggtagatttactgtcaaaagaggtggttttttgaaagtatttagatggaagccagtgatgtgcataaaatgttttaagtcatcagcatgcatttattaattctaaaatcatgagggaagattaaagcaaaaccagtggggaagaagcagtgggtaaaggaaaatctgaaaatagtcacagctatataataactgatgaggaaagaaagaagttatcaccagaaagagatgactgttgtattgttttctaaaatttccacttatagtgattttctaatcttaatgataccttcaaatgtgtatgtatcacttttttatagttttaaattaatttatttaatgacctcagactctttatctgtgattgataattaaagggtattaggctttataagaactatttatagctaagagttacagtgcactatcatatacactttgaatttcagcctacaatttggagattataataggggaaaagttatgtatgtttgcaacatgattatgtattttaatatagttttaaattttagtatgtgtattaagatggaattaagaatactgattgattgtaaaactgaagtttcgaaacaaagttattttttatgtgcaaggggctgagatctaatctatgacattttagaggttttctttaagaaagaggggttattacattgaaatatttattgttttgagcaatgtttgtatttgtgaatactactagcatttatatctaagggatgactctagtttaagaattatagtgtaaggccattgaaggcacagtggcattgaacatttgtggagatactcttacacctggtttagtctttcaaatatttattgagttcttacatatacaaagtacaagtagaaactggagatacagttatgagcaaattttcatgagctttatcctcatgaaaattggataacgggcaggcaggtggcactgatcaaataaccacacaaatgtatataaaattgtaactaagataattctacaaagaggaagaagtgttgctaagagtgtaaattataggaagatttgacaggggagtcttcaacaaattataggaagatttgacaggggagtcttcaacaaagagttaatcaagctgaagtctgaaagaagggtaagtggatataggctaagaaaataggccagtgtataaatgagagttttctgatgtaaagtatttgtgggcatggggtagatgaaagtaactgaagaccaatatgaaaaacgcagagggtacggagttacattgtgggagatgaggttgaagctataggtaggggccaaccttgggaaaccccattgagaaattttgtctttatactaggagtatttcgtattactaaatactctctatactaggagtatttcgtatactaggtaagtatgtaaaataattaagcttttgagatatatcaccataattgtagaatttttaaaaatatcactctggctgaaataaaaaggttcagaaggatctaaaatgaatacagagagtctgcatgggagcctgtcatactggttttggtaagagatggatatgagagctctaatatggatattagagctcaagtaatgtgcagggattggagagatgtttaggatgtaaaatgtgaaggatgggagaagagaattaacagtcaggtctctggtgtaactggatggatagggaactgtattggtgagagtgtacattagtagaatgtttctttgcaggtttatttgacaatatcaaatttaaatattcactccctttaatgtgtaattaaagggaaaataggatgatatgctatataattatttaacacatgatgctgttttctcttcacatctgttgtattaagcgagatgggtaagtgccctttttatttcccgttgatgcttcttttttttttttttttttttgagatggagtctcactctgttgcccaggctggagtgcagtggcatgatctcggctcactgcaagctccgcctcctgggttcacaccattctcctgcctcagcctcccaagtagctgggactacaggcgcccgccaccacacccggctaatttttttgtatttttagtagagacggggtttcaccatgttagccaggatggtcttgatctcctgacctcgtgatccacccgcgtcggcctcccaaagtgctgtgattacaggcatgagccaccacgcccggccggtgcttgtttattttacctttctcttctggaaatctataaaatgtgattcccattatatcatattgcctgttacccatccttcctgtagacacctatggatcctttggtcacactcctcattctttataaagtttgtctctgggctcgctttgtccaacttttgtcctgattctttgttaattcaataacctacatagatgaggcgttcagtagctggcctctattccttcaattcttctccagtatttttggttctccaccttaacccagtcacctactctcacagttacctcagacacttaattctgtgatattgtgtatactacatggtacctcagctatcctgcatctccctgtgaccactgatttgtcttgtagttcaacagaagttagcttactcccaaattttaggtagtccttgactcttctagtcttttttaaaccatccctcgtattctacactcagtcaatcggaaactattgttgactctcctttaaaaatatatccaaaatattaaaagactgacagcctctaagactaccacttcagtccaagccaccgtaattgctggctattgtaacagctgacatcttgggctggaggtgtggtgagggtggttaacagaatcccaatacaaacttcagatcaattaaatgagaatcacaggcatgcatgaatcacgtgtctgtgtgtgtatgtgtatgtgttggagaggtagcagttagcatcagtgtttttgaagcatcccattgcagataatttcagaatgcagtcatggttgaagattactcttgtaactggtatccataaagactgttcttcacacaggagcttgagtgatcttttaatttggtcaaatcatatttctcttctgttcaaaacccactagtgatttcaaactgcacttaaagtcaaaattctgacaatgccctatgtgatcctgatcccctctactgcctccatgactttatattttagaactcaatttatctctcatatttagccatactggtctaaacattgagaaattaacacttcaaaataaccataggtcagaaaataaataatgggaaattaaaaaaatattttgaactgaacaatgaaattaaacatgaaaacttttcaaatgcagtgaaagagtcacttaaagtttatggcctctttggaagacagtttggcagtgtttttacaaaataaaattactccatatatttattatattttttaaagattatggatatataaataaatattttaaataataaaaagatataaaccccaatttaagacctggtaagattgggaacaaggcaaggatgttcgttctgaccagtgctttttggcatcatactggcagcactagctaatgtgatgagaaagaaaagaaaataaaggtgtacagtttgggaagaaataaatgaaactrcatttgtccacagatgacatgattgtccatgtaggaaatcctaaaaattgaccaaaaaatttcctagaactaatcaacaattattagttccttactaataggcaaggttgccagatacaagattaatatacaaaagttaattgttttcatatatgtcagcaatgcacaataagaatttgaaatttaaaagataatatcatttaaattagcaccaaaaaaggaaatatttaataaatctcataacataggtacaaaatctatatgaggaaatctataaaaatatggtgaaagaaattgaagagaaacaaaataaatggaaacatcttttgtgtttctggacaggaatactcacaattctcaagatgttggttctttccaaattgttccacagattcagtgtaattacaatcaaaatatcaggaggttatatcttgcttatggacaaaatgattccaaaccttatatagaaaagcagaagactcagaataactaacatatattgaaggagaacaaagtctgagaattgacagtacccaaatttaagacttactgtaaagctgcagtagtcaaggcaatgtggtgttattgaaaggatagacacgatcaatgagctggaatacagagcccagaaataggcctacataatcaacttgtctttgacaaaggtgcaaaggcatttcaatcgataaatgatactggaaccactggacatacacatgctaaaaaaaaatctagacacactggacacagatctaacacctttcacaaacattaactcaaaatgaagtgtagaactaaatagaaaacacatgcctactatattctgagaagataacatagaaaatatagatgttattggatttggtgataacattttagatacaaatccaaaggcatgatccatgaaataaacaattgataagttagactttattacaattaaatacttctgctctgcaaaagacactgtcaaggaaatgaaaagataagctacagactggttaaaaattttatgaaagaaacataacagataaataaatgacataaaaatataaaaagaagcactaaaatccaacaataagaaaataacctgattttaaaatgggcaagagatctgaacatacacctcatcaagaaagatatacagatggcaaataaccatgtgaaaatatgtcattagggaattgcaaattaaaacaacagataccactacacaattaggatggccaaaatccagaacactgacacaaccaaatgttgatgagaatgtggagcaaaagggactgtcattcatttttgctgggaatgcaaaattagtaaagccactttggaaggcagtttggcactttcttacacaattaaacatactcttactatccagtccagcaattgcatttttggcatttacccaaagtaattgaaaacttatgtccacacaaaaacctgcacacggatgtttactgcagttttattcataattgttagactttgaactaaccaatatgttctttagaagatgaaagcctaaataaattgtggtacatccagacaaaggaatattatttagagttaaaaataaatgagctatcaggtcagagaagacatggagtacagttaaatgcttattactaaatgaaagaaatcaatctgaaatgattacacactgtattattccaaatgtatgacatcctggaaaaggcaaaactaaaagacagtgaaaatatgaggggttgccaggggtttaagatgaagagatgaataggtgaggcacagaggatttttaggagagtgagaatacttcgtatgatactatcatgatagatccatattattatacatttgtcaaaggccttaggatatacaacactaaaattgatttctaatgtaaactatgaactttgtgtgataatgatgtgtcaatgttagttcatcattgtaataagtgtagtactctgattcagaatgttgatggtgagggagtttttgcttgtgtgggggtagcagaaatatgggaactctgcattcctttgaattttgctgtgaacctaaaatattctaaaaaaggaagtatgtacaatttttaaaaatagtcaaaatatttgagtaaaaaatgtcccaaaagatgatatacacacatccagtagaaacctgagagtgtgctcaacatcattagtcatcaggaaaacacaaattaaaacaacagtaacatactattttatacccacttgtatgatgaatattaagaacactggcaaaacccaaattttggtgaagatgtgaaacaactgcattttcttctagattttactgttattgacttctaattttcttccattatggcaagaaaataaaatgtgtaagattatattttgaaacttgatttttgtccctgcatgtggtctattcttggtgaatgttttgtgtgaacttgacaaaaatgtttattctgcaattgttggatttagtgttctataaatatcagttagattgaggcaataggtagatttatctagctcttcagtatcattactgtcatttatttatgattctgatagagggttgctaaaatctccaactatgatttgartttggtcagtttttttctttcaggtctgacagtttacattttatgcttctcctgaaccctcattcattttgtttatttctgtattttggaagcttctagcctctcttttttagcctcccacaaacctcttgaattcagtatgtgtccagtggggaaacagatgtgtttgttctcttaattttccaattataacacccctccgcctgtgccggtgatcattaaacgttttgctgatttctccttagcccattttaagaaagttctcctctcttaggaacttttgtttgtctacttctccttgctttctcagatctcttakgcctctaaaaaatatggtgttgtggtttatccagctttttctagattttagcagagagaacattcactggcctcctgtgacttactacattatgcctagaaggygaaattcctttctgtgtctacctcagcacattgttttggtaatcaaagtcatggattgattgaatataagcaactacatatcattatgtttaaaggaagacaaaactgtgctttttaaaataatttactttctgttttgtttatttcaagcaaaatatttaacccactgtcttttttcccctatattttctttaaaatctggacacgtaagaaagtttcgtgcctggtcctgttctcactctatgttcatgttctattctttggctcttatccactgtgtgtatcagtgtctctcaagtctgtgttctctgccctagtcaccctcttgaatctcaaacttacagttttaaatgtttgtttgacatttgattgttcttcaaaaacttcagactcaacatttcaatccccaaattcatttgctttgccttttagttggtctcctacattcccagggttctgcatctggctctgtcagtgggactgactgtaatttttagtaagcctctgaatctctgtgatccttacttttcaatttatatttcatttaaacgaatcaaaatgtagctagattgcttgttttaacaaaatattttatcaagtgcaaaattagtatttatcttttttataaaaccataatagaattkcagctacctcatatgtaaatgaaataatttattactttggtaagaattagttattaattggtctagttaaataataattaaggataactttgtcctgtcaactcagttcaatgctcaaaagaataggtttacaaatcctaagagatgaagttaaattagttttaattgagctttttatgtgaccacttaaacacttacctatcctgaagtgtctgtttttacagctagaatatgcaacctgttatcttctaatttctttaattccctcttttctctggagagagttctgtatcattgagtatgctatacttgggtgaacacaatcaaatgactttgactttggtgtaggaagataaatatcaatgacatactgtagggatagataaactcaaaatacactgtagaatttgtctaattaatgttttatgaaataaatgttttcatttatttttcttaatgaaattgtatagcatcttaacatcttgagacttcacaaatagttttaggactttatattatgggaagtaatttgcatgattatgtttaattcctttcaattgtttcactactcacaagcgtgtctatttctgagaaaattctatatgtgtctttatgtaaagtaaaatcttttagtattcttgtagtttgatccttagtaagtggtgataatacataaagaacaggcattatttatataaatttctaaattgaatattatatcccactacataggctcttgtttttccctcagagatattcataacaaatgagaataagggtcaagaaaaataacgtttaatataacaacaaattttgtttttttaatagactgtgatgagacttttcattattcactagaaatgaaatttcattgctatttagcacaattgttcataaaactacttcgatttaaaaccatttaaatgaattgcactgcttcagtgacaaaatattttcaaagttattttcactttaaaaatggtcttgatattttaagtccaggtacatatgaggtggagttgccaagtattttctgaattaacactttaaattcatcaataaagatatcagcacttttcataaaagttatttgctttggtaaaactaaccatgtaacgcatggtaatatataagcataatgaaatataaccctaagtcatagtttacaggagtgaatttcaagactgctttatatacaaggaaattttaacttttcagccatatttcatttaataatcagaaggggaactttgtagtcttttaataatgaaatatatgctgttaatctttttcttaaaaaattggagaagtcacatttttcaaaatatttctcatctctctgttttttgtgtagtcccatttcatagatacttggatagaagtatgtgtgtccatattttcattctctgaatatacattcaatcatgtaattaagagcaatcaccattatcagtaattttaaaacacctttttgattaatgtctcaatttttttctgtcatactatttttacccatgacaaatgataattcaggaatatatgtaaaggaagagcatgaaacaagattattatagtaacttagtgatatattataaagaagagtatttcctgtagggtagtccaattacaaaatagtaaaacaggaacaaaacacaataaagtgtttttcctatttgtttcagtaagtttagcacagcaggagtcgtggcattcctcctgactggtgcgtcaaatcggcagtttgaaatgtaactgcaaatgggaattattttaaagacaccatatataagctaataaccttagccatataaatgagataattatacagtatttaatatatttagtttcttttcattgtaataatttcataccttcagtttgagagaatatgttcattttgaaagattaataaacttttatgttgaaggcatgtaagaagtaaactttgaatcatttaaactttgcctgtatcagttttttgctggtatctgtttcttgccagttcagtttagtttgaggaaaagatgttgtgaattaaacgaacagcaaacatcacaaaaaaattgacataggatccaatagaacttttgaaaaatagtctgaaattacttcaggacaacatcttggactatagcataggagaaaaaggattgattttgtggatttgtggaaatttgacacttttaatggcaagagatctaggttttagaaagttcaaccaaggcaagaaggataagtgggagaactgggacttctatactaagggaggataagatctcaaaagtcaggtgtctcttgacagtgaatcttgaaaagatatagttgggagtcttggtaaaakaaatatctgagggatagatctgaggccccaaaaggaaaattgtgctttgagtagtacaagctgcttctgactctgtggttccttatatatttcttattgtgtaagtccaaagttcctactgcagaagaggtgaccctaaaacagtgtgagaatgtgctgagtgattgctggtagtatggagcattatacagtctgcaaatgtggagactgtaaaatgagttcagacaggaacttttagtcttgccctctgacattttggcagttcttattcaggcagaagaaagatttgtcttaattaaggcttatgttcatatgttcataattaaatagttttaaaaacctgaaagaatttgctagagccaactgtcagaattgtgctgtatccaactacaaatttatctggaaggcatttcactgccaagctttttgaatatgtagtctgaacagcgtgactctacgtctttacctcccagtcatacctcaacccactacaatctggcttctttgcatcattttttctgttagacatagtgccctttacaaagtaaaagctcaattgatatactgatgaattttaattttaatttcttatttatattttatatcctacttctaaaatattaaaaggagatatgttaagtttgtatgaaaattagacactactagtcaaataataaaataaataatctttatcacattttaaattaaamaattgagacaagaactacagaaattggaaaaaaacatgctaagcagtgaatagttactgcacatggttgaaatttcaataagggagaggaggcaaaccataaaacagtttcacagaatacaggaaaaaagaaacacgagagagaaaaataatgggcctttccatttgctgatccctctgccctcagatatttgcatgcccccagatacttcctctcatccttcagttctttcctcaaatgttaccttctcaggttcgccttttttggctaccatataaaattggaattcaacttatagcattaacacttcttatccatttttctaatttatttttcttctgagaacttacaactatctaatatactatatatcttacattttaaaaatctttaatgcatctctctcagtaaaatataagctcgtggcagggccataattagtgacataagctgtatccatttgaggagtaggaacagaagctaaattggtgttttggtcagttttggctgctatagcaaaatgccatcaatggatcgcttaaacaacgaacatttgcttctcacagttctaaaggttaggagtttcagatcaaggagccagtagaggttcttggtgaaggccctctttctgactttcagagtattgtcttcttgctgtgtcctcatatggtggaacgagattaactagctttctgtcctctttttagaaggacactaatcctattcatgttggctccaccatcatgacctcattacccaccaaaggcttcccactgggattagggcttcaacatgtgaattttggtaggcacagacattcagtccataacaattggaataggttgtagaatgaatggatggatgaatgcaaagaaaggaaatggagattgtcactatagatgacaaactttttcctactttttggctgtgcagaggaggaaggagatgtaagactcagggagaaatgttatcagattggaacaatcaaaaataattaaatggtattaaggaggctccaagaaacaacagaagagatgaaagttaaaagcatttgactctacagaaggtggaaggagatggaatctagttacacttgtggggattcctgtttactgggaggagggtcagaaacagcatcatgataacagacagaaaaaaagacagtggcagttwcaaataggtccacagagatggtggcagcactatttgggagtgccacttgaaaactttgttttgtcacagaagtagaaagaaaggttatctggtgaggaagaaggaatggaataggactggcttggaaattggaagagaaagaggaaagttttaatgagttattctggggaatgggagagtgggagtttgaccaaagaagttaagttccattgctgtgcagtgttgagagctcgatctgtgacagaggttagaccatgaggctagttttctgcataggttttcaccgtggacatggatattttcatctagacttaggatattctaagaaaggcatgatggaagaactgcaagggggctctttataaagagttatttgaagtgatgaaaaatagaatttgaacagtaaaaacttgaagtaaatagataagaaaaaataagagaagtcaataataataatagctataatttgttgctcacctactatgtgcaaacaacttttctaaatattttacatatatttactcaattcttrtgacactcctatgaagtaggtattattacttaaatttaaactaccattattactctaattttacagttaatatgaagacatctacctttatacaaaaaataaatggcaaatatggaatttgaatgtttctatagtctagttcttgtgccttcgctaaaggactttgctacacagagatcctgaggagcataaatatcactactaatgggggaattgaacaagtgaaatgggaggtttggagatgtgcattggaagagatgatgattgaattagaaaattcagaaagaacacactttaaggtaacaacaaggttctgttctaggcaacgtgaactttctttccccctgctaccctccagtggaacaattcaatgctgcaggtataaaatactttacctgcatttattgaagattatctttttcatgtatcatttttgagacaaaaaaaagttttgataagacattgagatcttagtaattttgttatggatttttaagaaaatggattaaagtattctcagtgaaagctccatgggagagcatcttgaggtaacagtctcaagaaatgggtcagactgggataaagaccaaatcacagagtagcaacatatgtttatttcaggttatgatagatcacataatttgtacttcacctttattatttcagataactagcatggagtttcagaaggtgatttttttttcaggatgaaagcttattcatgcgggtatatctttggctctagaaattactgtcatatactcagtaacctttttgaaaacttgctgattgatcatacaaatcagggtcatcatttgtgtttctcaagaaatactgaagccactccaataaataaacttcatggtaacttgttgtttttacttgatgtaatgtgactggctaaccattgtataatgtctctgtgcttccattttgcattctatagggctagaggaggtgtaccactgtggaacagtgtacaggcttccaggctcaccttgatataggaacaagcttggcctaaagaagtcagtgtggatgaagtttggtggagggagatgaattacaagactatacaggactcgtttccttgccatagaaaggaatatgaattttaatttaatgataagaagcaagtagagaygtaatgtctacccctttttataggtataaaatggagattcagaaaggttccataatttgaagatgggagtctcataagtggcaaggctggactttatactcctgtctgcctgttacaatgcctattcttttttcaataccacctttattatctggtacatagatacttaacaaatgtttctgaacatatatgtgctctgtgatacagcagatgaaactttaaataactgaagtgaatacatttaaaaatactttagatgcatttattaaaagatamcaataacaacaagctttattttgatcatttaatttttcaataatgtgttaaatactttgtatggattatcttatttattcttaataacaatcctgtgaggtaggtactattattatgcccatattgtacgtacatggacaaatatcttcacctcaatactgtgaggtaggtactattagtatactcattttataataacaaatattgaatatttaacaaatattgcaaatctatacttaaaatgggtagaataatagtacctgcctcacaggattgaggtgaagatatttgcccatggtcatacactgagtaagtgataaattcataatagcagaaactatttcactatttgcttgattgtcacagggaattctttgaaaccatgtttatatttgtggttattctgtgtatgactagatggttataaaagtttaaaaattaatttcatagttcacatttttaattttctataacaattcagagagactatccagacatatgaattaggagaataattctgaagaaatagatgacacagcaaaggactctacatataggttaggaccatattcttgttgggaagatggccaaaaaagaattttgaggatattttttcaattatttaacaaatattgaaaatctattatgttccacttggaaaagaaagaattggtgggtaggagccaactaaratccaataaacttttgtctgtgacttaactcttctgaagttgtcagaacgttatgttccccagagttagttgttttggttgacagaaatctatgatatgccaaataaagactttctagttactattaactttgccttgcatgtagaaagaaaatattactcatcagaacttatcataaatcttaggatgcagtcatatccctacatatattttgattatttcaaaatcaaatatatactttaaaaaaggcttactatgttttgaagggttcatattttttttctgaaaaatggcaaaatagtgctggcctcatgatgcttggtttagtacaggaacatacatactaatataaacagtatgcccagccaattcattatcatcctggaactatattcagcctggctactatcatgaaagatgagtagaagcagtgagctggcaaagctggcctctgcctctggttgttaagctgttggcagctcaggatgcatgacctttcaaatatacgcttytaattcaggacttcttatgatgtcatgtagttatgttcttcccttttagtgtattctctcttcaaaattctgtgctgaaaaaggaaaaaaaagaaatgtaagctactatccttttggccaaatgttgaacttttccttctgtaactttgtaggtaggagacagcagagtaactgatcttcctactgaaatgaatttccttgagcaaaattatttcaaaaaatatgtctggtatctttgtttatacctcagggttgccgagctgtcagctgcatgcctgcttttcattgaagcatatgtatatttgtgtatatatgtgtttgtatggcttccaatagcatagtaataatttcaggggaggaaatagaaaagaaagcaagataaatgtattacatttttgtatttcctccttgcatttttttaaagataagactctgttgtaaaawataaactggcaatttgatcattacttgttattcatttgaactagttcagtcaacagataatggacagtgaacagagagacctcttttggtaagccatgtagtttttccaggggtgattgttatgctatgtgtatttagatagaagcttttccctgtgtaatcagcttgctgctgcccattttactgccaaacattccttctctatggtagcataatactgttaccaagggaacagcttatggccgacacatacagtagtgccacaaattaatttcacagttatcaggatataaggtgataacagtaacgtgagctactgtgaaattaccattgttcccacagagttagtgtaattattacttttgtggtaactaagcaaataattcacatcactactcctggatgtttgttctctcttctctgtctcaccctccttctttgtctttccctttccttcctatattttcctcttttgttgattcagactctctccctgagtctcttttcacaattaccaattaatgtagagtattttttatattggcattaagaaagagttttattgaagtggggtgaaggcatctcatatatgtaactcatgggcataattaggatgttcacttctatcaaagatataaaggactaaaacagtgtattgagaggatacattcaatttgtgatcaatgtagactcagagattccagttttattttcatagaatgttaacttcatgtgttgaatagaaggatcagtttaatgtgattaaaagcagtggagaaaaattaacttccctaattagctgtgttgcttaggacaaggaaaacaacttagctttttagtacttacatctataaaattgggataataataatgcctacctaacagaattggtatgtggattaaaagagatatgtgtgaaagtgaattttaaactgtacaataaaagttttaagctattatgatcattgtcatataaatggggatacatctgtaaaatggggttaagtatattcacctaacagaattggtatgtggatgaaaagagatatgtgtacaaatgaattttcagctgtacaatacaagttttaagctattaccatcattgttatattttaatggaggcatcttttgatgatagcctaccctcattatcagaaaatttataaggataattcaaaataacagcagtaacacagggaagaacactttttattgcattttattataataaaaagagtgtttcattatacctagggcacaacaaaatgagatgttatcattataaaataacagtaattttaataatgaaattttccagagaatgagtcatattttttattgtttttattgagtatatgtatatgttaattaaaatttcagcattgaaatataaaataatataggagtgtgtatagtatgtccattattttttaaaaagctacaatggtgagtacatgtgaaatatgagttgttcactatgtcaaaaagtgaagttgctaagacaaaggtaaaattatagaaatgagtttatgtaggaatgtttgtttttaattgcgtcaatgtgcattatgatctttagtctccattctatgttattttgcttttaaaacgtattttatgtattctgttagcaagatcagcatatagctaacagttagtatcagttactaaatgttgagtagttaattatgtatttatttatcattctaacactataaattatacacttttagcagttagaaaattgatacatgatagaataaaataatttgatgaaatttgtagctaggcatatttgttgaatgaatgaattaaatatggtgaatatgtagtaaactgcctcccattgctaaatgtctttttagagagggtaggaaattaaaaataattattttctcatgtaaatttttctgccacccattttgaagttacccaacactggtaactttacataaagaagtatgactttaactggactctgtgctcatcccattagttaagactgctttctcacattattattattttggaaataagtaaaattatttttatttcctactcttatttgttctctacaaagaaaatctaatgtgatctacaaaaagatactagaacaaacaagattaggtatattgcaagattgatatacaaaaatcaaatatattctaatcactaacaacaaacaattaaaaattaaaacttaaagcaataccatttaagatagcataaaaattatacagtactagggataaatctgacttgtgaaagatgtgaaagatatgtgtactaaaaatctatgtaccctgccctgaaataagtgaagcatggcttcccactttttaagtgtgaaataagcgtggtgacttttttccgaaaagtataatatgtaaagagttggaaaagagtaactttacagaagagaagcctgaaaaatactaactagccaggcaatcaagattgatatcaatggtagtaagtcatgttgataatatgtacccttaggtgaatggaatccaggtcaaacaagctttttaaaatagagatttaaaaacaaaacggaagtaatatatgttaactgtaaacatctatgatcagtctttaacgtttttaatttgcttttctataatggtgaatgatgctgaatatcttttcatgtgttttatgccatctgtatgtcttatttggtaatgtgtctgtttaggacatttgtttattttttttggtcggcttgtttctgttattatttatttttgagagtttaaacaatattatggattcaagttcttatcagatatgtgccttgaaaatatttcctcctagtatgtgggttgtcttttcattctcttaagaatgtcttttggccttgcctggtggcttatgcctgtaatcccaaaatttgggaaggctgaggttgatggattgcttgagcccaggagtttgaggctagtctgggtaacatggtgaaactctatccttactaaatatacaaaaattagctgggcatagtggcgcatgcctgtagtcccagctacttgggaggctgaggaaggaagatcacctgagcccaggaagttgaggctgcagtgagccatgattgcaccacagcactctagcttgggcgactggagtgacaccctgtctcaaacaaacaaacaaacaaaccaaacaaacaaacaaacacaacaaccaggtgttttaaagaacagaaattgttatttttgatgaagttaaatttatcaatttcttgtgctatgatgtgtattttggtgtcatatctaaaaaaatctttgtctaccctagggttgcaaatattttctgccatgttttcctctagaagttgtgtagttttgtgttttacatttggctctaggttacatttcacgttaaattttatatatggtatgagttatggtcaaagttttttttcgttttgttttgtttttgtttttttcatatgggcatccaattgttttaacaccattgtggaaaagactcatttctccacggaattgactttgcacttttatgaaaaccagttgtcagtatatttgtgggtctctttctggactttgtattctgtggcattgatctttttttctatattaacactggtatcatattgtcttcacagttagtcttgaaagcagttagttatagttctcaaagttagttttcctttttataagttgtttggctattctaggtcacctgaaattccatatgaattttagaataagtttgtctatttttactaaaagcatctgctaggattttgattggggctgtgttgacttgatatatcaatttgaggtgaatcaccatcttaacaaaattgagtcttctgacccatgaacatagtataactttccattttgtaaggactttaaatttttttctcagcatggtagttttttaaaacatattttaaaacttaggaatagttttagggttacagaaaaatarcagagacagtacactatatagagatttcccacctacaccaagtcagtttcctttatctttaacatcttatataaatgtgctttgtcaaattaatgaaccagtattgatacattattattaactgaagtgcatactttattcgtatttcctcagtttttacataatgttctttttctgatttagaattccatccaggataccaaattatatttacgtgttatgtcttctgaggcttctcttggctgtggcagtttgtccaacttaccctgtttttgatgaccttgacagttttgaggagtattggtcaagtattttgtagaatgtgccttacttagaattcgtctgatgttttcctcatgattagagtgggattactggttttgggaggacaagaactaagatgaagtgtcattctcttattttcatgaaattttatgggcgttttgatgtgattgaggcttagtttcatcatctgtaaagtggagataatgataatggcatgcagtaaacactaagtgagaaaactatgtgtgtaaagtatttagcattaagaagatctgatgcagactaaagagctcagtagcggccaggcgcggtggctcacgcctgtaatcccagcagtttgggaggctgaggtggacagatcacctgaggtcaatagttcaagatcggcctgaccaacatggtgaaaccccgtctctactaaaaaatataaaaattagctgggtgtgttggctgcctggaagcagagagaattgcttgaacctggggggtggaggttgcagtgagccaagcttgcaccactgcactccagcctgggcagcagagcaagactctgtctcaaaaaaaaaaaataaaataaaaaaataaaagctcagtagcagtatttttctctttgggagatgggcaaggccatatgactagtttggcgtcaggagtatctatgattaaggtcttcttactgcactgtccttccttgtgtctaatgggcataccaaaaatagttgttaatggaaatatcttcactcggtactgcattatgactatgcataatagagttagcaggtgaaaggttctcttagaacaattaagaagtatgaatccattccatcagctaaagcatttaaaaatatagtttttttttgtaattggtttctcaaactcaaaatattatgagcactctgcttcgcagagcaataggatattgacaatatttgggtttttttcttttttacccattactaacttcctttctatatttctacttctttgtcttttcctacaatgtaacataaaaaagatccattacaatattggtgcagctaaatatttgagtgcacaaattttagtgatcagaatagctttagacaggtgtataaaatgcttgttttttctctgtcctcagtgtgggaaactgaataggataaattaggttagtcaatacactagcatttaattattctttttctcaaaagaaagaagtttttaaagtagtaaaaagaactgtatctgaggccagctgattcacaaccagaccatcacatttagttactagacttaagcatggcttctctggagacattctgtgttaccaaaaatgcaaattactccttcaaaaaatttacacatggtacaaatttagcacacctgtagtatgaatctacattagaccacaaaacttgttccaatactctaatgctacagttgcaaaagcacatcattatggtttccaaattaagcagaggtttcagtggttttaattttgtgaagatgttttccttcctgaatcatattgtgagtctagtagttcttaactgggggactgggtgttcctgtcttttggaggacatttggaaatgtatggacatttggaaatgattgtcacaatgatttttaggttctctgacatttgataggaaggggtcggaaatacaatacatcccacaatgttgtggaaagcatttaataaaagggaagcattaaatatttcttaaaaatgtgaatcatgccacttgagaactgtgggtaatcctgatgtcttatgagaaaaatctgtgtttatgtacattatgtattaaactgttatttagacataactttggatgaaccaactgccttttttcttactgaatatgtaaaaattaataaagaagctataagctcaacagaataacttatctattcataaaatgtctttcaatagtttaatagataactggaaatttatttttgatagcagcttatactaaagcaaataaggacgtgaaaattgtagataatctttaatcatgcttacaaatttgattaaaatcatctgttgattttttttcctaattgaatcttttgaactcaacagaatgtctttctagtaattctactttttccaatatgtgacctaacatgagcctagtcttttgaagaattctaaagatgagtgaaaaagagatgtgaagagagtaagaaataatatccaaatggtgagaacacagaaaataaccacactgtttttactttttcaacatatggtattatccacattttgcagaaaaatagaatgtattcaagcacgttttctgagacaaatgtcagaaaagtaagagaaccatataaatcacattgttgcagactattctgtgccctccatgaaaacattgtatttttgtttgaaatgtgtaaattctgtagaaaatcagttctctctagggtcgtctggtgtagaatccttctgggctttgtatcatccttttcaatatgtttaagaaataactattagagactaaaatattagtatcattcctctctttcttatgcaagaaaagtgacctcttttagcagcaacttttctgtgtaaaaagcacgtgatcttgaagtcagctgggtccatgaagagtattcgttttgaacctaggccaactttaagacagaattgatcatttttctccaataccagaaagagtttgctcttagaaaatggtaagcagtgtggggattccagatgatttcttgagggaggtagatgaaaagtttacaacgtaggtcccaggtttctgttaatgtggctcctcattagacttgttccttccccaaagctgccccacctcccacaaatacctcaagtgatgctttgcggtttttctctgttctttaacttgatatttctcccttgcaatcttgaagggcttcgttttttgtttttcaaaaccatcaatctctaagtctatcaaagacttaaagcagtatataaattaatcatattgtgttaaagctgcatgctaataactagctgagatcagctgtactcagaggttgagcattttgatttgaggaagggagctgagtgatttgtggacacggagtctttcaggaggtatatctaagaagacatatttattttattcttaattttgttattcaaatactgcttttgagaaaattatgaagtagcaaaggaacttaggccagcatgaggtcatatgggcttggaaggaagtgtgggaggtgagaaaaaaagcacagaaaaaacaaggctatttaaaattttccttatcatctacaataaataatatgacttattttctgagggtgaaagcctaaaattcattttcataaactatttcccagaatttaaactactagaattcaccatgcagggttttgtatcttactgatcaatagtaaacatgcaaataatagcttgtgattcaattttgcaaaagaaagaaatgctgttaaatgattgatgctcccagtatagtcagaagccatatcattaaactgtgtctcatataaagcatttctgagggagggtcagctcatgtgattagttatatttgcttctgaaatatgtaatatatggatagtgctttcaaattttaatactgggtaattagtagattaattttatactcaaattagggctgttatgtggacattagccagattctgggtcactatgaatttattattgaatgaaggtactaatgtgtaycccagtgcaggttatttcttgggttaaggttttattcagccacaggtgtttgcattaaacagcttgttcccagcactttgggaagcctaggtgggcggtagatcgcatgagctcaccagtttgagaccagcctgggtaacgtggtgaaaccccatctctacaaaaaatacaaaaattagccgggcatggtggtgcatgcctgtagtcctagctactcaggaggcttaggtaggacgatgacttgaacctgggaggcggaggttgcagtgagccgagatggtgcctgggccatagagccagagtttgcttggaaacaaacaacaacaacaacaacaacaataagaaaaataatacagcttgtatttttgcctttgcaatattattcaatcctggatgagaattcaggggaattgcctttctgtcctttattagctgattagccttgggaaaatcaggttggattctataggcctatgtactccttgatcacttttttctcacttcatgttagttatcaattgctacataatcaaccattccaaacctcaatggcctaatgcaataacaacttataattttttgcaattgtgtcaattggctggactcagtgggtagttcgttggtcttgcttgagctcattcaaactatttcagtgatgtgggagcgccgctgatgctggcaggaccaagatggtctctcatgtagttgacagttggtactgatcgtcagctaaggtatctggcatctttcttctctctcatatggcttctcctcctttggtaggctaaactaatatcttacagcctagaggtctggattctaaaggagcaaaagtggaagttaccaagcttctttaaaaccaggttcaaaactggtgcagcatcacttctgccatcattttataggtcattggaactcacaaagtagtccagattcaagggaagggaatgaaggtcccaagtcyctgttaatgtgcctcctctgtagctttgtttcttccccaaagctgccccacgtcctgcacatacctcatggrttgctgttgcagctctctatatatcttcatgggataaatatcacggacatacagggatgggagggtttattggcaccatctttgaagtaaagctgccacttattacaaataaagtagttttcacattgtgttgcaatggcaatttaacctgtctacctctctactaccgtgtgatttttctagaggaagctttattactaaatcttgtctcttatatgtatgcagcaggtgaccaataaaggtcaatggtagagtgatctctatgttgaagttgttgattatggtaatatcaatgtttatatatgcttatattttagcacttacatgtaaatatcttcacctcttttcagaaaagaggattttgagtttaacttagttttcaaaagtgctctattattgttatagccttgttcgacggaacttctgtttgttcagaatttcccttaagatttagctttttttttcttttttatgaacaaatggaggacatcataaaaattgcagaaggatcattattttaaatggtgtgccttagacttgcagtctttgccaagaattattctttaaagtgtttgctacttctctgcctaacggtaagttgaatcttgtaaatagacctctttcttcttcttcacgtattacagactagcaggggaactttgccatggatgactgccattattctaaatgcaggctagaaatgcaggttgacaatttaagccagcagttgtgatatagcatcttgaaacttctttatttccaaagtgttttcattatgatctatttcactgtttaggataaaagtctcacttatttcattttactttagatgttgatgcaattgtggcttattaagttatgctttcaaatattttcactgccaatatcaagtatcctactgggaaatctgtgaaacaagatgagaggctttattttctttctgaatttaggtattatttgtgtgcatatataacttgaaaattgtagtagtattttctgtaattgaccaaatgttcaatttttttcattactattgtatggaaaataggagaatgcatgaatattttaaggactgttcttagttcacagtgacctgtggttttttttcctcaaagccagagaaataaagcataaaatatgaagcaatggctaactagtctagaagttaggaacttccatgcaaaaggagaacaatttacacagttttctccctcactagttatgtaataattagctttttatttccacccaaattctttcaggtatatactatattttaacaagctttccctttgcaaatttttgctatttttaggtcaaacaaaataagtaataactccttgttgccaagataacataagttaactcattgccttcagaatgtgtaatttaatattggccttcagaaatcacactcttcagcctaaaaatagtgctgctctttaggtgtaaacttcaggtgtctattctgttttattcagagacaagctaataaaatgacttatacaaatgtctcctcaggtagggccctcatcttgtgtgtgagcacatttccaggatgagaaggataaatattgaatggatggtcctttggtataaaataagataatctttgatagatggtggttttagatgagaacattacaataattcagagtggactaagcacattttatctttgtgctttaaaaaaaatcatttgtaaggaagatgtcttttgcgtaaaagtgaaggccaattacacgtcacaaatgtccacatttttacatatcacacttgttttcatctgtacgttaaaagaatccatgaatttcatcagaaatataaattttctagggcaccaatcatcaagtttgttagaattggtaaagtgttggttaataataaacatgtaaaagagaaaggaatgcttttctaaaagttgcccttgttctttttagagtaatgtgatttaattgccattcatcttctgattgtcttaaattgcgtattttgggagagaagttgaatcccttttctttcttttttttttttttaatttggctgaggcatatcgttgacccaagatttaaaggccaaattgggaagatatcattgcagtcaagagtcagtggcccggccggacgtggtggctcaagcctgtaatcccagcactttgggaggccgaggcaggcggatcatgaggtcaggagatcgagaccgtcctggctaacacagtgaaaccccatctctactacaaaatacaaaaaattagctgggcgtggtggccagcacctgtagtcccagctactagggaggctgaggcaggagaatggcatgaacccgggaggtggagtttgcagtgagcggagaatgtgccactgcactccagcctgggtgacagagcgagactccgtctaaaaaaaaaaaaaaaaaaaaaaaaaaaaaagagtcagtggcccaaaagaaaaaaagataatctctcttgtggccagcataaagatctattaataaacacagggtgtgtgatgtgcttgaaactcactgcatatttaggttctattcatgtttggagaactgctataaaaacatacggcattgaagactgttgatggatgagtgtcattgcctgttgaaagcttcaaatcacaaatatgtgtgtaagtaattattttcttccatttgtgaaataccactttaaatatatattcaaattgaataatatgcataacataaaacagtgatccaaactgatttgtatgacagtatgaagaacacacagatagaagaaatctgtgtggtgcatgttgtatctcagggagatagatttttacctttctcatattcagtaaagtacttttatatgttatacattatgaaaataacaaatgaaatatgcataattattaaacgttcaatggactttgtggtgtttgaagcttatacaaaatgcaagtatattttgctatgctgctatgtttttctctttctacaaataaaagtttgtattagctatattctcatttaatgattttactaaacaacaggatgtgaataattttcattagacagcaaagattaataaatttatttgtgtttattaaaatcagaacaccatgaaattataaaaaattatattttacaaatagcttattgtctttcttgcttttaagcacattatatcctcacacaaaagtaaccagggcaggaattgttttcctagcatctgtttgtcattaaaattcttctggacataaaattttatgtattggctacctttgttagtgtctatttaactgtataaaaaatggaggccttaagaagttgatatagatgacagtccaaatcacagtctcatgacaatgtcacattggataactcaggttaatctggtaatatgcatccctcacatgtttttcacagtagttagaagagactgtctgaaaaggaaataggagagaggtaggtagatttgaacacagatcatttatgagagagagtgcttccatagtgcctgtgtggagtaataggaaatataaactggatttcttttcttggtaaagtaatcgcctattttgttaaatgagaaccacccagaacattttgtactacacttcttcagaaagatagtttagtcttataaaactacatatatttacatttgtttaaaacacttagagacttaagtgtgttctcttgttctttatgtcctcttcatctagagatctacttcatatatcccctagagcttcttgccagggaagcttggttactaagtagatacctacactctcaactgttggtataaagcgctgagaaattggttttatttacactgtaagagtaattttttttttwaaaaaaggaaaagcatggcttatatctaaggaaacactgttgtttggagaggtaatgaatggcaattagcaggaatcgtcatgtctcccattttgctttttagtattcctcctatgttgaacgctgacagtctctttggaatagaaaatcaaatgaagtcaagtattgcatattagatggctgataatgtgattcatatctcttataacctattacttctattactaacagcaaaaagaaagtgagaggataatactgccagtgtagtttcctccctgcttattaagccaagatatgtgtactgcctgtactctgaacttgcctctgctgagrtagcatctattgtcatgggaaccattattttattggaagcatgagagatttcagggaaaagctgatgctttctgttaccatgatattgggttagacttgggatttagaataaattactgaccataagaaaggtgtagcctttctctgaatgagttgtcttccgaatctgcaactttttttgtcttttccagtttcatgacctctggtaaatgatgcctccttactttgattaaaaataaaataacaaggctgggtgtggtggctcacaccttgtaatctcagcactttgggaggccaagacaggtgggtcacctgaagtcagaagttcaagaccagcttggccaacatggtgaaaccccatctctaaaacacaataattagctgggtgtggtggtggatgcctgtaatcccagctactcagaaggctgaggtgagagaatcacttgaatccaggaggtggaggttgcagtgagccgagatcacaccactatactccatcatgagtgacagcaagactctgtctcaaaaaaataaataagtaaataaataaataaaaaataaaataaaataacaaagctgtattctttccttatttggaaacatctccctgggaaagcagtccctacttgccaaacccgataaagcacatctgattttctgtggtgtaagtcatcttgtataaaagtattactttaagtaggatgatcaatacctattcctgtacaactagggcatggagttctttttcattttggaggaggccagttatttatagtcatgatcattcgaataatagttttttcaaaaatccattttttatccttttctgttcaacagcgttggctctgtaagaaatagaaaggggacatttgagagatgagtaacacagggattataacagctagcatttggtgcttctctccaacacactcctaccccatgctttcagaattctccagtgcccaccacagtattgcacattcccctaggactgtgccttcactatgtcggctcacatggctcacattagggtgaaccatggtatcaccctgatgataccaccacctgatatccagggaatactttctcagtcctgactcctacagacaaaagtaacaaaggastttgaccatttattctgtcaaaggtatcaaaggaaaataatttactctttataaatgatttaagacatttgattaatactattaaagatagaagggattgtcatataaagtagcactgaatttgtggtcaatttctgagttgtttttcattcactggtcttgcctttatactacttttactttctgtgcttttactgaacgttttaaatctaaacagggaaatgaataaaattagaatacagtttagtaaaatgggaagtaaagtgagtatacatggcagtgcccccagcaaatgtataattcttagtcctctacctgcagatagggaagagctcactgtgatggggtcccatgatccaggaaaggcaactgcaagggatgtggacttctgtagaacatgctcaaagcaaagctgcagtgactgctgtctgttgtgctgcaaagacagctgtctggggccacagaagaaaatgggatagtgggtttgaaagaaaggcaaatctgtagagaaatgaagataacagaggtggtttaggctggtagctctgcgccgtgatttatgtaatgtgaagtgaaccaggcagtatggacaaagcatcctccacagacctttgtttgcagtggtttaatcatgtatctattagtgtgagaggatgaggaagagagagaacagaaaaaggtgtctgagtttacttcctcaacaacttaaaatttatctttctgtccctacatggttaccttgtactaataccttccagtgttgcacttttcggtctaagagatttaccaaagaataaaggattggaatgagacacaggcctgacgctaaagtgaatcagtcagaaccaccatatcctgtttctgtgtgatcttaagcagctttctcaacctttgctaagactcagtcttctcctctgtggacatgcatggtgtggttattgagctaagctgtatctaaatttataagcatttgaaatattatttagtgctgattaaccacattaaaatgcattattggtatagaaaaaatgtgagttgacttgttaaaatcatttgtataatttttagggtttctttagaagataggtaaataatgtctatcatttaaagctgctaagaaattatttgtaccacagttttggaaggtgtgttcatggatactctcaggaactcagtgatctttatcacatcattaggatcacatatacatttaggatgtgattcaggttgatataaatcattttgtttcagaacttgcagggcattttttctaccctaaacaagactctagttgttaaagaagggtttaatgatgttgaaaggatgtctttatgtaactaaacatgcatggaacatgttatacagtaggtgctcaatggatgcatatatgtagacatacaagaatggatgagcaaatcaaaacattccctggggcatctcagaaatggtaatgcttacactctaaatatgagataactacatatgtctaattttatcaaacaaatggtggtcttaaaatcataggtaatttttgtaccaaaagtataaagcaaatttattagtttttacttttgtatacatttacaatgaatatttcctcaaaatgtttaaacatttatagtaatcacatacagtggatggaaatagaactctataatgaagatacaggtggaggtttagccaaccatagcagtgtagctaagactgctgtatcatgagtaatacagcttgttttcttggttttctgtggctgtgtgctccaagcagattgccccattaactgtcgtgagagttgcagttgtagtcattctggacattatgaagcttctagaataatgcctgttagttatttgttctgctgttatgttaaagatacgttcatattttcattgtctttaccttgctgtattctcttaaaaatatgatattgtctttatctgaaatagtatcaagcatctttagttttctttaaatgtcagtgaaattactctgcaaattgagcgaccaaatttttagtggtgaacacccagagatccatgcaatacagtttatagtaattcttcatttgcaatttgacaagttgcatgtttccatctggcttcttttcagttaaaagaagggacagaatgaggttttgtagagtactacttgcttggtagaacttagaatatacctccttctgagttgacagctgttgcagtatgttcaagaagtatccatgatttcttccctgtggcgtcaccaggtgctgtagtgcctggaggagttaaacgtggcactagcttttacagatgtcatcattgttatccacatgtaagaactctcttgattaaaactttgggcaaacagcaaatcagtaattaaactaagcattatgttattgtgcatgactttttaaaaaatttattgttcttttgtccatgaagtttaaacaagttttagtgaattttcagtgttcatgacatatggaaaagtttactgaattgtcaacttttttctcaaaacaacaatgtcgaagtcttaatcatagcctttatttgttcatcagtttctaatttttccccatttatgatttaactgcaactgagcattttactgaaatgtttttgttagtaattctgcttaattcraaaagaacacaaaggtgattacaaaagtacagtacaataagttaatactctttttcctcaattccaagacatcactgatttaaaaattgcttttgtgggagaacacaactgcattaaatgtaattataaaacataacttgattttagaagcttcactgaaatcaaacaatgtagaaattaagttatgtaagtagccattatatattaggcacccaataaatattagatatctctaaaggtattttttgtcacaacttatgaatagacaatctataatttatcctagagatgaagtaactgatcatggccctacagctagtaaaagttagagttggttctagttgttcaacttctaaattcttatctttccatagaaacaagttgttacataaagtaaatggtactaccaggccaaagtgaaaataaggccaaaaaaaaagatgcaaccaggagtgataatactgtacaaaatgcacgccatgatttcttatatacttgataaagataaaaaataaattattctgtaagtactttagcaactaatgcaaaaagggaaacagagaacccattacaaacatgaatcactggatccatagagaagaataaatcagttcctgtataaaaacttcatgtttcatggtgcaatggaaatttctactgtggatactcaaaaagagggttatatgtagacaggtactttattttgtagtagtagtaattttgtagtactgttttattttgtcttcttgtaaatttcacacactagtgtatttatgtttacagtcttttttcaattttagtctttattttccctgtactttcttcaaatctaagctattgcagcttgtaagtctttgtgtgtgtgtgkatgtgtgtgtgtgtgtttgcaaaattatagagacaataagggcaaatacttgaatataacttcttaaactgttattggaaaaatagattctaaattttaggttasttgccagcatgtaatcagttatatgcctgattcttggatttaaaaatccttgtgaaaccatgtcaaaattattattttgttccaaatctaaaaatacccttttaaatgtagtgtttttctctcaggttgctttcaatagagctaataacttaaaaatctcaaataaattccagataatttctagacattatggctatattcctggtgaaggtttatttttataacagaatattctgaaaattaagatataaaaagaattgtcataaggtggcagtatgtttcaatgctaaccatcagtatagaaagagagcttgttgaaccaagtggttccttagctagtttgagctctgtatgaaaattccctgtagattttttttgaggaaaattgagcagctatttcttaggtaatatgtgtgaaattatcaaagatactactcttttgattttcagtattacttactgctgcataaaataaaaccttttccttcaccctagctatgcctatatatattgatatagcaatgaaaataaatgccttttgttatggtcattgatacatttaagtagtaagtgagtttacatgttttaagatataacattttaggttatagtcctgttgaatattgtgtaatagttataactttgactttggtagcattgaatgcagaagtattttggcaggatttaataaatagcattagtctatggagaagtaatagaatttaagctttttaatgaaatagagtaagtttaatttcttaccttctcactcattagctttgcaaacttgagctagttacttgggctctggattttttttcttgttaataatttagagataatataatgtttaccacacaagactgttgaagaatttaatgagatgatgtttatgggtatgctttctaaattttgagatgttttctaattattattataaccaaataatatattaactcttccttccctcccttcctccctccctccctccctctctctctctctctctctctctctctctctttctttctttctttctttttttttttttttttttgacagggtcttactctgttgcccagattggagttcagtggcggagccttgactcactgcaatctccgtctcatgggttcaagctgtcctggtgcctcagcttccctagtagctgggactacagacgtgtgctaccatgcctggctaatttttgtatttttagtagagatggggttgcaccatgttggccaggctggtctcaaactcctgacctcaggtgatctgcctgcctaggcctcccaaagtgcttgattacaggtgtgagccactacacctggctcctatttctattttctgatgtaatcttaagagaaaaacttgagggttgtcgcatttatttgccacatgacaggttagtacataatggctacttcaccacacagtcaagctagaacaaaaaaccaaaaagcatgtcttgttcatcatcaaccatatatcaacattaaagcatttttaaatttcctaccaatattatgtgcatggaggaggttactaggacccagaggacatgatatctgtccttaaatacctttctgtttggctgaaaaaataaaactagataagaaatgggaagacctgtgttctagggttagctggctttgaaatcttgaataggtgtcaaaagttctgtggttccagtctctcatttgtacattgaacttgatcatctgtaaggtcccttctggcacttttatccacagaatattttgtgttatgaatttgctaataagtaagcaacatacagtagattttcaaagggaagagaaattagtgtggccttgagtatttgcagtctctttggccttatttgcaagaaacagctttgtagttgctcataagtgaatggatagtcattttcatgactaaataatcttgtctctatggtaagtgaaaaaatatacatacataacatttaaaagcctggagtatattaattttttaaaagttttaatgttataaatgatctgggtgaaaaagcgaaacatttaaaatttttacaactaggtgttaggtagtaaataatgaatactcagagaagaaaagacatacagataaataattgttgcagttattagtagttccatcatggtaaatgatatccacacttcctatagtatttttagataatttcacttagagtatataacttttgtcgaaaagtttgaatactactttaattaaaactcacgtttgtagctttgcgcctttatgtattctcaaataccctagaaaatgtctaaacttgtaataacagtaacaactaattttgacaattaataaagtcctaaagaaaaatacactaagtatacatcaaaaagaatttccataagaaaactttaagcaggtttcctatttttgttgtgctccaaattgttgtgctccaaaacgtagactgcctaagaccaaggaaggaaaatgcttcaatactctgcctctgcctggagaatttacacttgtgttaatgaggaagctgagtatcagtttctctgtcttttttagattgtctgtgcaaaacagaggactttttcctgggtctccactacttcttcttctacatgcaggcagatgttgaaaagcatagaaaaactagagagaacgtcttgggaaaataatccaatcataagacctttttaagaggatcacctcaaaaaataaagacttgcaggttgtatgatacagatgaaccctggtagcagtgcctgcaactactacgcactatattctaacatcctggagcatactgaaaaatattaacctttgtgataacttcagagatatggacacaccttggcgtaattttaggacttcagcacagttcatgaaagcatgacttctttgaaaaaggagcaaaatatagactgagataaaacaaaggaaagaggtaagacagaattaagaatctaaaaacattaaataaactccactttgcaggcattcatgagtagaattatagctaaagaaaaatacaatcagtggtgaaaaaagaaatttgatcagctcttgataaagcagatgaaaatgataaagcttaaaattatgtgagacactctgttgtgctatcaaatgctagatcttattcattctatgtttttgtaaccattaaccatccccacctttccccacctgctttccctcccaaccttatcaaacatcacatgtagcctatacatatatacacctaatatgcacccaccgtaagtaaaaatgaaaaaattaacagaaaatgaaacacatcatagaaaattatttttaaaattctaaatgtaaattaagatacagtaatgtgagacaaactcagtaatattcaggataaatgatgacccaatgtgggatttcttgaattcactaaaaaactatttgcattctagctatggtatcattcaattttctggaaatacagcaataaacaaagcaaacattacacctgctctcacaaagatgacatcctgaggaggaagacagattataaacattaggacacaagaatatatataatatgttgggagatgataacatgttgagtaaaaacagagcagagttaagaatcgagagtagggaggcagaaataggtataccccaaagagaaagttaaataagtataaccaataatcagagatgtcatagaagagttttttctttacctgaatgtataactccaaatgatttattttcctagtttactattatctagtcaagttattatactacagcaattaagaaaagtcctgccaataaatatgtaggcaaaagggacagataggttaccaagagcagggggggaaatttaggtggcttcacctattcacttccatatatcagaagataatagaaaaattttgtctgcagaattttaaaagaaattatgttgtgggctaacagtttcaygtagaggcaagatagttaatgtatgttggtatataaatatattcttagacattcaggggttcagaaaatataccatttatctaacctattaggaaaaaaacctggaaaatattttacacttgaatggaaaacaatttagaaattgagagtacaagtgaatataaaagacaaatatttttaaaatagtagataataatatgagtctggcaatataatgatgataatctacatataaaccccagacactgtcacaaacctggcattcatagagcttctttcttttttttgtccctactccagtttggcatgcagtgaggtgacctttgaggatgctatttctagcaaatcattgatgatgatttggacattcaaaaggtttttcccttgtatgttttcaaagatgttctttaaaatgttcaaaatcgtcaaaccgtttcccacagtactgatatacatgaattttttttcctagttctttcccagttaccaactacttcagggtagttcaatttaggtgctgtttccgtgtgctctccagaagatactttttattgcgtatttcacacttgaaactctcagtagaatgtgatttcatgtgttccttaaaatggcaaagcaatttaaaggtggctgttgggcatggcctttgcatgctgtggacatgcccaggcacctgagatgggaggggaaagagtaagggtagatacccagagccatacttgcctgtggctttttaggtagaggctgagtcggtgtacctctacaggtggtctgatttgcacctttggcagctgagtgaaatgctcattttacctagtaacattgccacagcctctagcaaaactcttaatatcataaaggaagagataagagcctttcaaacagtgagagagagacaagagacgaagtctggggtgtttaaccagcctggttagggtggttaaaactccatgagggcaaacagatccttttactcacaggaaagagagagaggtggcagtgttttggaagagtggcagatcctacagttttgcattcatactctccttccaggatcctggatgagccccaggtaaaacaggaaacgttctcttatccccctcacagggcatgcaayggtggtgtggcttgcttcttcattgtcccaaagctcaaacccctagggggagcatgcatatgggcaggtagtggggaatgtggaccccacggcagcatctagggttgggtgtttacggctcccaaagctccagtgaacgtgtgttacagtgtgctttcagcttaggtgtccacaggcagcttgtgttaatcagcccaattagaccttctgccttatcacaaggacagaggggcttctttctgtatcctgggttcttgccttagtgtactgaaaaaatcagatcacatgtgggcttggaagatgggtgcaaagttttttattgagtggtggaagtaactgtcagcagatggatggggagctagaagggggatggagtaggaaggtggtcttcccctggagttgggcagctcagtggctgggctcttctccaaccaccctcagccaaattccatgtaatccgcttcgttctgccatctatggccrtgtcgttctgccatcgatggcaaacacagtgtctgtcagtgtgtttttctgctggtgtgttccactcaatgtccagctgcctgtgtctgtgtgcctcctcgtgtctcggggtttttataggcacaggatggggggagcatggtgggtcagagtggtcttggaaaatggaacattcggacgtgaaaataggagtgctgttctcacttaggtccgtgggccacaggcccgagggtagaaccctcaccggggacaatgcccttctctgcccagcacttccctgcccttctcctgtatcattagtaaatatgaattaaacttatttactaatatcctaatatgtcttgtggaaataagctcagaggaaatatatattcatgattaagagtgttggaattaaatttcctggattcaaattttacttgaaccactttctggctcagttgtctcatttgtgcagtcatttgataaatagcattagcctcccaggattgatgtaagaatacataagttaccctattgaaaattagcggggtataggcattgtaagaactcagtgtttatttcagagccattgttagagatagaataaaactcacacttcttccatagggctctgaaaaagttagttcaaaacaaattttaaatttcttagctagctaattatttagattcctgattttctactctccaagtgaatctcctgcagaggccatgaaaaatcatagaggccatggaaaatcatctgtatagagctctatcagagaccatccatcctcttcagaaatctggcctctcagcttttcaactttattagaagaaatatttctattctttgtaagtttacttttaaggtatgccttcaatcaaactagtttacctccttcagcaccttgttccctcatgtatatgtttgtatgttgttgttgttatgctagattctccattctcctctacttaccagtttcctccatttgtaagcatgtatgagattcttctatactgaatatgctttggctcaattttcctgttctccctagttatcattctacttaaattctttctttcacaagtcagcctattttgaacaaatctgcacacacaaacaatgcatctgtttcctcatcaaatgcttacttccaacctgtgaaattacacttctgccttcaatgtgatctattgaaattatacttttatagatgactgtggagttctccaaattcaagtggcttctctacagttttctgtggagagaagataggatgagaggtggaatactgctgttgttaactgaacaggctggatagctaacttttcctttaataaaagaaagaaagaagtacaatttctgagttctttaaggtcaaacatggatttgactcatcccctgctgtatcctcatgaccttgtgcagtgcctaagactatggaggacactcaagaagtagttattgaatacagaggatgctgagtggcaaaattgagagtcttgtcttattttctccattttccttgtattccctgatgagaatgaggaagtcagagagtagtttaaagagataaaaaaatttaagacaacatcattgggcagaaaaagtgagaggactttgataaataaagatttatcttttatttttgtataatatgataaagaatacaagaaagaatattaataccttttacttatttttctacttactaaattttatagccttttccttttattaagaaatggaaataagttgagcataagaaaagaccatgtagcagataatattttataatatattttgtaagataaaacaaaaggtgctttaaattattagactatgtaatcaagcacacaagttattcattttgaaacagcaatggcttttttccttatccattaaatatgaatgttttcgtaattatttagaaaatctgtggggctaacgtactgtctatcatattgacagatgaagtcagaaacattcttaatccccaaatatgggttatataattagttttaaagaagattaatgcattcatctagctgttttgaatcagatgtaagggaatatggtatcatatacaattattattcagaatcataccatgatttaattttctttctttagaatgtgtgcttttaaataagatatactgctttacagtaaaaatatgcttttttgttaatttcatctccttcatttatttgaaataaatctgtatgcatgtctttttgtgcacatatatgcatgtctctataggatatattactagagatcaatttctggttaaaaaggcagaagtattttttactagaaatgtgaaatagctcattgaagttgatgcagccgctaacagcatattaaagtacttatttctcatttactttccaaaattaatatttttcttttttctttgtaattgagacaaagtctcattctgtcacctagactggagtgcggctcactgcaacctccactacccyctggcgcatgccaccacaactggctaatttttttttgtatttttagtagaggcggggtttcaccatgttggccaggctgacctcgaactcctgagctcaggtgatccacccgcctcagctccacaaagtactgggattacaggcatgagccactgcatccagcctatttttctttttaatgttagcaaatttcatgctagaaaacgtacattttgatttaatttccttaataactagattacacattttttcatatgttagataaacatttgaattttttcacaatgactagtttataatacttatgatattattgtctgttttagctacatatgcacaaacacatcctgtgtatatgtgtgcacatatcattttaagattataataagatatattaaggaactagtaaatgttaaaaaataaaatatttgaaagagacgtgtgcagcaaataaattgttacaatgaaattttttatttgcaagaggattatgaagtttcccaatttaatgaaataaaagtaattgttatattatctagtcagcctgtatggaatctatatcaaaaaacacttacgcaaacttagtatgttttctagctactcaaaacagtttgaaaacagtttgttctcatgtacagtgttagtcactacagttattaatatctttacattccaaacagtttttctcctttacatgcagagcattcactattcaaaatttttttttcccttttcttatttggaaaatcttggtactcatagaaaagaaaatatggaaagtttttttaaaaggctttgagttttgttattgaattaatttattgaaaaacattgggcatttctttgtttacattacctaaatcataacatcttatttgtttctaacagctaaaatcagtatgtgctgtcatatatcatacccctgtaaagtggccaaatttgtgttttaattaaataagacttttatgaattaattgttgcgatggtaaagtcatactgataataatctttacaccaaacaactaggacatgcgagcttcaaacttaggcaggttgcagtttagttgtggatgcacagcatgaacatattaatgagcactggccctttgcatttgcagttccttctgccaaaatgcccttcctctcagatctttcattgaatggctttttaatatcattcakgcttagtgtaaatactggcttcctatgcaaaagcctcactacctaatctaaaggatctcttcttctataaatcagtctccaagttttttgtttatttcacagcacaatcacaggtgaaatcatcttgattattcatttgttcactgatttgttcccatgtcctcaccaccttatattcccaccctaaatggtacttccgaagtggaaagataacttcttttaaatgtttcctataattttctattttatttctttggacagtgatttttaaaataatttatggagataatgtttgcaaatttttaagctgttttcacaggtagaataagcagctaatatgttcaagtttgatagtacatgtatttatattttaacagaaatatttctaaatcaacttcacatttcactttgaaatattttccaccaaatattttgagggctagttctgagatcttgtcctactctttgaaaatgtttagagtgaaacgaaactgtttttctaatctaaaaaacagagtgttttaaccaccacaaatcatcttataattatttaaaatgaaatcatataatggcaaatgttttccagcatgatatgttaaatggtgttatacaactcaaatacatgatagagattattctctggttgaaaaatgttaaaaatagtgttttttcaaggtaaagaagaagcctgttaccaccttgttgactattacttttccattgccttagaaaaaaatgtataattgtatccagttcttgtattctttgggaatgaaaatcattatgccaaagaatactttattccttccaaaatgtccttttctttcctgtggaatactgctacttaatggaaatctaggcaaacccagcaatttctaaatagtttgtaaagaatctgggatattctgtcaatagaaagatgaatagctatagaaagtcctcttataagttatatcttagtaaatgcctttctttttgtaatctcatatggaaaaccaaatgaaattttcacttttaaatttaatactcgagttttttatgtgtttttttctttattttgtrgagatttttttattatatcgtggttaatattataaatataattttatttcccatttattttattgccaaaatatgacaaatatttattgtatcttaaaattgtgttttgtaaaatttgttttgctatatttaagagctctctcatttagccttttcatttaacctggtagactaatgtgggttttttcttatttggaaaagatgcattttgaaataatatttttgggtttagaagccctacatgcatgaaaatcagtttttagccacagcaaaaaatgtggagcatttatgcatcttgtagcagaaatttagcttttataattgaattattccaattttcacatcacaataactgttcacctatctaaattacaaagaaaatgactaagcttggaatgtgaaagaatacttaaagttcttacattatcatcacagatcttaatgtatcttctaaaatgacaataaaagagaagagtgaatttctttttctgtcaatcagtgatttgtgtgaaattcttgcctatataatgatgttgggcaatgcttgcaaaaaagtgtatttagaatcaattcacgttgaaataaactctggcaagggcacattcaggacacgagttcgtttttcctgggtcccatgtctatggcctcattataaggaaattttttaatttttttgtttaatacacacaaagatatacatacagacatacagcaactttcagaaacctgtatattatatggctccaagtatttaaaaaaatcaagaattatttgggctgcttgctcaagatatttcataattaggaagagatacatgtacatatttatgagaatactactcagattcccaaaactttcgaggacctgattgctgtctctctgggttatgtccttctttacttgagcattgtaaacttattcatggaaacatttaagtaaaaatcagatactcttctattgcagtagtggattttctattaastttgacaaatctcatcatttccttggtatgttggcaggaaaaacacagtcaagttgaaagaacctaaaatgattatctagttttggctctatttaaagagaggattgctgaaattaattctagatatttaaaacatttggatgttagttaatctgcagttgatatttgcaggggatcattgcatgtgttaactgctgcaaaaaaaaaaaaaaaaaaaagccagccccaaactcagtggcttcaaataataaacatgtattattacttgagtatacttatgcatcctgtcagggctgaattgtgtaggtagttctgcttatcttgactgaactctttcacacatttgggatttgctgcctgtagagtagtctggtagatttggctccatcacgtggactcttctccctgtcgtctctcatcctccgtcagacaaattaggagtcgctcacataggaatggcagggttccagagaggaacatgcagagtttcttgaggctgaggttcagaatgagcataccattatttctgccacattctcttggtcaaagcagtttgtctcagtttaaattcacagagtagggaaaaagcctaccctttgataagaagagctgcaaagtcccattgcaaaggttatgaatacagggaagggtaaaaaaatggactcattttgtctcaagtctatcaaagactaccatccctggtctcagttatacatgtctctcctaaaggaaaaaatatgcccaatccaaacccagaaattgaatccagttctaacatcatgttaattccagggtctcctatactacatgaagttctgatgtggcttctcagatgtaactccaaaaaggggaaaaacaggagctacctagcaatcaccgatcagtagtaattctgaaatcatgctagaaaaatgttaccaagtccctcatctacagaataggaaatgtttcttaaatcctgcctttgctccttgggagtaacttccctgtttattttttcacatggtacccttttgctctaccctctatgatgaccttcgtagtctatcactttcctgggccacttctgaagaaatgttctatttggcacctgattagttttcttagacttattctttcctatagaaagttgcagacaatttagttgatggctattttacctatgaaacttactgtaaaactttgtgtgttttctttaagtctggttatactctactctctgctgcaaaatccatactacaattattttcaagaatgcttctttgtacacacttaactactgctatttagggatttgacatttgtgggaccactctttaagatttctagaagcacccttcccctttcctttcccctgttgggcaccacttaattctttcagaggtgttaacaaagggttttacggccacagccttaatttgatcatagtctttaagcctcattttacatgatcttttgccaaatgggaagactataaggaaaaacaattttattttccaactcagcaatccttggcctctctatattccctctaaaatctgcttgcaaatgggkgagtgctgttttgattctctccttatcaatataccttatcacatgcaataaaaccaactgacattctgaatataatatctaaaaacttatcttaccatacttcataaatccattaggtatattatcttactttaaatttaccacaggcaacagttatttatttattttttttgagactgagtttctctcttgttgcctaggctggagtgcaatggcgcaatctcggctcaccataacctccatctcctgggttcaagcaattctcctgcctcagtctcctgagtagctgggattacaggcatgtgtcaccacgcatggctaattttttgtgtttttttagtagagtttctccatgttagtcaggctggtcttgaactcctgacctcaggtgatctgcctgccctggcctcctgaagtgctgcgattataggcgtgagccaccgcacctggccacaacagttttacatttgctgctgcataacacaggtcaccattcttccagcacacatgatcatttcattattcagcctttgataatagttcacttatcgtctttttagcttttgcatcaattatcagcctttgcttactacctgatcctagagccagtgccacatattttaggtttgtgttacatattattgtacttgtagacacagtctttcatcaactagctgttgttgtagatcaaaccactcccaacccagtggcctagaacaacgtgcatgtattactgctcacaagtctaagggtgaggtggacagtcctgcaggtctacactgggctcaactgatctcagccaattttctgatgacttgccagtgcctcctaaggagtaaggctgtcaaactattctgttcatttcctaaacccacctgggaggtgtgagctgttaagtaaaaatggaatatggaattcctggggtagattctctgtgttgactgtcctagctgctgtcttacatagctggttctgtgtcctgtgagcttatacctgaatagctccagtgatctgcctcagagtaatggctgatgggcacagtgctctagtagcctctctatatagccttagaccaaagaaatatattaaacacaaatttctgaaaatactttgttgataaatggattagatatccaagcaatgaaacataaaatagaaaagcatttccttccccaaaactctataaacaactcccacaatgagtttatgacaatgcttgaaactaaaagtaaaactcaagagtgaaggcgttgtatagaattaaaatctgtgactgaaaaaggtcaaggcatttatatttttaagctttagaaagagttggtcctcttaatgtttaggaaatgggcaataccattatgaaataaatatttaaagaagattggcctggtagtaataggtagattcaaatggaagaaatacatacaaatatgtcaaacatatgagaatattagttcacgtagaacttaatcaaagtatacttaaactataacatctcattgatttattccttaattcattcaacaaatattcattgaatgtataaattgttgggcactgttcacaggatgagagatataatataaattaaaattaacatcgctttcaaataattttcagtctacagggagaagtacgtaataaatctctaaaacaaatatggtacgtaaaatatggtgaagctatttataaatcagcatttcagatcataataaagtattgttaaagtttattcttaggaaaaagatattttccctagagtttaaaaattctttaaagtgtaagttaattataaatagaactagtttacttcttttcacataaaatatgggaactgaaaattggacaattaactttgtgtaaagtgataaagttaaaagtttatttttttgcttagaactgaaagacaaatgctaaaaagtattcattattattaacttgaacatgtagtgcagatgtaatgtcacctttgtactaaaccagaatagatagttaaaatctaaatacagatctccttttaagtgttttggaattatacaagaatttctgagtagggaatgggaaaatattaaaaatctctgtgttgggaagacagtcattttacattatactatattttaatttcctagtgctagaattttatggatctaactatgcatttataatttgtttccttctttattctccaattttctcttttcttgtttttctctctttactttatgtaatcttccctccttttttcactttttgttttatatttaccccttcatcggttttatttcctattcagtttgctttgacccttgtttcctctttatcaactttgtctttcctcccgtctcatgccatccttctcaccacaaaaggttctgtcagcagtgttattattttttgaatacagtgatgacatcctacttttatgttcattctgaattaataaaatatgtagtaactgttagtgcaaacaattgtgacctgactggaagaaaacgaaaatccttgaggatgttttcacacacaataaatgcatactaattaagctagtatgaagctttacattcagagaaaaataagattcataataaatgtttggatgaatattgagaattttgatgccttttttattttaaaatattcttttcaaataccctaacataaatcaaaaataatcaaattaataaatcacaataatttaaaagatgcattacctttttatatggtgcattttacccctatgcaagaactattttaatcaataggcaagattattcaggtgagttcaacaaatttgaattcctactgtgtatgacaaactagactaggaaacaagagtatgttgttggatataatagttaaaatcctttcattttcctttcttgatggaggagttcagagaagggataggtcagccttgatggacacaatgaaggtagattgggtgtgcttttgccagaagaagaaaactaaagggaatgagagaaacagaaaaaagaggaagagaaggtaacaataatttaagaagtttgtattgtgcaattaaaaaaaaacattggttgcatgtataggcactgagtggaagataaattagactttatctacaataatttgttaatctaacatttattaatcccctcctattaactgggcactgtgctagaaatataatgatacagaaaggaatacaatatgggccctgctctgaaatgattttacaatttagtagggggagatagatgtgtccataaattagtttaatcaaatatataaacagaaaagtaaggcacaatggaggtgttggtcttttctttctcagtcaagaatattaggaaatacctttcatgctgggtgttaatgaggatagcaaaatatttattggacatttactactttacaaacactttgctagactctgtagagacttaatctcctttgttcctcataataactctaggaagaaggagctttttatgccacttaatacagattaagaaagtgaggctcacagcagttgtgacgacgcatatttaatatgtagaataatcaggatttgaatctaagtccattttacttttaagagactgctatttctactaccctatttcgggagtgtgagcttgatttgacagttctttgaaaatgttatggctgctatgcttaaaacaaattggaggtgtacatctttttgggaaaaaaagacaattatattctagtcaagaaatactgaagttctctgctaagtagattggaaagaaaggatgaagacaggaataaatgtggagagagaatctaaggttaagaaggagaggatttagagaatgactaatcaagttttaacaaaatctaagcagttttaaaatataaaggttgacttaatggagttacagagaaaagcagggggaaataattggtctctttccattccttctatcagctatttgttcatgactttatcattccttggcaggactatgacaataacctgctactcattccttatactgacaccagaattgagtttctacagcatcctctgaataataaccttaatggctctcctttatctgtacaataatatctaaaattcttatcctcggatataaaggtgttaatcttgtcactctgtggtacattttatatgagttctccagtaacatattccaattcactaaatttttctctgactatgtcctctctggaatgtacctcatcttttactttttcatttcaatcacagatttttctttttttaacttttattttagattcaagagtccatgtgcaggtttgttgtttaggtaaattgtgtgaaactggggtttggtgtacagattattttgtcacccaagtagtaaggatagtacatgataggtagttttttgatcctcaccctcctcccactgtccaccctcaagtgggccctagtgtccttgtgttccttccttgtgctcatatatactcagtgttgaactcacacttataagtgatagcatgtagtatttgattttcttttcctgtgtgtgtttgcctaggataatggccttcagctccatccatatttctgcaaaagacatgctttcattctttttcatggctgcatagtattccatggtgtgtatatataacactgtttaaaaaatccagtgtagtgttggtggttaggctgattaaacgtctctgctattgtgaatagtgctgcagtgaacatatgcatagttgtgtctttatggtagaatgatttatgtacctagtaataagattgcttgattgaacagtagtttggttttcagttacggaattgccacactgctttccacaatgattggaacaatttacactcccagcaacagtgtgtaagaattcccttttctcagcaaccttgccagcatctgttactttttggctttttagtaatagctgtaatgtcaggattttctatctttagaatttctgcttggcttattttagtaccctccatttctctttaatttctgctcattttgtttcatatattctcgttttgtcattaagggatagtagtacctcctttcttttcttttcttatgagaattttaaacagtaattttaaagacgttttcagattgctcctttttcactttgtaataaatttgtttcttrtaattggcagtcttctttggtattagtttttccttgtatcattttagaaattttgtgaatttgtgcatctacggtgattgttgtgtttatttgtttttatcttgatgaactaacaactctgtgattgcctcaacatggactttaagccacctgatgtagaaccatgtcttaaactggtggctctgggagtagtcccattgataattgtgttgatgttttatctatggaaaccacacgaggggtggctggacctacaccttagattcaagctacatctgtgttggattcctcctttctctttggcatacggttttatattatcctaattagcacgactttcagtgttgttctaaccccttgcatgggaagatcagtcctatccacctggcccacgatttgaagcaaggagcttaactacagtcccccacctgaggcaggggacgtttggtctcaattacactagcagagttgattctaggctatctctgcttgcttcagaacctggagcacttcagacctgtagtttcagttatgcttgctaccctgtgtctttgtttcttctctgatccctgaagtatctcagttgttctttaggtgccctctgtactttgacattatagtcgtccaccaaggttctatgatccccagtgatactgaaatcagctgatgttcaagtccctgatataaaatggtttaatagttgggtgtaacttacacacatccttccacatcctcctgtatactttaaatcatctctagattactcatatacctaaaaaatgtaaatacaaatataaatagctatactgtatcttaaaattcatgttatttttattgttgtattgctattttttattttttgaaatttatttttgaatattttgctttacagtttgttggatctgcagatgtgaaacccactgatacgggaggatcaactgtatatatgtggggtgtgtttgtgtatgtgtgagagagagattcaaatatggctgtatatttggaatgaagatgggcttccaataaaagttttacaacaaaattcttagaggactagtaaaactgagttccaatacagactagaatttcattccagctaccctctctcaggtatctgttatcctaactcttccgaggaacagagattttccctgagtgctttacgtacttctatattctatgcctctgcccattctgcttcttccaccaaaacacctccttccgttctctgttgaagacatcgttctttaagattcatcccaaaagccactttctatgggacatttatcttgtttcttcccattcctttctgcgtgtttttagagtcttttgcrcatgcttttagtttatcacgtcccatatatccataaatggatatttaagtatttgctgtccaataatatggttattgtgtaagttatggatcacattctgatcatctttgaaactctggtgcatagtatagtgtttgtcccattgtaagtatctaggaaatgttcaataaataaatatgtaattattaagtgaattaaatcagaatcatgcctttagtaacagtatatcaatttaggacaacaaaaaatacataaaagattgtagaaggtggcaatacaatgtaatatttatttgttttacaaatattcatctaaaacaaagcacagctgaaaaaataccagtactgaatggtttctacacaataataaacaaaaatttgcttgtcttctaagagaaatatttcaatgttactttggataagtgctgttttccactgttatgtgtaacttgatggctagcaggaaaaagaaatatcaaagatggttgtgaggtcagaagcagccatatggataaatttgttggattgcctaagagtcggtgagcataatattaaaagctaaatgggcagtaaagactcaaaagccaaggttttagcaattttaagaagcattaaccagaaacatgaagggaagtaggacaagaggaataagaaatctgacctaatgattagtcaacaaatgcsttgggctcttagaactttaagrtatttagtgaaatatttctgaacaccaatgcagcaaagctttgttttggtaggatgcagtaacgctggtatacagactgggcagcaagtaagcaaaacacaagccaaaaaatttagtcccacagaagtacactgcaggtaagttgttggtggaatgggcatgaacaccagcaaaccatgtataagtgaataaataactgtgtcttgaatagctgcttgccccaacactttgtgtactttattggattctcatgattctaaggtaaatattgtctcatttcccaaatggagaatgttagaaagattaagtggcttagccaagccctgcagcctccaagtagcagggacaggatataaactcttattttctggctccagaccagatcttttggttattctgtcttatactttctagaaagaagcttgatgtttcctgtgcaggaggctaaaatgacatgatagggatagaaataaatgggaaattgctgactgtagtgaaggtcagtgcctgattctcaaaattgaacttaaataactctcttaaggacttattccaaaattttactagtcggactgccaagaactacagggtggagaagctggaaacattctatatcctaatcacttaatgtagccaaatattttggaccagattagagttgtcaaatattttatcatttttactgctgtggattggatttcattcaagttattcacattctttttaaaataagggtttcactgctaatgaaattttaggagaggcctcaactatgttcttattgaaagattaatgtctctcatgtaaagaaacattcagagtttaaaattttggtgattatcaatttcccctaaaatgaaactgtttttttttttttgctctcataatctgataacacttttgacatatgtgaagaggatatggggtaatggcccttgtgtgttggaaggcactttaaagaccacctaatcatacacccattgctcatagctaaaaatgaggtttcacttagcagaggttaagtagtttgttaaaggttatataatttgttgataacagaatggcagccagattgcattatttgtccagtgttttttcaatgcagagggacaattatgggttagattttcttatttgtcttccctcaagagtttatttataggtatctttgattgccctatgactgaagtattttgtgatgggagatgtctatraatgagataatcaaaaaggggcaggcgctccatttctcaggcagtgcgtattatgagaattcagtagtgcagacaaaagaaatggttagcgccaagctgccttattgggtattcatttggtaacactatgtagaaaataatgatcatttttttcctaaagagattgtaccatctacatccccttggatccacagtggaacttcctacatattgtgaatacttgtcttggaagctgatgtatgtaagatgtgtgtttttctagttacttgcatcataaatactttatattctgtatttaatactgaattatagctgtctacattatttttaagtatatgaaaaggggaaagtcttaacaaggcaaaaatattcctatttatagtaatgggaggtaaattaccttctaacaatttcagttttttcaagataggaacgcatatcctcaaaagccaaacaatggcatcgttatctttgttagtattattatttatttattcaaaaagcatttgttgaacacctggtgtggctgctgctgaaaatgcaagactaacctggcattttccttgccctcatcagcctccctggactcacctcctgcttcagtcaccagggccttctttcagagcctccaaatgctgggcctcctgcatctgatggtatttgcacatctcttctgcctcttccactgtctcctcaccctggctaactcctgcttctttttgacttagcaggaagacgttcctgatcccctgatctcactgtgctgtgctatcatgatttaagcttagtctacaatgcaatgtttgtttgttcacttgtttaattctgagttacagaaagaatctgtctctgtattacttgccatcattttcccttgaccctggacctaacaggtactcaaacaatattcgttgaatgaatgaatgtcctcttgagacctatcaggatatttggggatacagttagcttacaaattaattatattatagtttgaaaaatatggggatatgaataagaaaaaaataacatttaggaggagtggggggtagttgaggaaagcttctcaacggagatgacacctaatgctgtgtcttgaaggatgcccaggaacctgccagatagggagtgggaatgagcagcacgcatttctattgagggaaaagcaaaagtaaaggcaggaaaattgaaagaatatagcatatttaactgaaaatactgcttttgtattagcattactaaagtcaatactgtactgtcatcttatatatagaactttaacaacacctcttcaatatgaaaggatttatgcacccatgatgctgggagaacagattaatatcttcctagcttgcaaagcaatttcctctctgtggggttgttctgaaaagttcaccttaaaaaaataccaagtagggagcaggtgagaaatttcacagcttaatgaaaaggtggcacataagaaaaatttctgtaatattattttaaaataagtttctcttcttctttctgtttaattaaagcagaaattttagtgttgtctcatcatatggaaggcattcatgttttggaaaaatatccattttagatgtgaggaataaacgaggcaaaaatcaaacttccatcagagatcttcccttgacaaagggagactcattggcctccctgcctgctcccaccaccctgcgctataagataatgattgccaagtcattgtgtaatgtaactcatcgtgcaaatggggtatctatggagatcagtttatgtttggctttgtggtatggctgctgctttcattataatcctaatagatgcacgtaatatttacaattttattatgatctctttggttacacagtttatttttattcaacatactacttcccttcygtgttcccccttggttggcttgggagattgagacatttttcatcatgttttctagttaacatttattgagcagctactataaatatgatgttggtgcttgtcataattacctcatttattttcacagtaactgatgtggtagtccctgttttacagttttcaccatagctctatacttccaagtggctattaaaaaacagtgctcatttcccacattgtattctgcattgttcctagattataatacaaatgatttacattattgagcactcattaatggcaggaactgttccaaatgttccacatatattatttatttaatcctccctataatggtatgatgtctagactataattagcaatttagatgaggaaactgggacacaaaggatttaaataactttctcaagatcacaaagctaataatagagctggatttaaatccagaatccattaaaccatactgccttttatgatattgtgttgtggtgggtatcaaatgtatggwgtgtggataaaagaagagagatcagttgaaagaagggatgatttgtttacagtgggggtgaattaaatgtggttgggcagagagctctgkgaagcagactcattgtgcacagttaccagcttgtctgggtctggtgagacaaaacatgcttacatgcaacaagttgcatgaagcaggtttattacttacagatagatagtagggaaaacaggagcctaagacccattgtgggccagtcttccaaggtttaggagagttgcccaggcatggatggtatcactaatgggggcatcccactggcatcacagctgggggattcagggaagcagcctgccctggattttataccccagggtcataggacatattgggctaaagtgttgaaggaatctctgtttctaggggagactagagcagagcttgatctgttctaccttgtcccttcttagctcaagatgctgcatttacagcacatgctatagttgttcttgagacctacaagcaggaaagaggggagaaccgggttggtgcaaggccatccatagaattgtcctgcaacctctatgctactttcagtaggatagtaacaagtgctttcaattcctcacattctgtgtcttcttaaagccatgtgttacttggcctgtccacaagactctctctccctcttattcgtcccgaagaaacaaataaatacctcattcatttaatcaacaaatgaacattgaaccgtcattgtgtccttagcatgatgctaggctttgaagatagaggaatgaacaaatgaatgtacctctgaactagggtttttattgaagaaaaagataaacaccctgtatctcttatctttctattaccccacctgtacataatctgaggatgggcatttatttatctgactccaccactgtgaagattcttgagggctgaacctataacttattcatcctgctatctccagcacttagcaaaatctcagaaaatagttaagtgctctatagacatttgttgattgaaggaaagaagaaaacaaagaatgaaggaacaacgcaaataacatgttaagattccgcagaacacaaacacatttaagtactattaccttgactcaaatttttcattcagctttcttaaattaatggagcatgccacgtactgtgacagcattgtcagtgctcttatgcatttcattaggagcatagtggagggaattttccatttttacaaaactatatattatttgcccttagcttttttattttcctgtttttctagtttaaatcatattaagctgtagacagctaattttattgatgttatttaagatattatttctgaatattgtgtcctttagcttctaggctaattttctcaaaaaatcttctcttaatgaataggtcatcttcatattagttcactttctaagcagtgccattgcccgaaaacgtggtctaccttatgatatgaattaaactgagaagattaaacatttatattcttatctgtttttcacccatattcattaatttcctgaaatttccacatattctttatgtgcaacatcagcattgattcttaggcattaaatgcctaagaacaaaagtcatgtcttaagccatttcatacaaaagcttgcatgaggttatagtggtcccacacaatagttttaatggggacaattttgttctgagctacttttatgtcattttatataatattccagatactggatagggacataattagtttagagtcaaagttatataagttagatatgtatttttattttatccattatatatttttattgtatctattatgcctcatatttctgatagttataaatgttgtttctaattgcttttattttgtctagtatttctactggaaagattggtcttactgatttctataggtaatttacatacgagaaaatgctttgtaaataattacatgatctgcaagtattattgctgagttcctagtaaataaatgaggaatttttgtttgcttgtttctaaattcagtcatatataaaatatatagtaatgactatgttatgcttggttttaatgtgttatttcaggaaactttctcaagttctctgggattactggctatcattatgagaactattgcagaaatgaaatgatgatccccacaggctggtctgtagagcaagtcaaacctggataagagtcctgaatctgcctttcacaaactgtgagacaagccttgatgtcaccatactctgttctgaggaaatggcagagataaccagaattatagatttttaggagatctttattaacttcttgatgattatcaggatcatacaaataggcagtaacatatttcaaacctaaatcagaggagcaaattttgtgccttaatatctttttctttagaatgagaataacaacagtatctatctcattgggtttttataaacataggagttaatatttatatctacctcattgagtgattatgaaaattaaatgagttaacatttataaaacacacagaacagtgctagcatatagtaaccccttgcataaatacctactaaataaattaaatataatgtttaaattataaagatttgttatttacataaatttgaagaacatttattaaaaaataatttttaccaaacattaactgtacaaaaactggattattgccaaaattctggctttttcatctgaattcaaattaatctatttccaagtagactaacctcaaagacagaggaacccaaccattttctcactggaggaggaaatagaagatagactagaaaagtgaatcagctgttactgtccaatgtgataattgctttgataagggaacccacggggtgctattagagagatcagaatggctccaagcatgatagccagggggtttcacaggagacatctgagctgagttcggatgaagacttgaagtgtggctcttcaggaaagggaagagcatgtggaatgcacagtttgaaaatgacctacacatggaactatgagcagagttctagcatcaggcaggtgttgcagctgtagctgtggaaatgcaatagaagccgaggctcagagataatattgtaccaagattctccccttaaggagaatgtcgtgatcagacagggattttaaaaagatcaccaggattgcattaaaactttagaaaaaaattcgtgctgaataaattatcctttcacttggcgtaatcaacatagatttagctaagtaaaatgaatgaatatttaaatttaaattgaatttaaatttaatgtatgtgtgtatgtgtgtgtgtgtgtgtgtgtgtgtgtgtgtgtgaagtaggtttactttttatttttgtaaaagggagaatgacaccatttttatggaataaaactaccaaataaacttgtatggatgtcacacatgaaactcaacagttctaagaggaagacaattcatatatggacattgctttccaaatgtgctatttcatcctctataataatggcaatcactgttgcacttttaaagaaaaaaactacacacacaaaaaaatctttttttaggccaggcacagtggctcacagctgtaatcccagcactttgggaggctgaggtgggcggactgcctgaggtgaggagttcgacaccagcccggccaacgtggtgaaagtctctaataaaaatacaaaaattagctggatgtggtggcacaggcctgtgatctcagctactcgggaggctgaggcatgagaatcgcttgaatccaggaggcagaggtcacagtgagctgagatggcaccactgcactccagtcagggcgacagaaactccatctcaaaaaaaaaaaaatcgtttttagagacagcgttctgtcactgaggctggaatgcagtggtatgatcatagctcactgcagccttgaccttctgggctcaagcaatcttcctacctcagcctacagctgtgactaaagtagagaccatcatacatggctaatttctttcatttttgttgttttttggtagagacaaggtctttctatgttgcccaggctgatatggaacccaggcctgaagtaattctcccaaagcattgaggttacaggcgtgagccactgtcccctgccatatatatatatatatatatatatatatatatatacacacacacacacacacacacacacacacacgtatacatatatatatacacgtatatatgtatatatacacacatatatgtatatatatgtgtgtgtttatatatatgtatatatgtatagatatatgtgtgtgtatatatgtatatatgtgtatatatatgtgtgtgtatatatatatattttgaaagccctctccatgaagtatgtgtccagtatattaagtcatcctcttctaagtaggttccagtaactcctcccttttgccagcacagaacttagaacacagaaccttttaataattttgagttgaattatttctgttgttcaattatacctacacagctaatatgtggagacatttatttacttcaagattctattattgatgaatactgtcttttaattttaaggccaaactttttttcactattgtttcagcttaatgaatgagtgcctccagcacttgcattgtcactcagtattcttttcatccacctcagcccttttttatggtagctttatgagccaccaaatactcagaaatatggtcatcctttggtatatgctagagagttgccaggacccttgcatataccaaaatttgcacatactcaagtccctcagttggccctccatatagacaaattttgtatcctacaaatactacactttcaatccttgtttggttgaaaacaaaagcccatgtatacttgagcccagcagttcaaacctgtgtaaattgaatatccattatggtcactctatgaaaactcttaagtgaattctttgtaaggctttggagggattttgagaaaggaatttcatatatgggagtatcattggtttgcttttgcctggtcaattcatatgaccagtgcaaaaagtaaaaattacttaggataatgtgattttagtcaacatctatgtcttgtttttaataacgtaagttatacttacttattgcaaaaaacgcaaacaatatagcattgtgaaaagtaaaatctatcccaaatcttagtccacatgccctaagatgggtttacatatttgtctacatactgtttttttcataacaaacatattccgtacatctaggaattgtataggaacaaataacctattttatttatggatttaacaatttgagttcctttttcacctcttttttaaaaatttttatttttatcttaagttctagggtacatgcactctaaatctatatgtcagattactattactaatatattatttctgaaattgcccacaaatatgtcataaaatatagagctttctctgttttgaagtttgctgagaggtttacttctagggcatctatgaaaaatatatattagttttttaaagttttctaaaggagcttcattgaaattaagataaacatacaacaggtgtttcaaaaattaagaagataatttgcatagcatgtgaatatgcaacacaaaataattcctttttttttctatgaagcctggaataattatttgatataaatcaaagagtttatgatgctagtggggaaatggtccaggtgaaataagattacagtgcaatagaaaagctataataaaaactgttagtactgtcatcaaggtctgtgaaggatcaaaagtgtattgagcatcatgtaacagctgtctagaatatgaaggaaaccatagttgtggtgagcagggaacaatatcttggtttgcaaaaaaaaattacatatggcttgttattgttaaattaaaaatggtaactataaaatgattggactgtaaaaaatactctgaaccttgggcttcagaatatggctacgtgttaactaaatgcataactattctctattatggatatatgtggttgcatttatgtaaacttatttaaattaatgtggtatataagatataggtatttctctgttaaagctgttaactgaactctttaaaattctctattaaaactcttaactgaattctttgtaaagctttggaaggattttgagaaaggaaattcatatatgggagtatcgttggtttgcttttgcctagtcaattcatatgaccagtgcaaaatgtaaaaatggttggactgaacacttaaagcatatgtatatgtttgtcagatatctactatccttattgtgcataaataattgtaaaacattactctttgactcttcactaattccttccacattaaagaagagaaagcaatgtataactttcagaacttacagaaagatagaccatatttgtacatggatagcctattttgtcacggaaatttgctgccttaccctggaacatgagaaatattttgttgccatctcattagataacaattgagaaagggaagggagataggctgtacagaatagctagagataatgtgtggagcaggaataaaggaaagcgtcttttgtcacatatattctcatacttaccagttgcatccttcagatacttttcaaacatatgcaaccataataaggatcaattacatttttagctagaatgtagccattttcaaaagtagaagcttcacagtacattgtgttgtccaacctgtcatttttaatttaattattttagaagaatattttttacatcataccattaccatggggaaacaaccaaaagcctcaagaagaaaggattccatatacagtacactgtaaataatattggaccactgatgagattgacatgtatttttgttgtttgatttcctgaagtacagtgactgagaaatgtttcttaaacgcgtatgagcacttatatatgtgccagctaataggatacgcactgagaaccaaagatgaattatagtcttttgttttatttattaatttgagatggagtattgctctgtcgcccaggctggagtgcagtggcataatctcagctcattgcaacctccgcctcccaggttcaagtgattctcctgcctcagcctcccgagtagctgggattacaggtgcgtgccaccacgcctggctaatttttttgaatttttagtagagatggggtttcaccgtgttagccagggtggtctctatctcctgaccacgtgatccgcccgccgtggcctcccacagtgctaggattacaggtgtgagtcaccgtgcctggccaaattatactctttgtcctggatgaacccataatctatcttcattctatctatctattatactaatctctacatggtcaaaacctacctgttcctcaactttcagcataagtttctctatctaagaaggcgtctctggttctcctgagaggaaaataacttttccttcttctgaaatcccgtatggagaaaatgaacccttaaagcatatgtatatgtttgtcagatgtctactatgtttaatgtacataaataattataaaacattatacattgactcttcactaattccttccacattaaagaagagaaagcaatatataagtttcagaatatattgaagattgtagagaatacctgttaagttactaaagaaatgcatataagggtataatctttaaaaattatcgcaacaatttgatgtacaagttatccccatttgcaaatgagaaaagtcatgtcagagagtttaagtcctttgcctaatgtgttaaaaccagtaaagtgaagtcaaaaattaaatatgggcaatcaagcaccagcacttgtactcttaacctcaatgctacgctttctgagttaatacacttaaaggccttggatgagcaagcacatttgagcacttaatattagtatacacgaaagtctgggtccatgcatatatgctatgtacatacatagctacatacatatatgctatgtattatctgactgacttatgctaaatatagacattctataaagcatcctgtcctaggtacatggcttatcactattttcctcattactacaagacagaggaaactctgatcttcttgaatcttgccatcttcctcaatccctttaagtacatactctcaatccccaccatctttaaggtgaataaagaatggcttcctaggagagtgtcgccaacaagcccgtccctccaggacataaagcagagcttttatctatggtattctctggttttcttgattaaagtgtacctcacttgtagctgcaggtgacagggatcaaattatatcagctattttagtgccaacatatctactgggcaggaaaacatttaatgaatgcttttacgtatttttttctggtattcattgtctttactgttactgtttctgtattattgatatataaaaactggtgaatagctaatatttaattacttctaatagttgtaattaataacttattttttgttcagttttaagaattcagtttataaaccatgatcttatgctccataaataaatttctaacagagagtagtcagaattgggacacttttccttcatgctgcaacctacagtaatttcattcaatcccataattttcagcataattatcagtacattcgtttagcaacaaaaaaaaaacacacaccactaacaacaacaaaaaaaatccaaaaaacaaaaaacattttcttttggccttttggtcattgttgtttagtgttactatttaaatcttttcatttttatatcgtttatatttccaataagtgagagccccagtagattcagaaattattaagtactgacgctactttcttcatatgggctctgttctcttttcattcctggttataactgtctgtacctgtattcatgatgtgtgtattttcttccaatgactcctttgcagttattaatgtatacaatttccatcacgtctttcgtattccaccactgtataccaaaagcctattttttaatctttttcttctttatccagatatcttccagggtaagaaagcgaaacaaatacgtttaagagcaacagtctttaatagtcataagtatatttttcgtgtatagtaaaataggacaagctttgtttaaaattttataaaaggtgatatgtactaagtttttatgaagatattttatttgcttgtgagacagcacaaagtacttgattggggttgtggtttcttatgctattgaggattttgtagcatatttaatttttaataagaatatgctaataaaagtatgtttccagcacaaacagctaaatcacagttgcttaaaattgtaataaaactagcttcctaataatagcatatgaattagaagaaaataaatgttacagactagaataggcaatggattgagttagaaaagcttgccataaactctgaggaagatttaggacaagtcactttccttctctgagtcatagtgcctcaatgactactaaggttgggtaagccttcaaaactatgtgatactgtaaaactccaaccttttcatctggacttgagaagcctcttgaggagacagtcaagactacctttcactttttttttcctaaactaaaattggactccaggagagataatactgtagtctttttctagctgtgacttcttaactgcttttttctcagtcttcaaattactctggcaaggaggcactgatgtcatcaagagatggggtcactagaacaccaccttttaaaattctaacctgtttttgtacgtagatgggatagtcctgggtgtaagatactaaatgtgttttagttatttcctccactgccttggccactggtcttttatgcttacgggagatgactggagcctcatctatgaggtggagatagaggtagtcttataaatttttaggaatctgttatggatgaagataaataatgtgtatggaatttaatgtaagtcccttcatttaattcaaaatatgcaaaaagtataaactatacattttaaagctattatatggtaaaaccaataatcccctgacatagacgtcagaaaatacttacaggaaagttctcaactgtgttttattcccagcttcctggttattatcatccaacaaataattttgagcatcagttgtgtgaattgtgttctgttctaaatttgcttctcttgaattgttttgaagcacccatgtgcaaaaggaaatttctagtagataaatagctatttaaaattatgtttggcattaacttgtaaatacaaataaatatcaaaagcctcaaaacatgaacatcacaggtgtggttaaaaggcaaatggtgcacagcattaaaaattcagttattttcattgatgttatcatagctgccagctcagtataatagaggctgagccaagatgcatatttaagaatattcaaagttagttccagatagccctaagctattaagaacctgtggtgtaatcagaaaagcagagtcagaagtacataggaagggctgttaatggattattaagagaagcacagaggtataaataggcagataattattggaagctgaggatggcttttgactgttttgactgcttaatggatcagaacatggagttagtcctatcatgttttaaagataccagccatctttcttgtctcctttattatgatagggtctggaagcaaaggataaaagttgtggaactcatacatgtatgacacttccaactttgatttctttattcacatttcttttcaacctgatagttgattctgctcagttttcagtagacatgttgcaccactgaggaagatattaaattatgtattttcctacactggtgcttatagggtagggaaacaaggttttgaatccatctgatacatctaaattaggtagactttccaaatgatgatgtagaacattaaatatctaaggaaatgcaatgttaatattaggaaaatattttaatttttaatgtgaatactttcttgcttaatgccattatatatagattaacgtatatttacatagcctgatgaaaccatgctgactcaattaaaccaaactctagcaaagctaagacaatgcaatgtgagttttaagggtttcagatagctttgtgtgtatgtgtttttttattattattttttatctgagaaagaaattaattcagccatttaaactcattgactagaaaattctttaacaagcataggttacaattccaaatgctgtggatggttaccaataaaagaagcaggcatctgttctcagatgtgtgaagaatgaaatgccgcttgtttcattactcactataatatttttggtgtcatactatggagtcaaactgtctagcctcacggatatttgggaagaggaatcatgtttctctttctctagagaaatatcatggataaatatatctttaatagtttttggcctttaagtaacagtacttaagttttcatacatttttatgttcatgtcaaattataaaaaattaacattgattaagtattctatattttgctcttcgacaaattcattgttatgctttgtattaaatatgaaaatttaaaaagtgtatgcctagtgaaaactctaagttgttttcttgtagtttaaaaaaatcaaatatacttctttatgtataacaactatttgggggaaaatgtatgacataattgtttctctgaattaatttttgctgcttatgcatttaaaaataaactgcactataacagagtaactttgaaaggtaaaaggggaattaaatgactaaagatgaaaacaagtgtaatttaaatgttacttttaaggagaaatttatgtggaactgtggtttacgataattgttgacatattcccctaagtactgtgtctgtgatttttcatggtatcaatcatttaaagcaatttaggtaataacattctgacatgcatttctgctattttatttacaccatttgcctatatcattgtaatgcagtacctttctgatttggtgcagtaaatgcaytctgtaatatctattatggcatggtcaaaggataatttattgtcaaatagaaaaataggtcaacactaatgtcacttgatgatcaacccccaccgctcaaagtttaataaaacatctcaccagtatgcattccagtgcagtggttgatattttattaggactacctggctatagcagtagtgtaattactgagctgtcagagtgataagtgggattaatggcagcctgatgcactttagtctgcagagcgcttagagaattgcaagatggtattattatcagagtctgcccattctggcatattcatgacaccaaaggaaaaaggaatgctacaattcaggtttgcgtggccctgcctcattaacatctgacattttcaacagctgttatttgtgaactagctcaataataaaaggagaattatttggtaaagaggcttaataaccacaactaaaaatccttacattgtcaatactgttaagtgaatctgtttatgttgaatataagatttctctggaagaacagaaaaatacactgcacattaatttggttcccttatatctgctgacattataactttattttttaattgtgttattattcaagttgggtgttagaaaaaagaaaagcagaaaacttgtgacttcatagagataaccagaatccatatgatgtgccatatatgtgtgtgtgtgcgcttacttttgtgtgatggcagatatttttacaactgtttaaaagactttttttcaacaataaggtgacatttaagttggcatattatttactttttagctattttgtattgcgacataaaagaaaatcctttcaaaccactattaatgctcagtatatttatccacatgacagttacacatataaatatcacctcattttaacatcaaggaccaaataggccatacattatggagctttttgtattgtttgcaatgtatgctgcagattatacttcgaagaaattatttttgaactcaacaatagtgtttcggggaaaaaacgttaagtatgagcagacaggaattcaactaaatgatagatgtgaatctaacaatggcatttagagaaatgatagggaagaggtttaatgactacatttcagagaggacaattgattatgaaaagcctttggtactcattgtgtaaaatttaatttagagagaaggctaagggcacaaaccagagaaaagagatcagatttaaaaacaagatattaattaggcactgagaaattggttcagacaatgaagagggctctcttactcacaaaagaatgacaaggagactggtattgttttcatgaaggaaatgaaccaaggtctttacacatggaagtgtatagaaaatgaactagctagtcacctttgtcactgagcaatgtaggattcatgctcagtgaaattcttggagaatgctgtttttctgacacatgtggcagtagtatattttctttagttgtctgtctccacattcatttctttctactcccactctcactttatgctagaccaaattcattagttcacctaccttgtcacgttcttttctttccaggcactggtgcatactctttctattcttgggtaattatcctgagtgaccctgcactcagaatcccactgtcatttgctttcctaatgtccactcgttcttcaagcttctatttcaatattattcctcccaagaagcctgtcctgacaacctccctccaggactactgtctttcatctgtgctcccttagcatgctatatttcacccagattctcattgaccacattgaccagtgtgtggctttttctgtgtctgtacttcattcaaactgcatgttctatgatggcaggaccatggtgatctttttccaacacttttatattctcatatcccagggtctgctatgtaatggaggattattaaatatgtattaaataaatgaataaatgaagaaaaacacacataagttaatgtgcaaataaaggatgagtctggccattggttttagttgtcctgaatgaataattatagaatgttgttctaacaatgtgcttccaactatgaacactagaatcacttcagaggcccttttcaaaatgcggattcccaggtcagtaacttggactcagtaggggctcctctgtgaagtctgtgccatttatcaagcttcccaggtggttcttaggtgcaacaaagtttgaatacatctctggccagtcccccggagaggagagtcagatgagattaatatgcaggaagtttatatgcaggttaacatctgtagaagagtgaaggaagtgggactgagcaaatagtcacaataaatgcttcaatggctccttgcagactagttccccaaatatgggaatgggcagagagcctccaaccccgctcactgaccttgaattgtatgtgtgctgctactggaaaggaggctgaccttgttggagcccattctcttcagcagcagagggaaggcagctgtgggaataaagctttggtcctgaagggtatggatctgggctatgctttgaggcatctgttacagaactcaattgtcctgtgaatgggatggaggctgaaagacttcagacaattggaaagagagagagaggtagagagggaagctgggaggaaggaagagtggaagaaaggatatttcaagtggtaaaataagactttacctttaatctttgcatttgtttaataattttggtctaaaagaattacaaaccttatcataaaaaactgcatgcaagtattgtcagcatagtgaaggatgaaacaaaactgatagagtgagggaatggtatgtcctaaataagtatgattctcttaaaatcaagaaggaactctgagaggagggacagttactagccagcatgattctcatttatgcatcccaagaggagtgccaaagatgaaacacagaaactttgtatttattgcttaaaaatgttttgtacctaaaaatgatacgattttatttatacttactagacacggactctgaatgagtataaggtagaaaatagattatctcacttatcttgtagtttcttaacatagttattttatttcctagatgcctgaaatgtgcagatgccccgtgtcagaagagctgtccaactaatcttgatattaaatcattcatcacaagtattgcaaacaaggtaaattcagatttaactctgcaaatgaaaataacagtatttgatcttgttctctattatctgtgggtacagaatacagcttgtcttagcaaatccagttaaaccattaaatatgacttctataggcatttaaaaatgtggcacatttattaattaagcacttccaagttgtgatttatcatgaaaatccaggttcattgttttttgttttgaaaattagtttgtgttaaaatgaatgatttttaaaattcaagacactgaaaagattgattttagtttatgcttgctaaatactaatagacaagaactgtcattgatcatcaaaacacatttatgatttgtgaaatatctatgaaagtgtgctttgatagtaagtctagcacatagatatatcaaggtaatagacttttttaactaaaattcagttaatatgtttaagacttgaaataattcataatgactcatagagttgtagcaaaaaaaatacacaactaaaattagaagaaaaggcttatatgggcatgagtagaacaaaaggaattttgatctttatttttttttaaaaatcaatgtaagtctaagcccagttttcattcactaagtgaatggttgattgattgaataattgatagtacctattgtttttgtgaagagagcattgagagctcgcccaagtgtctaatcctttaaggatgagcaaaggctgaacaatgtctcccataaagatacagagaatcctttcacaaggtttaacactaattttctaaaatgctgtaaagataccttaactcctcgttcttcaacaaccaggtgcctttttacgtataaagtttatttcttaatatttcaagtacttagataatttaggagaaaaatgataaatacttttatataaatttagggtcttgaaagaatttaaaaattattcctgcatggtcagatttaaatctgcattgtcagatttattaggatttgaagtctggtttgaatttttagataaaccgcttattgtgaaactgggggtaattacctccttactttcacttatgaaggaaaggtagcatctatcttacagagttgtagtataaactgaataatatttttatgtgaaaatgtctaatatagtgattactcaacaattttttatgtggaattattagtttccctattcattcaatatggtaaatactatagaagtgattgctgtttttgaagtaaactgctatttataaaatcacattttttaataaagatctcatcagaaaaggagaatccaaagattgaagtctaaagtattttcgctaaaaatatatctaagttaacactcttcatatcaagcatgaggaaatatgagaattatgacggactatcttacaagatccatgctaccccaattttttcatagatatttcagaatcagtagttattttatgagtacacacttcatttattcaaggtctacacaaatgtatagaaaaaaagacaaaaaggattcttaggtttacaaaatgtctaagcaagatcacagtcatctctatttttggaaatccactttctgtttcattaatttgttcatattctttacctaatggaacgttgtgcttagatatctatttaaaagatttttatatgaatatgagagatttgaagatgattaattgagaagataatatgttgtcaaacctcaaaaaaaaaaaaaactctcctaattttttgttgaaggatcactgtagcaatcataaaaggtcaaagactgttgttctttaaagcctgcagctttttagatatttaccagctgtgtacaatgtaggctgtcccacattgctttgccagtggacctcaacgcaggaggggtgttctttccaggttgagagggtaattgaatcgccagactcaatgagccttgcgcctctttgagaaaaggatgtcacttgttttgtattgtgttaggcttctgtgattcagtggagtttaggccaatacttccattytttattttyttacaaactggattacagctctagttttgaaaggtacactcaattctattgtcccccctcagtcagtttttctctgtttggtttgtgcaggctgttgtttgcaattgtatctctcaattggaagtacacatttcagattcatcaaacagtgaatcctgggttatatttcttgataggttttcttttaaaaaacactactttatatgagaatgcatgagatcagtctataaatatagtgaaataaatggctgttttaaacagtgttccttgatttcgtgatcctgtatttaaaacaatagagatatattctccttaaaacttttaaagtgtaagccatcgatttttccatgattttgcatgtgtttataaaatctgtgtaatcagattagtgtggcttttgtgtatagataaataaatgtatactatgtgttacagaaaagctgactaaattacacgatgtaaaagaaaagtttttctttgtgatagatccttattaaaagtaactggaagttaaagaaacaacaaaatcgaagcagcagaaattattgataataatgtttgcatttataagaaagttacattgatacgtgtttgtgtgtatgcatgtatgtgtgtgtgtatatatatatggttgagagggatatatattgtacatatattgtacacacacacacaaacacacacacatattacagctgttacaaagcagaaaagcagaaatgtaaccaatagatttggtgctttctgctttccagtttgcctttcagtttcaatggctgaatggtttatactcttatcaaacaaaatattgatcatttccagaataactttctaaagctttgctcaaattctgacttccttgctcagtaactgtagttactccccagtgcctagaaactaatgtccaaatacataatctattatgtaagttgattggggtttctcccactattatattaaagaagtaagtggaagaaaaaatgttggaaagtccgtaatttataacccagtaattttttaaaatgtgaagatttagatatatgcaacaaaaagtagtgataagatttcaggtttcccttggtacaggaggtcatttccttcatctttattgttggataataagtatttacccctctatccatttaaagagtattgacttatctatctgccataagacagtgctcaagagaacaaagctttaaaacaaaacaaaacaaaacctctatctcctttgaccagcatgtctccaaagttatagaattacagttaggaggaatattttagaaaatgtccgtaatagacaactatatagaaacggaaagtagataagtgatttcctgggactcggtttggagagttgggcaaaaataggtgaggagtattttataaaagtgggtaatgactactagtggtgatggagtatcttttttgagtgattcaaaaatcagtgttctaaattaattggtgtacatatgctatgtagattatatcttaataaagccctacacacacacacacacacacacacacacacacacamaaatgcacacacacacacccccacctctatctctgttatattcctagagggtacacaagccataatcctgcagagttgctgagttgagtatgccatgtgatttaaataagtaattctgaactcgtgccagttttcattacagatgacctgccaattttggcctatgtattatgggttggtttgtgtcatttagaatatcaatgtgagtgggttttgtgtcatagaatgaggtttaattctaattacgtctttccacgttacaagatgttctgtggatattaattctctcttttaaaatttgatgagagtattataattgctttatttagtcaatattggattagctttattcatatttttgtcaattttttcagtgttgcaatttccatgtggaagccgttctacttggaataaataaaattttattcagaaagggttttttttttgttgccagactatcttaatttttgtttctgaactatttttatttccattttttttacttttgaaaagttttttcactaattatagaattcagggttggcaatgattattattatttttccacttcatagaacttaccattttggggccttttatcatacaatgctactattgaaaaatgaatggaagtctaattattgttcatttgaggttaatatgcctttggggtgctgttttaaagatcttttagtttttgatgttaaacaattttaccatgatttatctaagtccatatttctttttatttgtcctacttatttttctttgcaattattgaaactggattgatttctttcatcatgttgggaaatatctcactgtctctctttctttatgaagctcttattagatacatgttaaatctttttactttgttctcaatgactcttaggtttcatacatttgtctttttatttacagtgtgggggttttattatagataatttccttcaattctgttttgaagtttactaataatttcttcaccagtttcaaatatgctgttaaaatggtccattgagttttgagctacaattatatctttcatttctaagagttttttgtgctttttttctaatctgccagctttttattaatcttttcaagacttttattgtttttatttatttatttatttatttatttatttatttatttatgacagagtcttgctctgtcgcccaggctgaagtgcagtggcgcaatctctgcgcactgcaagctccgcctcccgggttcacgccattctcctgcctcagcctccagagtacctgggactacaggcacccgccaccacgcccggctaattttttttttttttttttgtatttttattagaggcagggtttcactgtgttagctaggatgctttccaactcctgacctcgtgatctgcctgctttggcctcccaaagtgctgggattacaggcgtgagccaccgcacctggccgccttttatttcttaaaacttaaaatattcgttttcatattctgtcaattttactattaaaagtctctgcgagtctgatgatactgtctgtgctatctgttgcctccactgagtgctttgtgttcccttgtatgttcattgaatttttattattatttttttactctgtcatttgtgttgatgccttattggaggaaattctctgagaactgtgaagcatgcatgtttcttcacaagggatttatatttgcttccctcaggcagtggctttaccgccagtcctctgggaccaccttaaactaaattcctcacttaatgttttttttcgagtcaccaagattgtgtgaatcagaccaaaaatacaaatataaatttaatttgctaaggacattattttccctctttttcttgtgtacccaagtttaagactgaaaagtttctgtgcagttccaggtgggacctaggtggggttaattttaatttctctttctggtgatgtggacttacacaatcctagttttatgattgagtcttatgttagactcagactttaggtgggccttgagcttttttttctaaaacctatatgcttggagacccttaaaacagaagcctttgtttacatggtttggcaaatgcctttaagatgattcccactgatttctctggtctacttactgccttgttattttcagtccttggacatgcctattcatgacttaaaagctattttcctataattttaatttctaattagaagagtcatggcagataattagttttcaatatgccctggaaaagtgcggtagatatttaacaatgagtggatagtctaaactgataaaaaacccagagattttgtaggaaaatataggagtagtaattggggagatatatggaagaaagaaactttaaaaaatgaagacaaaaaagatttattatatcagatactgatactacaaagctactgtaatcaaaacaatgtagtattggtgctggaatatacatttctcaaacagatgagagtctataaatagaaccaagtaaatatgagtgtgtaatatataataaggaggacatttcaattcagtggaaaattaattacttcttcaataagtagatctggaataattttgactttacttttagaatctttcataggttatctcctagaattcttttcaggtggactaacctagatattaaaagtacatatttaaggataagtttaattacaagcagctataaaatatgggagaggacattttactacctgcattttaaaaatatattttaaaataaaaactaaccacacttgaaaccaagtgaaaaattatttgccatgcatgtttcagtccaagtgttaacatctttgttactcaaagagctcctgaaaatttatatgagaaggataactcagtgcaggcataggcaaaaattttactattatagaagtcatataagtgactattaatcatattaaaattagcctgcttgcatattagtcagtaagatgtaaatgaaaaaatgagataccagttttctctcatcaaattgttgaagttgaaaagtaaacccctgtgttactcagcaggaaggaaagaactttgatatgatggatatatatttgagaattaaaaatatatgtactgtttcaccagcatgctttattaatttgttctacctagagaaataaagtaattacaatgtaaagggacacatatacaaatatattatttaaagcaattatagcattgtttgaagtaataaaaacgggtgaatactttagtatcagctcaatctattaggctatatttatattatggaaggttaagaagcaattcttaaaattgcattttatatttattggtctaaaaggatatttgtagtaagtgaaagaggacaaattgcatagtaatgtgaatagtatgacactacttttagaaaaaaatttaatctgtatataaacaaaaaaggggaggatgtaatttagtttcttcatttgattgaggttagtgtagggtgaagttaggtttctaacattttccttataaatctctaaatgactttgcttcttataatgaacatacgttttataataaaaacaatatattaaaattcagtagtaaaattaaataaagtaaagctgagaggtttcacaatagcacatgacagaccctattctaagttttcattgtggtataaggagtgagaaaaataccaagattttcctcccagattgctaaaatagttccaaatatgttttttgaataattactctagtatactaatgccacctttattgcctatttgattccatatttatttagatctattttcaaatcttctttgtcctacctatctatatgtaacaggaccaagctgttttaatttctttgctgtgtagtatattttgttattaactaaaagcatctccttgacattacagttattttcaaagtatcctagcttttttctgcgtgtaaaactagctttgtaaactgaaagagttctacagaataaatattgagcaccatgttcagactataataaaatattaatttctaattattaatgtaaatgtatgcccaccttgactcattcatttattactaatgttactgtagttaatgtaactattaactaaattttccagaatccagactttaattttaataaatagcttcctagtcttgaatctggcaaattgtggaatactaaatttactagagttaaagacaaagaactggggtattattgttaaaatatcacatcttaattgaatgtatggtgtgaaaaggatagatggatataacattatctattgagtcattaatgcttatataagatgtatcttgcttctgttttgatatatatataacttcacaaggttacatttttacttttttttttttttttttgagatggagtcttgctctgttgccagactggagtgcagtggcacaatctcggctcactgaaacctcctcctcccgggttcaagccattctcctgcctcagcctcctgagtagctgagactacaggcgtgtgccaccatgcccggctaattttttgtattttagtaaagacgaggtttcaccgtgttagctaggatggtctccatctcctgacctcatgatccacctgcctcggcctcccaaagtgctgggattacagctcccggctcatttttacttttaatcacagctgatacaatgtgtaatagtcactgattttattcacttttgctttaatagaggaagttcagatttgaaaagcctgtaagctcaaagcaaatgttagtcaattataagttataaaatgtaaacaactataagtccaagagtcatgttagtataaatgagaaaggatttttattatacatcttaagccagttttatatgaaacgagtaacatcatattgtttgtggttgtgtatagtatagacaaatttaaacatatgcttttgtaaatatttgataaaatttaaattatttttaaaaaacactaatgatataaaaactaaatatatataaattaaattggaatcacaactattttcttttacaatattaagacaagaaaaatctgtataagaaacacataggatactattttgggtattttttaatattaataagtaaaagtcaatgtaacagaatatagaccaaaagaaaatgtaattgaactaggcatctcattgtatagaaaagaaatttgaaacccagcaaagctaatgacacagctgcttgatagtataattgaattttctagatttcttgttcagtgtgcctttgtattacactatactatcgatattaacaaagtatgcagattatgaaatattattaaaatataaaaggctggaacatttgctatcatgaccaaattttgtaagtgctattaacgtcttgaatgttgagtaaaaagtataatgtaatagacttcatgttaaagaaacttgagtttagtttttttgaaaactactttgaaaaattaaaatttttaaagtaaattattagaatcgatactaattatattttgaagctattaatgggtttaaattatgtacttagaatggaggcttttttgaaaaacccttttatttccactgtagaatataataacacactgtactatgcatcacaacagtctgtcaattaaggaattgctcatattctcgtcaataaagagcaaactcgcacaaaatagtctgacttttttgtatagaacaaatggtgtgatattacagtctagatttaatggcataaataatcatgtgtcttttggcatggcataaataatcattaaagaaaaagttttcagcattttatatgtaagttatatatgtttgaatatatatatatttcacattaatatgagattctttgattaataatcttcacctttcaataatttctcaaacttaaagattctcatttgcttgcaagctgtgtaatattcataaatgaaattgtagaattctttcaatacccaatgctttttttttcaactctaatgatgactagctttgacatctttgtttttgtatttgtattagtgtttcgatgtagaaaagtatcctctttgaagcaaattgtagaaactctactacacactaaataaaatagtatttcatctttttctttctctcttcaaatttaataacttactggaaatgaaaaacttaagcctctaaatttcttataaaatttattgcatttataattattttccctggataaagtggggcttttataattttaaaatatatattcatgttatttaattgataattcaaaaactataaagcactttcttatttttgccttttatagagattttcattttcaatattaaaggataagtaggccaggtgcagagactaacgtgtgtaatcccctcaatttgggaggccgaggcggctggattacttgtagtcaggagttcaagaccagcctggccaacatggaaaaatcctgtctctactaaaaaaatgcaaaaattagccgggcgtgatggtgcatgcctatagtcccagctacttgtgagactgaggcagcagaattgcttaaacctgggaggtggaggttgcagtgagccaagatatcgccactgcactccagcctgggtgacagagccagactctgtctaaaaagaagacgataagtagtaatcagtagttcagtttctagtattatatatgtagttgcctatatgcttacagccaaaaggggttgattagacatgatctctgacattaataaaagaaaaaataagacacgtcataaaaatataagactaccgcaaatatatattaacaaacacaatcatcaaaaggctgttgtacaaagtgctttctggcattatgcttccaattggaaaaaagctgaagtattgataaaggtctttaaaagaaatgttacctgaaaagaatgggttttgatacagatgaaagttttatttcatttagctagamcaatatagaggcaacaatattgattcttcattcatatctagtgcttaccaaaagcgctctcacatatttgatgaataatgaattgaatacatgtgcacacatagactaagttattttgactaactcatggggaagattgtaagttctcaagttcattaaatagagcagggaggataggatgcagaaaataggagtaatagaagtgacttaaaatttatataggttctatataaaaaatttaccaccattcatatgcccccatgtcattgatattttatggtttggtagattagtgattttctgtacatacattttgcttctttctttctgtatttcttattctacttcctaacatggaatatttatttaatatttatttagtaaatattaaaatcttaaactcacagtattaacatttaacaaaatctttttagtgacaaaaagcctaaaggggtagagtgggaacctaagttcactgaatctattgtatagtacataatggaataggcatcttatccatgcacagttaaaaaatgcataatataaatatgcctgacgaagaaggaattttgatcttcatgtctcaagtgatgaaaccgaggctgagagatatgacatttccccagtcatattgcttgtgcatagtataagcagaattcaaattcagttgatgacttcaaagctcgtgtacgtgtgtgtatgtgtgcacgtgcttgtatgtgcctgtgtttttgttccagttaaatatctcaggatcaataaaaacgttatcttctacaagaatgattattaatttccttacatgtataggcttaaacgaggctcactgaaccaaatgtgtagttctaaaaatgaatcatattgtataaagctgatctaaaatgtggtatatctaagatatgaaaagagaatttttcagaataaagctagtcaaacctattcttctatctccattttttttttctgagagtatgagtacgatgagggcaggaattttcatgtgttctgttcacaatatatctacattcttctttgccaaatatctgaggacccacaggttgttcattgagggatggtgacagcttgacaaaaagagtgttctgtgtgcatgtactttctgtgtgtggtgctagagacattttctattcaattaatgtacatcagtacattcaccattacagcttgagccagaaataaaagtaatgttaattcacccttctcacacatgcaaacttcttgaagtttagcccaagtgtttttttaaatgcagcagattggagtttatcttggaagggtgcttccatctgtgaaaactgtcattggaagaaggaagaacactttaaaataaatccaccagctgtattgataatcttgtagtgatatgaagacttgaatatgataggactatttgttaaattagttataccatatgacagggtagcggcttgtgagttttccatttcttgataatgactttggaaatcattaaattgtggaggaatgacactaatgcagtttcatgctgtaattttaaataaaaagcaaagtatagaaattaaattattttaaaattaactcacctaagtggcacatgtcgtgcctatagacatgctttaaataccccaaggactaatagaaaattcaacacctgcaaattgtgggtaaattagtgggccaaagaacattcaatgcctaatgtgttgatttgaaaacagcaaacatttcaaatattatttttgtctttagatttttgttaggagaaggattgaaagtcttaatgttttgtacataaaatatctctatgcacaaaaaaatcagatatgtattttgtatccctcctgacatagctctgtacattttttcctcacatgatggaacactgaaatgtttgtgactgattgaataacatgaaccagttgaagtagtgtgtattttctagaaggagactgctggggtgtctataaagtacccttctaaatttaaattttctagcctttacttttaaaaagaatgaagagctcacagaacagaaatcaaacctcttatgtagaaggaggactcaagaaatcttcccacttgctatgagagaataaattgatactgatcttgacattatctgtgggaagaattgaggaggtgttcccctcctaataggtttctgagtgtctttggctctgagtactaagatccctaaacaatggagttatctaccatttcttcaaagttatttgtaatagatagattgcaaaggtgacttgtgaatcattgcttaatattggttcaacccattttcaaaatcatgcttctttattctgtgaaacatgcctatgctttcctctttctaggcatcattgtgtaacctctcttgggctccctacctttccccttcctttctgagaatttccacatcatctattcaatatttttcttagttagtttcttaatactggaacccttctattaaaaagctttaattaaatagtaatccctcagcttgccagtcagaatcctccataatttggttcatgcatatttttcaaatatatcttctaataatctttcccaagtgaatgaattacctcagccaaattgccaagtcattacaccaaaccctattgtgaactttcttgaatatttactcatatcaatcaagaatgatgtggctatgattctctcttatcttagacaagtcacagccagaatcattttgactgttacccatttaatgctgtttctggacaccttaacctgaaatgacttcttactctgatgctaaagcatcttgatatcaggaagcatatacttgtttttttcaaaaaaataaacatacacataatgctttatatttagaagacattcaataaatccttactaacttaaaacaatttttaacctcctacaaattttattttagtgaaagggttttacttagagtcatgagagtgttaagaattattagacaatttcatggcagtagtagatcagacactcatagtttgacagctatagaaaaatcatgagccataagtataactttaaatattttatttgttgcaatttttcaaacgtgtctctttttcttcttgtgatatcattttatgtgcaatcttgaagctaatttggggcccatgaaacaatcaatattcttgtggaaagatacttaagtgtttaattggattatgttttttttttctgtgcttccttaccccaagtatccttaaaagtggtctaccaattgcagatcacatttttttgcatgatactgtttttatattacaaggacacttctaattatacaatgggaattttgagtcatggagtcagtcaaatatttgttaatgaatcacatcaagtgtttctgtgatgtcatataagaggaggaaagaatactgacagtgactttgagattatttctaacaatgatgacctgctcagttgcttttactaagtgaagagatcagtgggcttcagcaggaactaaatatgtttgcttaggaatagactgattaattctgagttagtaattgctcattttcattattattaagtaaaattatccaaaaccagaaagtcaggtcaaggagatgactgtgtctttttattatcatactaaggtattctttaaatacaagggaacaactaagtactatttagttttctaggagaaagaaccattggctcacttctgtatttattcttaaaaattcaacctatgaatgtacatgttaactagtagctttgtgtcaagtagagatgcaatttctattcagaagaaaaatgattccaaaagttatgttttattgccctacaggtcattgcctagttttgtatataatctagctattttatgcaattattcctttattaaattgagtatataattcccactcctttaaatgcatgctttaaaacataacagcttttatgagatgtattcacttcccatgtatttgttcatgtaagtgaagttgacaattcactgatgtctagtacatttgcagtttcaaccatcaccacagtcaatttgagaacaattttatcaccgctaaaaaaaacctccatacttattagcagttattgtccattccctctcagacccccagatctatgatttacttttagttcatttttttgtttggtgtgagatagggtcaaacttcattcttttgcatgtgaatattcagatattccagcatcattcattgaaatgaatattctttccaattgaattgccttagaaacctttttcaaaaattaattgaacataaatgtgaaggcttttatctggactcatatttatatcacattgatctacatgcttatcctcatgtcagtaccatactatcttgattatgttagctttgcagtaatttttgaaatcaggaagtgttagtcctctagcttcattcttatttttcattttagctattctggatcctctggattttcctatgaattttaggatcagcttgtcaatttttgcaaactcagctgggattttagtagagattgtattgaaattttagataaatttggatagtatcaccatcccaataattagtcttttggcccatgatcatgggatgtattttcatttatttaggtattatttagttcctttcaacagttttctatagttttcagagtataaatttgaactttttacagtttttaatacatatagttctgaataatttattttgtttgttgctgttgtaaatggaattactgtcttgattttatttttcgtttgttcattactaacatattgaaatacaattaatttgcattttaatcttgtatcctgtaagtttgctgtacttttattacttctcatagtattttagtggattagttagggtttgtatatacaagatcattttacatggaaatagaaataatttttccctttccaatctggataactttctctctctctctctctctctctctctctctctctttccttccctccctccctctctccctctctctctcttcttctctatctctatccctccccactctgtcacttcctccttccttttatgcctaattatctagcaagaatttcaagtgctatggtgaatagaagttgtaaaagttagtgtgatggctgattttatgtgtccgattgattgaacctttgtgtgctcaagtatttggttaaattttatcttggatgtttctgtgagagtgtttttgaattagattggcatttaaatcagtaaggttagtaaagcagatagccctcccaagtgtaggtgagcctcatctaatcagttaaaggactgaataaaacaaaatgctagctctaccctgaaaaacacataattcttcctgtctgactacctttgaaatgaaacattggctttctcccctactcttggactagaactaaaactaaaacttaactggttctcaggccttccaactgagacttgaactaaaacattggctcttctgtgtctccagctggcagactcaaattgcagatcttggaaatttgcaggttcttaattgtgtaccagtttcctataataaatctcatacacacacacacacacacacacacacacacacacacacacaccccacatacatcctattctttctgtgtctctggagaacttttgactccttgactaatgcagtgaacattcttttcttgatattggaggaaggcattcagttttcaccataaagtgagatgttaactgtgggtttttgtagaggccttttattaaggtgttgaagtttctttctatttgcagtttgttgatagcttttgtcatgagggatgttgaatttgtcaagtgccttttctgcatcttttaatatgattgtgtgattttttgtcttttattctactgatatggtatattttgatataaaccaaccttgcattcctgagataaatccttcttgtatgttctagaagtatttgtcagaaattagcataaattgttattatatgttttatacaattcaccgattaagccatggcagcctcaaatgcccttgactcagattttactatctttattctgtatttgttaatgaggtaaatataatctttcacacatttttcttctctgtgtgtaagatatttctgtgttgacttttggatattatactttgacagcttaatgatttattattaacctcttttagagacactaccgaagactctgacaaacacagtggtaaatctgatccaatttgggggaataaacagatcctaatctcttgattaaaagaaacagacttttaacttattaagcttttcattgaactgatggaaagaccacaactaaaagaactatgtaataaaaactacttaatataaagtgtaatgaatcgaatggactagctatatgtcctccagcttatattgaaaagaacttttgtgtgtgtgtgtatgcatgtgtgtgtgtgtgtttacatcaacatatggaccatagctgaataagatcactgtaactagattctgtaatctattgagccatgaacagtatgctttagtatgaatcctgtctctgccacttatctgctttatgatcctttgctaattatttaccctttatatttcagttttattgcttgtgagtttaatttcataccacattcttactgcatattcagaaaatatatgtagaagaaccattcttacatggcagacataactttcattgctgaagggacactgaacaagacaaatactgttaaaccaccacgaatgctgtgaaagccgtgcattagcttttattttaaaatgttcatttacttatcagtttgattctttttaaacagattccagtattctggtgctattattaattgtttctttttttgtcttttcttttcctgaattttcgtcaaggttatttttaaaagtcttttattctgacttaaatttcttgattacctaggagtttgcttattttatttattgttttcttattattatcaggcgtttggtcctgtctcttcttgcatctaggaatttttgatcgagcaatggacatcctatatagtgagagatgataacagtaaataaaataattggtgctaagagtaaataaaagtcttttaaagtgctggggatatattaaagagtcaataaatagtaaatgtcattgttcctttttgttatcatcagtattctgtaatcactaggaatctgtacttatgtctgaggcttttcatggaagcaacgtctgtgctttcaaagaccttcaaaattattacaaataaaagccaaaggaaaaataaatgcaatatgtttatattgttaagtgcattctatcagctctattcttaaaatgtattttagagcagttttagatttatggaaaaattgtgacagtagtacagagagtttccatatgcactcataattacccctattattaacaccctacattagtatggtacatttgttgcagttaatgaaataatattgatatatgattattagctaaagtccctagtttattcagattttcttaatttttacttttttttctgttccagtatatcataaaaatcaccacaatacatttatttgtcatgtgtccttaggcttctcttgtctgttaaaatttgccagacttttcttgtttttgatgtacttgattgttttcaggagtactggtcagatgcaattcttccttttgattaaaggaaaacattctcccaaatattcagcttattattcattcttttttcagaaaataatatgttccaaaaataatgaaagctctggctgcttttaatttagttaaatggaggataacctgagtataaccattttttgttgttttaaagtttaggttttgagtttgttcaaacaatgccatctaattttcatttgttaaaaagtgaaatgaataatttttgacaagatatagttagatgacttgtaaatgaaaaccatttacagaacatttattatattttaaacttcagttttccaaaattgattagttattcatttatcaacatactgtgcattgaatattcctatgtgtcaaatactctgctaagttttaattgatggttcctgatagtagtattgaaacctatgcatcttatacacatcattatcttcaatctgattacctagtagaagaaataatgtttgtcgtaatttggctgtttaaagtatatttttaagtagtaaaattttattttgtattaattttgcagaactattatggagctgctaagatgatattttctgacaacccacttggtctgacttgtggaatggtatgtccaacctctgatctttgtgtaggtggatgcaatttatatgccactgaagagggacccattaatattggtggattgcagcaatttgctactgaggtatgtatgatatacacrtgacatccccccactaccatcaccatgcacaaatatcttaaaataactttaatccttggtgctctgttgatacccaacatttttagtgtgacacacagctcaagtatgttttgtacaacaaactttatttttattcagcagcttagctacaaaaaggaagtgtataaaaccatatgtcaaattagttgcaatcccagcaggttattaaaatactttgactgaaattatataaattagatgatccgaaaatagaacttattcattaactttatgtggaagtatggcaaggagaccctcttatgaaaagactatcttctgtaacagattattttccctgaagctctccttaatctttaaagcttgaaatacagcatatttcattgtattctttgagtaataatgttagagaattttcaaaaaccctgaaactaagtaatgttatttaaccacattaataatgtcattagattttgtgaacttatagattggaagcaggtcttttatttgggtaaaaaatgtataaggaaataaaatgagagcacttttttttctgtttatcccatagactttgatcctggctttctctttaatgaatcatttgtaaagactttgattcttcagacactcttgggctctctgacgtctcctatttggagtcaacaagcaggttaattcccatgtatcatttaaatgatcagcttatatgaagggtatagtaagattttataatctttggagactagttggctagaaggtcaaattaagtgcccgtcaacctagatttttagttaatgacttactgatctggttttgtcagcataaacacaatgtgttctttcattttgggacccttcccataatattcctcaagcttaagtctcactttgctcttagtaataaatcagggttattcccttcctgctttctgacaggttaattctaaagaagagctcctgggaataagaaaataraaacaattcgaggttgtggattgttgcaataaattctgggatttaatttcttttcttaccaaattcaaaattgcattaggcttacctgaccactacgaagtatgatctttactacctgtgaaaatccttagttgatggagaagattcacttgaattcctcctcacttttctttggggacccattgcctcttcattaaaccagggcaagctttcacagatgcagtaagtgaaaggtcacatagtatgtatatcaactaacacagcattttaaaacaaaatgaattaaaatgatatcattagtaattgatctggtcatgagaggtgtgtgtgtttgtgtgtgtgtgtgtgtgtgtgtgagagagagagagagaaagagagagagagacagggaaatacattattcctctggaaactctcacatggttttaattcttttctctgggaacactgtccctctgggaactcttacttggttctaccactcattcccagagcagagtctatttaagacagagacatgtgccttcagaacagaatttattagaaactyactaaaatttgagagtggtcacacttaggtcttgccataagtatcacctaatgaagagttatgcatagattaggactgcagtagatgcattttaagtgaatcaaggaatttagaataggaatgtatctgcttatttcattccaattatagtttgtataattgtaatttcaatatcaaattataaattaaaaatgtcctcgtgggaactactgagaaaagctttttgtccttttttttgggttggccgattagggtgcctgattttagaaagtcctgtattccctaggtcagtgtgtggtttacttaaatttacccaactgtcaaagttattaggaagttaaaaaaacaacaaaacgagtaactccgttttcactgatattcacggaaaaaagtacaaaatgcgaaatgttattctttcaaactactattgacatgagtatttaagttgaagtgtaatatgatgcaaataattttatattttgattgtttgataaaacaatgattgttttttgacctttaaagaaatacaaatctattttttcaaccaaattaagcaaaggttaggaaagcagattacaatagtatggtatttttcaaaattgtttttcctgtgacttataagtgatttttaaaataccaactcagtagtctgccattattggttaggtacataccttattcttctccagtttaacatgagcatgtgatttggagggaccatagtggaaaaggaataaatcacatgatgcatagccttatgtagaatcaggaggccagctgcttttttttttttttttttttttttggcagggttgggggtggatcttgtgttgtcattcctattcagccttttgctgtttccacatttgcagtgtgaaaaagccaccttccttcacacactggtgtgttcatgtagtaaacaggctaccggggtgattgtgactcactctaggaggcactttttttccctagtaatattttaatcctatcatgacattgtttcaataaaataactgggaaataatagtttagtatagattttatcagtcacatgatggtttttgaatttctctgcacaaatataacccttgaaaattttattttgaaaatatttgtgtatttattggaattttgaaagaattatatattatttacatttaatagaccacctagactctcattgcctctgaaatttaattaatgaattgttggaaaagcagaaggaaatgagaatgcatctttctacccattgcctaaagtttgaaaaaaaacgattttacatagaaaattagctgcatgtcaaatcagttctcttctactgattaaaaaattatggaggcaatttagaaatattaaaattaaaaaatcccagtcttccaggatttgtgtgtcaaaatgaatgagagctggaaaatttatacttaaaattaccacctcaattctgaattttcaggaatatactggattatgatattgacatctaaatataaaatttatttcacaaaaacattttataagatttttctgatatctgtgaaatataccatcttatgatatatacctcttagcactttacttatatttagattttatacttttattgtactaatacccagaatctacaagaaactcaaacaaatcagcgagaaaaaaaaaatcccatcaaaaagtaggctaaggacacaaatagacaattctcaaaataagatatacaaatggccaccaaaaatgtgaaaaaatactcaacatcaccagtcatcagggaaatgcaaattaaaaccagaatgcactaccaccttactcctgcaagaacgatcataatttaaaaatcaaaaaataatagatgttggcatggatgtgttgaaaagggaatactttcacattgctggtgggaagtaaactagtacaaccactatggaaaacagtgtggaaatttcttaaagcactaaaagttgatctaacgttggatccagcaatcctactactgcgtatctacccagaggaaaagaagtcattatatgaaaaagatacttgatcacacatgtttatagcaacacaattcacaattgcaaaaatgtgaaaccagcccaaatacacatcagtcaatggttggataatgaaaatgtgatacaaacacacacacacacacatgcacacacacaccatggaatactactcagccataaaaaggagcaaaataatggcattcgctgcaatgtagatggagttggagaccatttttctaaatgaagtaactcaggaatggaagccaaacatcatatgttctcactcataagtgggagctgacttgtgaggacacaaaagcataagaatgatacaatagactttgtggacttagggggaagagaaatggtgggtgggaggatgagggatgagacaacccattgggtacagtgtacactacttgggtgatgggtgcaccaaagtctcagaaatcactactaaagaacttaccagtgtaacaaaaagtcacctgttccccaaaaactattgaaatatttaaaaatgtaagaaatttctgtggttttaagccaaaaaagagaatggaactgacaagcaattgtagatgaaatcaggtgactcattcagaaaagaggtatctgtagattttccttttttatgtttttaaacattttttttattttactttttgtctctcagcaggtttctaaactatcacctctcatttgactttactcaatccttgtcgtatcagcatatactatttgcagtaatgcaataaatactttgaaatatacaataaataattaactacagttacactattgtgctactgaacagtagatcttattccatgtaagtgtattttcatacccattaactatctggaattgaattggatttttcattaacacaaataaatgacaaatgcttgaagtgttggatatctcaagttaccctgacttgatcattacacattgtatgcatctatcaaaacatcacatgtacaccatacacatttgacactaatatgtattaataataattaaaaataaaaaataaaaaattgaattttttcatgtaattgataaaatgtattttgttttatttgctttagattgaacatatattatagataaaatgctaaaggccatgatattcccttcccaagtcaagcactctgattcattgatgaatatggtctatgttttatgtttcctaagaaataattgtacaaagaatgtggaattctcaaatgaatgttgaagtttagaaactttctcatctgtttattgaccattcatcttcctcatctttttttaaaaagtttattctttgtacattgtgtcatatgtgtggtgatggagggatctagggatataacacacccaccctggattctctacagaaagccagttaactcaattccatttattgtgtagtttgttgtttccacactgatttgtaataactctgattttatacagtaagatcatatgtatgaatttgtctgcttttgtttttttggcagggtttggagctctattttttttacattggtctatttatgcatccattcactgacacaaaatgtattaattgctacagttttatatttttatatatgatggggtgttttattcttgatttaccattttcagaattttgttaactattcttatgccttaataacatgatgatgggatatttcttaagggttaaagaaagaatatactatatattccaagggactgtaaacatttatttctatattttatcaagggtagacacagtttgagttaaattagtctggtaaatatacactaatacaattaaaaatgtcaagtgttatgagactacattagagaacatttaacaattatttaaattacatcaacatttatgttttgcttaaaaacgataataaacagttttgaagaattgggaatggagaaggaacttgttcactcaaattagtatatgattgttttaatagagcaaatattacttctaccatatcttcaccttggttatggcagtcactgaaattcttaaacttttgtattctacaactctattttaggagaacatagacatatgtattctaatgaacaatagagtattgcaggtgtgctctgaaataatgtatttctgtgataaatttcatctatcaaatagaagagtggagacagaaatattaagtgcaagccccgtattaaaaacagtcatcaaaaagatgagtatttgtgcataaactgaaaagtgaggttggaaatactctagctgtgtattatgttgattgctttataagtaagatgatcaaatgaccgagataggttagataatgatcaggacattattaataatcagtccagtacagcaggagtaaactaacaccaccccaggcaaactggcttatgtgaatacccagtgtagtaagagcccactaggtaaggattcagttaatcaaactaacattgattgggcattgatcagcactgtgtgttgttgtagactgcttctttactacaagtcctagggaacattgtagtttctcaggaaataaagccaacaattgaaataatgtagtaaatgtaatgagacatataggtttacattggcatccttggacttattgtccaatcttcattaatttttgtcacatggttttggaggtgattagaccttagtgcaaagaaaagtatcaggcaaggagaaaatgcagttatattgtactttgcatagtgcttcagtgcatttttgtaatatctcactcaaaaatgctgataaacaacgcttgagggcatgcaaaccaggtaatttttttcccattttggacataaggaaactaagaatcaaagtgattacaaaatcacagctaatgttaaataaactcccagtgtcctgcacaatgttgagtactttatttagagcttgattaatcctcagaataactctccaaataatgttattatttccattttacatatgagtaacaggaaactccaggaaattaattaacttccacaacctcacatgtagtgagaggcaaatctggaatacaaagctagtggtttaattttcattatttcacaaactcttacttgccccaggtaatgttactagtcaaagacagaggcgctcaatgtaaaccctggttttctggctgtaaggccacagcagtatctgttgcatcttctaggctagccaaatatacttggtcaccatacctcacaagtccttgtttttctgttagatatgaagctactacattgaaataggttgggtaagaccaacacatacggcttagttgtttttttttttttttttttgtcttttcttttttaacttctgtagccaggaatgaatcttaagttttatggggcttcagataacaaaatgttgggttccttctttagaaattacattacagcactactgaaaaatttaaatacaaggccttagaaggggtctatatgggccaggcgtggtgggtcatgccttwaatcctagcattttgggaggccgaggcaggcggatcacaaggtcaaatcaagaccatcttggccaacatggtaaaaccccatctctactaaaaataaaaaaaattagccagctgtggtggtgtgcacctttagtcccagctactcaagaggctgaggcaggagaatcacttgaacctggaggcagaggttgcaatgagccgagattgcgccactacacaccagcctggcgacagagcgagactccatctcaaaaaataaataaataaaaagggggggtctatgtgacgaggagccttgaagcgttaagtgtttatctgcagttttattttattttggaatgcctaagtatgattttgtgaaagctggtatacaaataaatttaggaataaacctagcacatttatgatacagtttgacaaactgatcaataaaatctatcagttcattttgtaatctataactaagataaattatcatgataatgaaaaattactaatatatatagctaataactttttgcaggtcatttataaataggatatagattaaactatatttgttagattaatgatatatcacacttgccctattatcccaaagttttatcactttaaatgggatttctctatactacttctatttaaaatagtactattcaattatttgtgaatgtctttaaccaatacccaaccctcaaacacaaaggtgaattatttctgagagaagtaagatatagatgaaaaatatgcattaagcactaataagataaatattttttaccctggtaaaatgtgtctgtctggaatgcaaatacaagtaacatctttgaagatttgatttgtgtctctccttttactcttaatgcagtgattaatagaaaagaataatgtcttgatagaattcactaaatatctgacattcttctccaaaaatctttagaaatctattaaaatattccttactggcacaatgatttataatagaactgtggggccagatgaattgctagatgatttttattacaatattttagtttgttttaaaactgtatcttaatatctaggacttaaaaataagctaccgtgatttgggggcaataactttgaaatttaacgaaatcgcatggttaaaattatttgcggttacttttttctacattagtttttaaaaataaatgtaaatttatactatttcgttgccaatttacagttttaaaggattcgttggtttaagcttcaacaacttaaaaatgtatatactttcataaaaatatttgatgactcataatatagggtagtataaagcaatattattgtatcaacatgaatcacttgtaaaaggcatgatgctgtaagttaacatttaagccacccatttatcttcaaataatgatgataagtaaaatttaatgaaagtagaaaaaaaattaagaggtgaactgaaaaagaaatataaataccttttgggccagaaatggtataaaaacatggggactaggttattctctgctaacttctgctggggagtggtctaagataaacttaagtgccaaaaacatcttgcatggtagaggactggactcagctccacctcatagaaagtttaataaaaaataggtgcaactgctgtacagagctgaggcttatagaaagctgcagaaaaaagtagagaaagctgtacagcaggtattgtgggcatgtgtctatggtacagtgatttggttctgtgatgcctctaatcaccttggactggagccctggactttaagaaacttggttctgcagtgggagagagggataggagtattgttgattgaaggccacacacacctgatacaaagccatagggggagtgccccgaaagagaataaaattcactcaacgtaaatgagaaacaaaaaggtagaaactatgttaggaaagataatctattagtgataatttaaagacttacctgatggtacctgactttatcctaatgaaacacaaataatattataatcaggcctttaaaattaatatgtataaaataatatcctaaaaggagataaaataaaaaaatcaacggtgagtttaatataaaaaatagttgactgtaaatttacactataatgacaatctcaatagaaaaggtcagttttgggctggatagaggcataaattgcagaactaaagaaataaaaagtaaaaatatgatctgagtattcaaccagagcacaataaagagatacgaataaatgaaaagtttaatagagaagttcagaagcttctaagactccaatacacatgtaaggggagctcctaaagtagagagacagagattggcacaggaggagccttaaagcagttatggtggaaaattttccagaagaaaggaaagatgaaaggtcttcacctagacacagggttgtggtaatattgtgcaatactaaggataatgagaatcagaacttcaagataaagggaaaacaaattactggaaaaccaaatgacaattactctgaccttagatttctcatctgcatctactaagagttattctttagaaggaaggaaacaaatgtggaaagaaagataaaagaaacaatgtgtaaaaatatggttgtgaatataattaaatattgatcccagagtaattataacttattttgagttttaaaaataaagatgtaaaaaaaagttttataatattgacaaggacgtgttttggaagataaaaataataataaaaaactcttaaaagatgtaatattcataaacatttatacacatgacaacataaatttactcaaaatttgtaaggtttatttgtataaagtttattggattgatttaagaaatctatacttttctgagcctaacatagaacgaatgcatcattttcatgcacttgcagaacatttatcaaaactgaccatgtactaaaaaacagtgacttatagtccctgacttacaatgattcaacttaggattttttgactttaaaatggtgtaaaagtgatgcacatttagtagaaaacttacttcaaatactcattcacctactttatttttaactttcagtactgtatgcgataaattacatgaaatattcagtactttatcttataacaggctttgtggtagattattttgcctatctgtgggctaatgtaagtgtcctgagcatatgattttggataagtttcttataactaaactataaacacttaacgttttcatctmtatttggtcagttttaaccactctattcaattggtttatcaaatatccaatataacctttgtttagtcataataacacagactataatcttatgagtcagttcctttgtatagaaaatgaacaatcatacctaaagtcgaagatttttaggattggaratataaatattaagttccccagagagtgccttgtaaggaaaaggcattcatcacaagaagttatcaccattgactctaatcttcacaataaattgctgaagtaatcattactcttttaattttcagtgttggtatttaaaaaggtgaagtactgtctaatatatatatgttttttttattgttgtttttaaggtttggcttaggtgtcaatttctctttcaggtgggtttaccttctcaaatactctgagagcaacgtttgtgaaaattaaccctgttccagacaggctacatagtaatatagtttattaaaaatatttaggacatgtgagtgctctattatccagggagctagttactggagagtctatgttttttttcatactggtgtctaggacataggaggtacctaaacaatacctaccaaattgaaaaggaaattgaatgaaagaatattctgatttcagctaacacagtatttttaacctgccagttgtttctctcaatgtctattttaataatatgaaaattatggaaaaaaatctttgagaattactaatacagtaataattttgataaataaaaatttgacattacatgaagtttttatcatttttaatacatttgaaacacagtactcacttttggtgttcctggtctaattgttatgaagaaaactatttgtcaagaagcccaagtatatttcttttcaaagaatgaatgcagtgattagtatgtactcagtatttcctttgacttgtcttacaaaaggaaacaaacaacaaagaaaattacatagaagcatctcctagaaggtatgtaatttcaggaaacttacttttggatgcacaaatagcaatttcttcattcaggcattcaaaaggtaacgagacattcatcccactaattaagtaactcaagaaactgaaacgagcaaaagaaaaactgatgtattatttttattaagatttatcttagacctacactgatgaaataacattcctttagaaattaccagaaattatttttatttgataatgaaatcaaggtaaacacttgcaagagtataatcctcttgtgaggtatgtagaatacaatcatactgttacaattcatccttcaactagtagagatgttctaaaatttccaagagtattttacttctcatgacttccctatggtatatatttgctattgtttggttaattagaacaaacagagtaattgaggaataattacagctatcaaacatttatgtttattttcattatatactcttagcaagaagggttaaaacaagcaagagttaccctcaaatttgaattggtaaatatacttttatttacaatgctttgtcttttttcatttatagaacactatataatgattagaaaattatactatttctgtctccagaaggtgaggagacttgggggaaaatcctgtggctcctctctgcattgcaatctttccattttaaatatcaatataatctctccctttcttcaaagtaatgtgaaaattatggagaaaatgctggtaaagtcaatttggagtggtgaaatacatgcactttctagatgaatgaaagatgagaaatcacaggatgaatacacaagaaaattaatattaaaaatgttcctcaagaatgtactatgtacccacaatattaaaaaatttaaaaagtaaaattaaaaaaatatataccatgtacttacaaagtaaaaatattaaaaagtaaaatttaaaaaaggatattcacttgcagataattcttcattatcactaaggtagaactgttttccttggtgacttttactactttgtttaagcatatcactgaaggccaggaattttgaaattcatcaaaatcttgttgagtgcctattaaaataatcttaaaatagtccaagtgatacaatatttgtagggaagggaacaccttaaaaagaatacaaatgcaatttataagacaagaaaaggaaaggaaatgtatacagagaaggaagaaataaaactgtctttgttagcaggtggcagaattgtctatgtagaaaattccaaagaatcaacagaaaaactcctggaactaatacacaattttggcaaaaaaggatataagattaataaacaaaagtcagccactttcctttacaatagcaataaatgattagaatttgaaattaaaagtataccatttacatttgcatccttaaaaacgaaatacttagatataaatctaatgaaataggtataatatgtatatgagaaaaactatgaaactgtgatgaaataaataaaaaaagctaaataaatagagacatattccgggtttccaaatagaagacttagtattttcaagatgtcaggtcttcccaattagatctatagattcagtacaatcccaaatcaaaatctcaggaaactattttatagatattgacaaactgattctaaagtttatatagagaggcaaaagattaaccaacataatatagaacaacaaagttggaggactcggactacctgattttaagacttactgtaaagctgcagtaatcaagacagtgtgatattgttaaaataatagacaatagatcactggaacagaatagagagcccagaaatagacacacgtaaatatagccaacttatctttgacaaaagagcaaaggcaatataakggagaagggatagtcctttcaacgaatgatatttataccaccctacttccatatgtaaaaaagtgaatctagaaacaaaccttacacccattaaaaattaattaaagatggatcataaacctcaatgtaaaatacaaaactacagaactctttgaagataacatgggagaccatgtagatgaccttcggttagacaatgactttttaggtacaaaatcaaaggcaagatttataaaataaattattgataagatagacttcatcaaatataaaaaattctgagctgggtgtggtggcatgtacctgtagtcctggctactcagaaggctgagggaggtttgcttgaatgcaggagtttgagaccagcctggggagcatagtgagactctcatctcaaaacaaacacagaaacaaaattaaaacttctactctgcaggaaactgtcttgaaagaaaatgaaaagacaagccacaggctgggagaaaatatttgcaaaagacatacttcataaagaactgttatgcaaaatgtccaaaagtctcttacaacccaacaatatgaaaacaacccatttaaaaaatgatacaaagaccttagcagatatctcaccaagaaagatatacagatggaaaataagcatctgaatagatgcctcatatgtatcatcagggaaatgcaacatgaaacaacaacgggataccactatactattagaatgcttagtctgctcagtttgctacaacaaaataccataaactggatggcttataaacaacaaaaattatttctcttggttctggatgctgggaattcccatggatgaaattggaaatcatcattctcagtaaactatcgcaagaacaaaaaaccaaacaccgcatattctcactcataggtgggaattgaacaatgagatcacatggacacaggaaggggaatatcacactctggggactgttgtggggtggggggaggggggagggatagcactgggagatatacctaatgctagatgacgagttagtgggtgcagcgcaccagcacggcacatgtatacgtatgtaactgacctgcacaatgtgcacatgtaccctaaaacttaaagtataataaaaaaaatatatgctcataagctgctttctggtcataggtaaaggctttttactgtgcctgtcttacatgtgacaggggcaaggtatttctcctggggttgtttttaagggaactaatctaattgaggagggctcctcatgacctaatcacctcctaagtcatgacctaatgactttttaaaaaccccacctttctaacatttgtggttagttttcaacatacgaattgaatgaaatgggggcgtagacacaaacattcagaggagaccaaacagccaaaatgcagaacactgatatcaccaaatgctgacaggattaggagaaataggaactttattcttccctggtggaaatgcaaaatggtacagccaatttggaagacagtttgacagtatcttgcaaaattaaacatactcttatcatatgatctggcaatttaccccaaagagttgaaaacttacgttaacatgcaaacctgcacatggatatttatagcagctttattcataatcaccaaaatttttgagatatccttcagtaagtggatgcataaataaactatggtacatacagatattgcaatattattcaggattaaaaagagaggagctatcaagccatggagagacacagagaaaacttaaatatatgttactaaatgaaagaagccaatctgaaaaggctgtatattgtatgatttcaactgtatggcattctagaaaaggcaaaactatggaggcactaaaaagaccagtgattgctggggagaaggtgagagagggatgcatatggagattaagaagatttttaggacagtgaaagaaactattgtgtatgatgctgtagtcctatgatgctattttcataataaatttgtgcaaacccattgaaggtgcaccagttgtaataaatgtactcaaatgtaccactatggagaggatgttgataatagggaggcagttctcttaatgcaccaactaccttagttctcgggtggcaggatagcatggtgggaaaccagatgatgtagttcagtgttttttaaatgcttcatgaacaattcttggtttgtaaagttaatttattaattataataaccagctatttttgttagtagagtggctagaatatatcaaaatctattttatcagaatgtatgaatttaatatattaaaatataacatattctaagtgggttaggaatgacaaattcatataattttttcagttatacatttcttattgaaaaattagagaaatatagtgaattttttagcgattactgtgaaaatgtaatcgttaaaaaacaaatttacaagaaaaaaaacccatcaaaaagtgggcgaaggatatgaacagacacttctcaaaagaagacatttatgcggccaaaaaacacatgaaaaaatgctcatcatcactggccatcagagaaatgcaaatcaaaaccacaatgagataccatctcacaccagttagaatggcgatcattaaaaagtcaggaaacaacaggtgctggagaagatgtggacaaataggaacacttttacactgttggtgggactgtaaactagttcaaccattgtggaagtcggtgtggcgattcctcagggatctagaactggaaataccatttgacccagccatcccattactgggtatatacccaaaggattataaatcatgctgctataaagacacatgcacacgtatgtttattgcggcactattcacaatagcaaagacttggaaccaacccaaatgtccaacaatgatagactggattaagaaaatgtggcacatatacaccatggaatactatgcagccataaaaaatgatgagttcatgtcctttgtagggacatggatgaagctgaaaaccatcattttcagcaaactatcgcaaggacaaaaaaaccaaacactgcatgttctcactcataggtgggaattgaacaatgagaacacatggacacaggaaggggaacaccacacaccggggactgttgttggttggggggagcggggagggatagcattaggagatatacctaatgctagatgacgagttaatgggtgcagcacaccaacatggcacatgtatacatatgtaacaaacctgcacgttgtgcacatgtaccttaaaacttaaagtataatttaaaaaaaaaaagagttcaggctttggagtcaagtagccttaagataaaatcttttgtatgtgaacctgaccacaggtttcttacctaggaaatggatctgataattgtacctccataaaggagggttgaagactaaatgatagagatttaacataaagcctggcacataggatatatttcaataaatattggccaccttattattgtggggaaatacatattaagtatacttttcattcatctttaaatacttcagtcactctcttctgatattaacaagtttatttcatttattacattgtttcggcagttgacccttcaacttaaaaattaaatcatagaatattagtcagttgatggacaactgacatttgctttaacgaaaaaaagaggggtctttctcaccgaaagagccaaattattttataatatttttgttacattatgaaacaatagggaactatattctaagaaaaaatctcttaggaatttgatactgtaagtaactggacctaataatatcttttatgtataatttgtttgtaattttatgttgcacttctctgaagactgatgtagtttaataaaaggaatgaaaaatattatttttgaaaaatattcttcgtatttatggacattttaaattttgtaatttgttttaactaacttttgtaaacttttatttttaaatttaacaaaattaagttaaccctcttttttttaacttacacaatctattcattggcagtttaaagtgttacaatattagttattttaatttacatttttcatataatgccaactctagatttataattgatttcaattttcatagtttcataatatacttaaatacaaatcactaccccccattcacccacaaaatatttttggagctatttatttggctttttatccatttgccctcattttgtcataatcaggctacattcatggaagtatattgtgtatatatgaaataatccattacttgtatttcagttaaaaaagagttagttgctgatgttttaaagggatagagggccacttatgccttcagatctctattaagttggaaagtgtaacttatgtatttcagaatttagggttgatggtagaagaatattagtggctaaaaaaacattgaatgagccctcatgtattgccgaggtgcaatagtgtgctgaagccagccaggaccagctctagtgctgattaaatttttaggaattttgtaaacaggttgtgaaacacagtaattttgaaaaattaaagtatatgaacatgtagtcataaaaatcatattaaaaataactataacaaatactacaaactcactgcctctaaattatttatttcccattaactatgctcatgagattatttatatctattgcattatatgtttgaaattttaatttttgcagtgatggatgtgttcgatgtattatccactagccacatgtagttattgagcacttgaaatataattagtgctactgaggtctttgcatttttaattttatttaattttaattttaatttgaacttaatcaaatgtggctagtggattccgtcttggacactatgagtttagatacattctgtctcatggaatttgaacactaggtgaaatgagaagtagataacatttgctatatgggcaggcagtttcctaaagcactttccacatataattagctcattaaatcctcaaagcatctctatgaaatatattttattaatcccaccttattaaggagactgaggcatagaaatgttaaaggacttgttcaattctatacatcatgagaatgatggaagtcaagactcaaccccaagagtctcgtttcaatgccatacttctaaaaatataccatctgttgtgctgaaattcacaaaaatgtggttcaattatttacttccttaaaaattgcatcaaggttaatccaaactcctgttaaactcggggaaaacctagtgcaataaaaagttgtaaagaaaaaattccagaacagagcaggcaaagggataccaattgatagattagtgtattgagccaagcaatgtaatgagtatgtattgaacaactcttaagctgcagtgcacggggttgagcaaatcgggctaacaatttacattctagtatgtgcacatatgctatgtgtactgaggagtgtgcttgctttcatttcttcaaacactttttaagagtctttaactctgtgttgggtacttaatagggattctgtaaacattttttaaaataattcaatgtttgcatctcataatttttttaaaagaaggcttaaatttttattcaaaaatattaaaatattttaggtgaaaatacatacatattgtgtattatttggtaattgctactttattatttgcatgccattagctagaatttgttcagatatgctaggcgtttcagaactaacctatttcttgcttatgagtgaatgctgagcacaaattatattccatttggttatgacactgtaacttcatattataatgaatgctgtagccttagtacatttaaatctgcttccattgtaaaagatgtcagcaataaatgatacttttaaatacatcataaatgtcttcatttaagatttgttaaaacacaatgttatttgtaaatgttagcagattttaacatgggaaagttaaatatttaattattagttcacaaagctaaaattattcaactaaatatgaaagaaattagcatttatttaatccctaaataaaattagctatatctctgttccctgatcagagatccttgatcacgttaaacatatgttttaagtatctctttatgaaaagtatgtgaaatctttctttggggaaatataaaaaatatattttaactatattttaattaatgatctaataaaatatatatttatgaaaagtatgtgaaacctttctttggggaaatataaaatatattttaactacattttaattaatgatcatataaaactaccagaatttagttccttgttcacattgcttagaaaggaataaaagataacagtatatgttgattcaaaaacaatatttaagaaaatctgtactgtttggatagcacagggaagagcaggaacacatattaataatttgtaaattatacaaattgtagctgggaataagaaattattttattaccaatttaaactcattagttaacatatattcccccttatgtataaaaacactgaatattaaaaggtgaattcaaagatgttgtcttcccttaaatattttatggtctaagagaggaaacagataagtaaaccagtaaaagtgacaaagtattagaatgaaaatgacaaaatattatgagaccatttatgaggacctttcatctcatgcttagaaattgaccctataatacttgttgataataccctcttcaattttttaaaataagattgtttggatgttccttatgtgttttgactttatttacaatagtttgtggtatatgtgggatgaggttaagaaaatgtaaagtcctgtcacctttattcctcattcttaagaaaacttacatttatatctattgatctctgtctgggtttccaggagagaaagttactgctttgacctattaaatgcaagcaactgtgtgagccaatccattggatagcataaataacttacctataatatggatttattcattggccacttctattggtagtcaagttttcatgagagtagaataatgagattatagtgatttatttattttacttttagttctatcaattttgctttatatatttaaaattgtattttaaaatcttgttgaaagattgaccatttccttgctatgaaatgttctttaagtttagtaatgcatcttgccttaaagtgtaatatttctaatattggtatatatatatttcatatatatatataatatatatatgtaccagctttcttttggttagtgtttgctttgtataactttttctagtctttaactttacacttatctatctgtgctcttatatttaaggcatttatcttccataacttttgtcttttaattggaattttagtccatttacatttaatataatttctcatgttgacatttatatttaccatcttaccatttgtttctttgtttcctaccctctaccacctatttataataattttaattaatacattttaataatgtgtttttaaaatcccactccctccttccacattagctagttattttttttgctaaatatgttttactaaatgtacttagtaaatttaattttttatttttaacaaattccagcttttaatgaagtttacattcttcttacatatttttgaacatatcaatcatagttattctaaaatttatttttgataaccacacttacgagattatgtatgtatctctttcaatttttttaggtttatttttcttgcaggcttggacttttaaaaataaaaacccaggcattttataaaaaatttgtagaaactgtggttgacttattattcacagaaagtgcattctatcgtttggtacatagataacagtgaggactgatcactgtcatttaaatccagggctgagttgactcaaggctaggttggctatttacccctcatttgccctacttgtagagtgtagccctccagaagcttcagccgtacactgaggtgtgtactagggctctttcttatttagtcactccagtttttgtttttcctggaccatagggttttctgtttagatctttaggtttttgtcatatgcactttaagaattaatctcactcttctgtactttattttgctctaggttaatggcctcctacatttccaaaactctgtgtctctctggtttcaaaagactgccaacatctcttttctgagctgtggttctcttcaagatgcttagccttcctccctttggtaagaagtcgcaaatccctcaggggaaaagtgacttctggtcacttaactttgttcttactttcctctgagatgttagcccttccaagatgcctgcgtcagtagttcttgaatgtttcaactatttttttaaatcattattctcccaaagttaatctgtcataatcaaaagcagaattcaagaaattatttattaaatgtctaccgtgtgccatcgcaatgctaactcctataatgcaagggtaatgtgtttacatgtgacatgttttctgattcagggaactaacattcattctactgactgacatcataacacataccacagatggttatgttagagacatacagattatgctgtaggagcttagaggagaggcacttaatgtaccctctaggtgggagtagggaatgtgccccatgagtgtttcctagaggaggcatgactctagaaaggaaagactgaaagttagccataactcctcatctacttgacacaataaaagttgtaagtataccatattaatactgaaaatgtactgctcattgctatttaaaacaagaattcgtttgaaacattaaaaatatgtttgaggatgtaagctagtttcaaaattttaaccatgacaattgatttccccgtaggtattcaaagcartgagtatcccacagatcagaaatccttcgctgcctcccccagaaaaaatgtctgaagcctattctgcaaagattgctctttttggtgctgggcctgcaagtatamgttgtgcttcctttttggctcgattggggtactctgacatcactatatttgaaaaacaagaatatgttggtggtttaaggtaatgcctacatttatttcatgtttatagtgtcagaaatgatggagcaaaacaattatgaatattgttggttcataatcatataggaacttcaggctcacagatggtattttaaatgttctttttccaaatgttcaagttttgattacattattcactttaaaatttgcagttggcttgaagcaatatttatttaaaaaattttctctctagttctgtgaatttaagagaaatctctgcaaattattttttgattataagaaccaatcatatgaaaaatgattttagccctgtgaatatttcttttaatggagatataactgaaaatcctggatattagtgatgtggaaaacctagatccatggaatattggactattcattgtgttgtctacatagatatgttgtcttacatattttcagtttaaaatttcttaagtcttacttttgattaaaattttgtcagcatgtactagaaatgtatttaaatatacatttttaaaatcacatgatcatattattcccatgaaaatttatacatggaaatgggaatatatattgaaaataaacagaactctatacgggacacatatttcattatcataaagaaataaaatttattacaattagggaatagatattgcttaaaacattttatacaaaataaagaatttggatggtaactgaataatattactcaattgatttttattttctctatgtatattatcaaaaaaatcatggattacaaaatgtatccatttggaatatctgtttctatgcttaacatttaaatttgttgtggctactgccctatgtgtaacaaataaattaatcatacccaataatcacagaggataaatttaatcaaatttgttactaaaatttgtgaagtttcttatgttttttggcaccagtgaatatatgttaataaatgtataaatttcaatattactcaaacaacaatatgctaagcccaagataatataaaattatcaattatcaattatttgtatcattgatataaatatgttgatatatttattaacataaatattgatgtataagctatcattaatataatcttatttgactgaatcatcaagcaaaaatatcacattttaggaagaccctttagtgtgggcatgaaacataaataacctgattgttaagaaataattattcttctgtactgatgttccactactatgaattccaagagattacatgtattttatgaatttatttttctggaaagtaaaatgtcctatatattatttctctggaaagatttagaatatcattttaatggtatttaccacagctttattaattagaaaaaacataatctattaacaatatatgtataagcattgtatgttgttttcagttatacacatcagtgaatatctgagtcaatttttaaaatatgaacttaattgtgtaccctggtaaactaggaaaaatctgtttgccacttgattgcattttcacaaaaggcctaaaatggaaccaaccctatttgtaacttactatgtattgccaattttggtagattactgttgttagcctatctcttttttaactcaaatgcaggataggcatttgtaattcatataaattagtactaaacttgttttttttaaatttatttgctgaacatttttttagtgagacagagttctctggatccagaccaaacatggtggtttttcttttaaagttgttaaattctttcttttgcctttgaatcttttcagtatgtagagacaatatgaaatatttaatcaatctcctttgtactgtcccatggtacaggcattctgtgtcactgttacaggattataaaaactgatgctggaatttagccggaattatagccacaaaactttcctgttactttattttctacttacggctgcctctcattctcttgtatcttgaaagtggctaaaaaagattaaattagctttgtatttgaaatcaattgcttaaagaggtaatgtcaagttttatctttccttctcctttgcatccaaacagattcttttatctctggtgaattagtatcacaaccactttttaagaaatcactggagtcagtgaaaaatatctaggatttaatctccattgcattgaacacatcaattatttttaatgttgcaacaaatttataaaataatcagtagttttgctttcctctaacagtggcttctgtttttaggacacgagtttaacagggttaaaagggcttgatattataacaaagataaacaaaatagtgctaatagattttcaagaatgtttgtacatatatacattctgatttttctcttataaattaatatataaggattatgatgttattgttaggatagtgaggccaatgctgccctttgctttacctctttcaaattttatattgttttcattaggcctattgtttttcttgttgattgacaataaagagaaatgaggtctaggtgaactagttatagcaataggaaatattttgagaatgtgtgatgtattacaaatttaagtctattatctctatagtaataaactgaagcatacctctgtcagagtatgagaattgtgctttaaaaagaacggaaagttgttatagatatatttcatcacatgaaagaaacatgaaaatagaagaaagatttttttcatgttgtctgactttccactgactatactaaaggacttacgattacaagaaatttttttttttcaaagccttagattgttacaggagcacagatagaagaaaagtttgttttcctaagcacaacaaacttggaaaataatcattcctattaaattctgtcttctgtccttttatctcctttctcaccatgcagtcttcagaataatctcatttactctcatggtttcaattatcacctacatgcaaatttcttaaaaatccatatctgccctgacctctttctctattctaagcaacagatttatacattcaaatcctagacatctccgtataaacttcatatcaatgatcaatgttgcttctcttcctgagtttaccatctcagaggatggcatcaccaaaatggggattatctgggctactctttaatatcctggcaattccactttatgaacactctaaaaaaatgtcctctgatatcctttacctctcagtttccttttttttttctttttttcttttcttttttctttcttttttttttgaaagagtctggctctgtcaccaagtctggagtgcagtggcgagatcttggctcactgcaacctccacctccgggattcaagtgattcttctgcctccgcctcccaagtagctgggactacaggcatgcaccaccatgcctggctaatttttgtatttttaataaagatgggatttcatcatgttggccaggctggttttgaactcctgacctcaagcgatctacccaccttggcctcccaaagggctgggattacaggcgtgagccactgcgcccggccacctctcactttctttaccactgcagtagcttccaagcagttatcttggcttcctgatttgttttttcaaattcattcttcctttagtttcaaatctgattctatcactcttccacttgaaatctttcaacaactcctcctaacctcagagataaaggatctgtcctggcataaaaacccttccacgacctgatacctacctgtattttcccctttctccttccctcccttccttccttcagtatatatatatatcgatcacttaactatgtgctggtcattatttctggctctatttagagcataaaagtaaacaaggcaaagtgccttctcatgggccctatattttagtcgtggggagacagacaataaacgaacaataaaccaaatatagaatatgttaagtgaggataaatgcaaggaggaagtttttaaaaaatgatggattagtggtatacctagcatactagatactcagaatagatttttttaacatgctatcctctggtctatacaataagattgaataagaatcacacaataaccagtaataattattttttaatttattcctgtaaaacaaaaaatgattaaaacattattttaatgtgaaggatatagctattttcaattttaaacacaaaaattccatgtgatcatacaaaatgacagaattgaagtaattaatattgcttcatgtgctatcattttatctattccaaatcaacttttcacatattggaatctgtagtatcacaagagtggaggcatatgtcgcctatggggaattggaatgaggaatgcctgtagctgaatcagcagttgctgatggcctctatttaactgtagttctgcaagttaactttcctgtagaacacaatgtttattaaagagttggtaataaaaatgggatcattgaaagcttacatatatattactaaaactcaatagcaactatggctattgtttagaatttagactcaccagagaattttttttattttggcagaggacattgtttaggatattagtgatattatttagaattgctagctcatgaaaataagacaaaacagactcactttagtaagttttataatggtttttaaattgtctaaaaagaacacacctttttactttactgcctgcatctgggcttggtgtggggctggaaagggaatagtgtgtgatgatggagtttaggtcctgagcaactcataaaatggggttgtctgaggaccagtgttgggatgcaagaaccaaagcttactgttaggcatgataaatatgagttacccattagacacccaagtgaacataaaagtctggaatttaagaagaaaaatgtggaagccatcatacactgatgatattttaaagtcctaagacatttcccctacccacttatctcatcccacaataagccttccctcctttgaaacacttgttcacatttagtattttacatttgtcatgttgttctgctgatgtatgtgtgtatgtgtttcgtctatttgctgacttcatccattagtgaatataaaaacgtcacatttttcacaatcagtaatttccacctaccccctacctacttgactgtaaccaaatctaacatttctcagtatttcatatttctctgatttgcttcaggagatgctgggaaatggattctctcacacttattcgtttaacactgtgctaagtgttggtgacaatggttccagagcagcatggggttttaagcagagttgctgaactccagcagcctggcttccattttctctggtgcctgcatctgcattcaaagttatactgccaagggtggtggctgccccttcctcctttttcaggtgtcttcctgctaggttaggtgttccttcctttatttttttctgaccaacagaaaagttgtccctgctttttataacatgcctttcagagtttttttcttaagtcagaaccattgacttgcactcacaccattttttttccttttattccatgtgcttctacttaacatcccataaaaatccaagagtaggcctgactcattggaaggttctcggcttcacaatgtgtctggatgtatttaagattctcatcttgttgtagttggtttatttggctggaattctttgttcatagtccattgcttttgctttcctgttcaaccttttgaggatctgcatcagtgcccagttttagtccatatttaatctccctctcatgcagccccatgtctatcaagtctgtgtgtctgtttgtgtccacatacagtccatagttgttaagaatctttctacttagactttgaagggaaaaccttcttggtgcccagagcattctggcacattcttgttaccttgaggtaatgtggctggagttcacaagttggcttaagagatttttatccctgccctatgcctgaattcattcttaaacatcatcttgtattcctaactagagggaagctcctttagtgtacagctttgattttatggtgtttgataccttgcattttcttttttggtttttttttttttgagacggagtctggctctgtcgcccaggctggagtgcagtggcatgatcttggctcactgcaagctccacctcccgggttcacactattctcctgcctcagccttccaagtagctgggactacaggtgcccgccactatgcctggctaatttttttgtatttttagtagagacggggtttcaccgtgttagccaggatggtcttgatctcctgacctcgtgatccgctggcctcggcctcccaaagtgctggaattacaggcgtgagccaccgcggataccttgcattttctatagcattgagcatgatgtcttgctgattgatatataaaaattaattgcataatcaagttcttaagtcatcaaacaatgaaaaggctgtactttgggagatttttcaattgatgatccagaagattcatcttcaacaattatttattttccaaattaatctctataatatataaaatatgattgctattttatgtatatatacacattaaagatataatggatatacttctctcattgtgcgtaccacattctaaatgtaattatcttttgtgtatccttccctgatcagaaaaagaacttattaacagtgagaatttggtgaaattcaccatcaaatcattgcagcttacacttagctggcacttcgtaaacactgtgcctggcactattcacttttaatgagtaggtgaatgaatgattcagcaaatgaatgaatgaatggattgctgtgtattcatggacatacatagcttttttaattgttaacaaaacactggaaagtgtttttagcttacttttaatactctattatactactcaaataatagtgccataggcctcattttttttttaaatgcaggcaataggcattaatatacaatagaattgttttttaatgactgaacttttggaatactcattgctttcacagaagactaaaatgttctatagatcacatggaactgattttgtaatattctaaacagtatggtaatacagttacacatttgcatatcaacaagctagaagtacatttatagactatgtatatgaatgttagtgtatatatatatgtgtatacatatattaaaatctatatctccatctagctttattaatagattttaagattttttatcttaggaatttatagaattattattaaataaatcaaccaaatactttattgaacttaaaagtattgaaattgcttttggccagttttatatttatcattttctrttgctgtaatttagttatttttatatcagtttctactgtatcttcactccacgtaacatgtttatatcaataagaatgtagatgtcctcatgcatatcttgtgtgatatataaatatccttggaagagatatttattttctactaatccataaagacatgttacctttttttaagattggtcaaagattggtcatttttctactgatgcctgtttttctttctcctttyttttcagtacttctgaaattcctcagttcyggctgccgtatgatgtagtgaattttgagattgagctaatgaaggaccttggtgtaaaggtaaatgaaaaaaacacctatctgtgtactgctcaaaaagaaaggagtaagctctacactaaagattaacagcaaatgtcatgcattttaggaaagaacaattaaaagctacatcaggcagaagcagaaagatgcttccccttgcttagggcatttgtctgtctactgtctgaatgccactagcctggaaaagggcaatcaatagttctcatctggcatgcctgcatgtgattaattgtctgtaagaaacaaattcctaaattgctttaggggttcagtgcagctaatagaaggatttggtttctttaatcatgttttttcatgcaagttgtgtgcactctgaaacattagtatttcacaatttggaacataatttcttayggagatttattttatttgttatattcatcatgtcagtagtgtgaatgtgataatcctttctcaacacaagcagtaaatcagtgggatagaaagcaacagcttcgtattttttattattttgttaaataaatattgtgttattcttttcgagatggttgaaaatttgacacatcgttattttcagcatatagctttaaatattcctcttcttttctgttaagagcattatattctagctcttcacttgaacatattgctatttttgtttcaaaaatgttaatttttcataatagatataacacaatagattaataatgtactgtgatttacataatacatgctgtaagtatatgcagaagatactttgaaaagygattaacaaactactcataccttttgcatttaccagtaaaacttaaaatgaatcaataaaagagaaaacactcaaaaaaatattttgtggtttatatttataattacgttttaattgacagtggccgggtgatgaaacattcacacataatgactaaacaagatgtctgggaataaaaacacatagtatagatttgggcaactttataaaacttaatgttcaaaattacagtgttcaaaatagataatttagaggtgattattttacagaagtacattctgaaaagtttttaaatgtctttcattttgaatacaagttcttctctaaatctcatcaaatatggaaatgattattgaaatttccaactattagattcggtattctgaattgaagatgaatgttcccaacacaaagacatgggaaatgtttgaggtgatgaatatcctaattatcctgatttgatcattacactttctatgcatgtatcaccccataaatatgtaaaattattatatattaataaaaaatgaaaaaagaaattaggctttatttctccatttatcttatataaaattgcaaaattgcattcagttttcacaggaccagatatattgcataaattagagcatacccattactcttatttgaaaactcatcaaggtgcagtagtaggcaatatactgagtgccaagaaatatatcttagctatagtcatgccactttttaattttgtcagatatctttggcaaagtctattaatatctagaacgttgttcaaaatctgctcaaataaaaagtatgctactaatatttgaacaaaatataaaaatatttgtttacatatgcaaagaatatctcagaaagatataagaatctgatagaacagattgcctttgagaaggtgtgggacaattttttcaacattttgtacatttgaattttaaactgtgaatctgttacattattgaggaaaaaaaatggaacctaaattaaagagaaagctaacagtactgtcttgtccatctctcaagctgttttaagatgtgaaggaaatgatgttttcaaatttgctttgtaaacaataaactgtatatacaattctgaggaaagatagcagtgagattccttttcactttgaggatttgtatcctttgatgagatactcttgcagcttttatgatttacgaactttagccataagtgggtacattttgacaaagtggtctgtgctcattacctccttttgaaaagtcatcacggaggttctttttataatttgccttctgtttgtctctctcaactaatatatattttaaagtcaaaaataatttcctggcaatgaaatgaactatttttgtgggttcatactgtttgactcccgtgtagcatatgatgtaagagttctcttatatatgtatgtatgtattttgactttcatgacctagcattatcttgtttattcttctactttctcttttacttcccaaagaggtttatttcatttactcaacaaataattgttcagaacttatttttgccaagtagtatgccaggactagaaccatgtagagccatccttcttttgaactccagtcctgtatacttagtagtttaataagcgtattatcatccaaataacataacctgattatatccagaacccagttcagtttctttatcttcactcccaactatctttttttagctgcatttcctattgaatattttaatttcaatttatcttattagccaatcagtccttgttagttctaagattaattttttaaagtcaaatatcatgttacaagagaataaagataattttgtttgttatttgtacattattcatatttttcttccacaatttcaatatctagtatgttaaaaaaaaaaagaggtataatacatggaattctttttcttgtctctgaaatgggatttttaatcatattgaataaatatttttctagtcttacattaatacattttattaatttaaaaagttaatcaaaagtgtgttaaatttttcaattcccctttgtaaatacttacgttgagtttatatgttgaattatactaatcattgaatttctaaaatttatcaattttggcatcatgtttatttctgtacatgtaattcagattcaattggttagtatttttaaaatttttcttgtgcattcatttatttatgtaatggatattaaaaccagaaatatcgcagggaacagtcaaataatgttgttaccattacaagttttaaatgtgcaaagactttttgttttgttttgctttatttttatttgttgttttgtgaatttttgataatagagttatattagccttataaaattaaacttctaagcattttattattttctcattggtaagaatattatcttgagacatcttttttactaaatttggaagttgtcatcttctccaaaccctcttatgaaatagaactatgaccatttttcttcatatcgtctataagttttttccactgattttattctcgtatcaattttgccaatatatttctagaaaaatttctgcttcattgaggtttttgaatttattagcaaaaatttaagtctactatttcagtatacaataaaaatatgtcatctgtgcctgtgattatatttgctcttgcatctctaaatttcctttgtgttttcctatccagttaatattttctttaaaataaacagttatcaaagttttgttttcttattcattaattgctgactatatatttattaatgctttcccctgctattcttatttgttagtctcttttttaaatttagttttattttattttattttacgttccaggatgcacgtgcaggatgcgtagatttgttacataggtaaacgtgtgacatggtggtttgctgcacctatcaacacatcacctaggtattaagcctcacatgcattagctaattatcctgattctctccctgtccctgccccactcaactggccccagtgtgtgttgttcccctccctgtgtccatgtattctcattgttcagcttccacttgtaagtgagatcatgcagtgtttggttttccatttctgtgttagttttctgaggataatggcttccagctctgtccatgtccctgcaaaggacatgatctaatttttttaatggctgcatagtagtccatggtgtatatgtaccacattttctttatccactatattattgatgggcattttggttgattccatgtctttgctattgtgaataatgctgcagtgaacatacacctgcatgtatctttataacagaatgatctatattcctttgggcatatacccaaaaatgggattgttgggtcaaatagtatttctggttctatgtctttgaggaattgccacactgttttccacatggttgaactaatttatattccactaacagtgtaaaagcatttatatttctccacagcctcgccagcatctgttgtttcttgactttttaataatcaccattctgactggtgtgaaatggtatctcattgtgggtttgatttgcatttctccaatgattgaatgattttgagctttttttcatgtttgtttgttggccacataaatgtctcattttgagaaatgtctgttcatgtcctttacgtaagttttttgtttgtttgtttgtttgtttgagatggaggatggagtctagctctgttacccaggctggagtgcagtggcactatcttggctcacttcaacctctacctcctgggttcaagctgttttcctgcccgagtgtcccaagtagctgggattataggtggctgccaccacacgtggctaatttttttatttgtgttacagatgggattttaccatgttggccaggctggttttgaactcctgatctcaagtgatccgcttgccttagcctcccaaattgctgggattacagacatgagccaccgtgcctggcctcctttgtccactttttaatggggttggtttttttcttgtaaatttgtttaagttccttgtagattctggacattagacctttgtcagatggatagattccaaaaattttctcccattctgtaggttgcctcttcactctgatgatagtttcttttgctgtgcagaagctcttttgtttaattaaatctcatctgtcaatttttgcttttgtgcaggtgcttttgatgttttcatgatgaaatctttgcccgtgcctatgtcctgaatggtatttcctagattttcttctagagttttatagttttgggttttatatgtaagtcttttttttttttttttttttttttttttgagacagagtctcgctctgtcgcccaggctggagtgcagtggcgcgatctcggctcactgcaagctccgcctcccaggttcacgccattctcctgcctcagcctcccgagtagctgggactacaggctcccgctaccacgcccggctaatttttttgtatttttagtagagacggggtttcaccgtgttagccaggatggtctcgatctcctgacctcgtgatccgcccgcctcggcctcccaaagtgctgggattacaggcgtgagccaccgcgcccggcctatatgtaagtctttaatccatcttgagttaatttttgtataaggtgtaaggaaggggtctagtttcaattttctgcatatggctagccagctttcccagcaccatttattaaatagggaatcctttccccattgcttgtttttgtcaggtttgtcaaagaccagatggttgtattgtgtggtcttatttctgagatctctgttctgttccattggtctatgtgtttatttttttccagtaccatgctgttttggttactgcagccttatagtatagtttgaagtcgggtagcatgatgcctccagttttgttcttttggcttaggattgtcttggctatatgggctcttttttggttccatatgaattttaaagtagttttttctaactctgtgaggaatgtcaatggtagtttaatgggaatagcattgaatgtataaattgcttcgggcaggatgcctattgtcatattaattattcttattcatgagcatggagtatttttccttttgtttgtgccctctctgatttctttgagcagtgatttgtagttcttcttgaagaggtttttcactttccttgttagttgtatttctaggtattttattctctttgtagcagttgtgaatgggagttcattcatgatttggttctctgcttattgttggtgtataggaatgctagtggtttttgcacgctgactttgtatcctgagactttgcagaagttgcttatcaacttaacctattgggctgatcaatggggctttctagatatgggatcatgtcatctgcaaacaggcagttcgacttcctcttttcctatttgaatactctttatttctgtcttttgcctgattgccctggccagagcttccaatactgtgttgaaatggagtggtgagagaggatatccttgtcttatgccagttttcaaggggaatgcttccagcttttgcccatttggtatgatattggctgtgggtttattgtaaatggcttttattattttgaggtatgttcatcaatacctagtttattgagaattttttaacaggaaaggatattgaattttatcaaaggacttttctgcatctattgagataatcatgtgtttttttctttatttctctttatgtgatgagttacatttattaatttgcatatgttgaaccagccttgcacctagggatgaagccaacttgattgtgatggataagctttttatatgctgctgaatttcatttgccagcattttattgaggatttttgcatcaatgttcatcagggatattggcctgaagttttctctttttgttgtatctctgccaggttttggtatcaggatgatgctggcctgataaaatgagttagggagaagtcccttgttttcaattgtttgaaatagtttcagaagaaatggtaccagcttctatttgtaattctggtagaattcagctgtaaatccatctggccctgagctttttttggttggtaggctatttattactgcttcaatttcagaacttgttattggtctattcagggattcaacttcttccttgttcagccttgggagggtgtatgtgtccaggaatttatccatttcttctagactttctagtttatttgcatagaaatgtttataatattcttcgatgcttgtttgtatttctgtgggttcagtggtgatatcccctttatcattttttattgtttctatttgattcttctcttttttcttcattagtctacctattggtgtgtgtgtatatatatatatwtttttttttcaaaaaaccagctcccggattcattcatttttttgaaggatttttcgtgtctctatctccttcagttccgctcttggagttatatggcacttactctcaaatcgatcacataattggaagtaaaacactcctcagcaaatgcaaaayaactgaaataataactaacagtctcttaggccacagcacaatcaaattagaactcaagattaagaaactcactcagaaccacgcaattggaaattgaacaacttgctcctgtatgactcctgggtaaacaatgaaattaaggcagaactcaggaagttctttgaaaccagtgagaacaaagagacaatgtaccagaatctctgggatgctgctaaagcagtgttaagagggaaatttacagcgctaaatgccacttcagaaagctagaaaggtctcacattgacaccctaccataacaactaaaagaactagacaagcaagagaaaaatatccacaaagctagcagaagacaagaaataagcaagatcagagtggaacttatttgttatttgctgtaaaatcttgagttgtaaacttacttcattttcattttatagattgaataatgaaaacatttaaagttattagtttcagaaaaatctttgtcagcatccatgtgttttcattattttattatttttatttttcttcagaaagtaggtttttttcccccgtgtagacaacagttatgtaggatagtattttcatttgcttctgtattcttgtgatataattcattattttttcactttattagccatatttgcattttttaaatttatcaagcatactctcaattgattttacaccaaaggatcatttatagtgtaataaaattgggtattccctttaggagaaatggcttcttagctgatgtttatttatacctttttttgtaatgcaactcagaatttaaatagaaatacatatttttgtttcatggtctttatatcctaatttttcaaagttaaaagtataaaatatgaatgaagatattgcatttttgcatatttaaaatatgtatatttgtcatttcccaaagtattctgatagaattctaattgattaccttaatttgtaatttctatacatttcttctgcttcgtagttttagatgaaatatctaatagaggtattacctttttcttaataacctcttataacatcttgttttcactatggttatttgaaccaataatatctgtgattatgagatagtattagaaaataaatataaaatcatattatttctctcccacaaggaaacatgtacactaatagctaataaataattttcatttctaaagatagctaaatactttcaaaatttcttcattttattttctatcttagagcatctggaaatatttggtctatttaaccaaattttctattagacaactgtgaagagtatgtatgtttttatttgatttttaaaaataatgggcatcacctattttatttgaagatttatactccacaaaaaagttgtcagcctttatcctgcataataaatgttactatgtatatgaatacatattatagtatataaagaaagttttcatcaaatccctaagagactattagatggaactttggctcagggtatatgacattcagaactgctggaataaagtagtgactattacactgaacttgaaatagattgaatttgtattccgaatttaggtaggaaatatctaataatatgttactaaagtcattagaggaaggtagaatgtatatctaagaaaatcaagatggaaatattacatatgtaaaagtacaaggaataaagaaacaaaaacaccaaacaaaatgcccgtaatatgatttttctagcatcatatatatttaacaaataacattgagatttcatagcttatcagccaacatgatgttcctgatagctgtagttgtcttgcaattccagttttagttaacacacatttcatttcaatttcccaaagcataatgtaagcaaagctttacttttgttgtcaaggaatctttcttctaattctttctaagaatagattatttcttgcatggcaaatatttggggcctcaggcttttaggaaagggaaatttgaataggttcccattcacaaaaaggaaggaagccttgtgcctgtcactgcttggaatgttcttgttatggctttgtcctcatttctaccagggatctgctgcccagtgatgaccatcctccatctttcccacaatgtctgttcatggtaaagtcaagtcttgctggtctccatcccagtagattcacaccaagatcaagatactcatctttgcagctttccatacatgaaaggaaaactcaactgttttctatccccatttgcacactattgtgtattagagtagaatcagactgtataaatacagaatgagcatctttcttatatattacaaaatcaaagacattttcactctgctgtggtggaagaattgggatgtctttattcctctttgataaatcacaaaaagctactattaaactaaactattgtgccttctcccacaaatacccacctcaaaaaggatgggaggtcttcttgaatcttcctgcagaggcactgaataaagtaaacctaagattaagtattttgagaatcacctccaccaattaattcattggcatggcattccagtgctcaactttgaaaatggcatacttactcagtttgctaatattctattagaatgtttggacctggtgttttcttttatgtctaacctttattatatattggtatgaagggtatttgattcataaaacaaacagcgaaattatttttctttttcaataaaatatgtattatttaaaagttagaataaattaaagttctaaagcctcactattagatgattttaatagcatcgaattctactaattctaatagtaatactattacttactataaaatgctttgaataatacatatttaattaatgttccagtttaatgttttttgatacattccagagttctgaatattcgttattaatctcaccttggttgtccccttattataaactttctgacagttaccatatctgccaatataaaaacagaattactattttaggaagacaaaacattgccctctatgatccagttccagtcatattctcctctccaacttcttgctccattgcttgctttgcactttatattcttgaaacacaacctttttagtaggtcttcacgtataatatgctgttctttgtccttgaggatggtgccagctctgccctctaacctcaagaggcacaagagcacagcaattatgcatgttggctctgaaattagactatgtatttgactgcaataaaggttatgtaagctctcttgtcctttagtatcattatctgtaaaatgaaaatactgataacacttcatggggctgctgtggggattaaatgagtcagtatatgcagtacttagaagagagctttacacttaggtgcactattcagtgtagctgtaattaccagttcatgggtatacattgctcttcttctatgactcagcttaagggctttgtttttaggaacattttgccttcagaacacaaagaaacctaccaggcattgtgcttccttctatatggcaggaaatgtgagatgcagctctatttgtcttttactttcaaggggacttactggcacatacttgataactggatctctaaacttcactcaagaggccagtccctgattatagagttcatcttccacccactggagtgcagatatcttaacagtttccagcatattcaccacctctttttcatgctgtctgatctgcctgatgtcgtcaaggtaatgaatcactgtgacgttctgtgggatgtccagatcgcttcagattacatatattattactgaaaagagttgacatatccctaaggcaaaactgtaaatgaatattcttatctatactctgtgactctgaactatttctgatctccttctgtaattggagtggaaggagtatgcatttgccaaatcaatggccacatgcagtctatgtgtggccttataaaacttctctagcaataataccacatctgtaacagaaactgcaatcaggactactctttagttaagcctgcagacatttatagtcatcctccagaaattctctggtgttggcaggggacaggctggtggattaaatggggatatgacagggaccactaacatctctccccatcccattgcacccaggataggatattatctttgatttagtctcttggctggattttcagatattttcatgtggccttcccaactatgatagcttttatagctcttacttcacagaccagagacccaatgtagggattacttcaattgacaaatgtaacaatttcaattatgctcttagagactaggagaacgatcactaactgagttgtggtttcagtgggcccactgtgaactagacttcagtcaggctccattttttacctcaccctgtaagtacccactcttatgtttccaagtatcagtattactgaagaaccagtgcttaatagtccttgaaatgtctgatcattcccctttttccagggcttagttgcttggataaatgaccatagtttcctttgggaaaggactaggggaatcacagtacttacttgtagggatgtttcagggtctttcttcctagggaccctgacacctccctggtcagcaggttccagaagtgaaaattatctcatgtctgggaactgaccaagcattgtgacttttactaggggtgactaccctctgcttcctgactttattcattttcccttgacactgtccgttatcaaaatcctgtcttttccttttaaaggccctattgaaatcccacttctctgtattctcaaccttctaagcttagctaaaatgaatctccccagcctctgaactctcatacacatgtggtgatcatagcttgttttatgttacatttatttgtgtatatcttttgcccctacttgactgtacattgatgctggaaatgtgtcttatttatcgtcttattatttaaatgccccacatcgtgctttgaacatattatgcaagctatggaagtttactgatggttttaatgacactggcttttcttctgcatttagcccttaatagaacatgttcctgttctatttatatactattttgtgtatgtaaacctatatactaaaagacaaaaatgttgtcacrttttatatggaatctcatagaatttttggctgacttttcattctttttgatgttaaatattaagattttaattaatcatatgccaaattttcttatgcaaaatattgtttcttatagataatttgcggtaaaagcctttcagtgaatgaaatgactcttagcactttgaaagaaaaaggctacaaagctgctttcattggaataggtgagtagtttactcttaaatatatttatttataatgtatytttttatttcctagcaatatccagaagaatgactgccttcagacattttcgtgatgaaagttatatttgttcagggaataacagatagaaatgattggccaagtaactaaatttctattttataagtaggagtgctgtttcaccttaattatggagagatttcggcaagatgtttatcttcccattctttcaccacaccatcatcaccagtgagaatctctaggaagaaaatattttcaagtcataccaccagaaactcagaatctgtctagaggctgtagctttctttttatgataaaaacaattgattaaagtgatcataaaggatggagttggctcgttccctttgctattcattttccaaaattttctaaagacttttcttatttggttgaattttttaaatgtttcatcagtgttctgaaagtcccatagacagtgtattactcctgaggcactcactgtatactgttttctcatattttgcctaaatatgttatggagaatgagttttctaacatttttcttccacttagtgtttactgagagaccagagagaacaagtaagttggcttgacttagtctttgcctcatgaatgtcatattcattctctgatatgatttgtactatgggcaattacggcatataaatggagtatgttaaatcggggtccccaaactcggggccacgaactagtactatactgttaggaacctggtcacacagcaggaggtgaatagtgggcaagcgagcattactgcctgagctctgcatcctgtcagatcagcattagattagattagaatctaatggcattaaattatcataggagtgcaaactctattgtgaactgggcatgcgaaggatctaagttgcatgctccttatgagaatctgtaactaatgcctgattatctgaggtggaacagtttcatcctgataccatcctctttctccaacccggtccatggaaaaattttcttccatgaaactggtccttggtgccaaaaaggttggggaccactgtgttaaattgttactcatttttaatataaactcatcgtcctgtattttactttgtctgtctcttcggcagttcacactcagaatatgaagttcgaaataatatctctttaagtgatcacacactgagtaatgtttgttttgcagctgtcctttttcattgcctttctgaagtgcagtcatcattaatgcttctttgtctactaaacttttcttatcaaaatgccatttctaagaccatgcctgtcagcccctttatttaggcaaaaaattatggaaagcaatataaatttrcactgtcttctagctcctaaatgtctyaactgaacctccttcctttcagaaaattttgggtgccattgtcattagtatctgtctgtatkatcttaattacaatattatatttattgtgtatatcaaaagtaggaaggaggcaagatctgatattttccctgggttctatttttaggcatactatatttgactttagctttacttttcaacattayatttgtattgataatttaatgtaaagaaattgggcaggtgtctgtaagttccaattactctcaataaacacatgatcaaaaatgcttggtcagtaataagtgaaaaatttcatcaggctttaggtctgcaatactaataatgttatcaaataactatttgaaattcaccaatgtactaaaagatatgttttccattatttgagtatatactaatacaattattaatacatgtatctgtaagaacttcatctacaaagaatctttgtactgaaggaatatggaccaataaaataaccaatacattgaaatatccaaattaattacataagcaaattattccaaaaatgtggaataattaaattgtttatcactctgagtagttataaccacgaaacaccttctaactgaaataatcaatagtgtttcagctttttaatttaattttatactattaagtccccttaagtatattatttgataatgctatactggttcacaatacagttgtctccatttgactctgcactgaggtgtgaatacagcatttagaatgtagagtcctttcatatttatgtgctgtgcattttcatgctgagaagtgaatctttgacattttggtgtagtgatgtgaggaatgcagttatgctctatttcagtattttgtatgaaacatatacgagaaaaatttcatcatgtcaaaaagaaaagcttcagtctgtggaagacaagtagccgtattctctaggaaatgtttatttgacactcatgagtgtcgatttgggaatttatgacctttgtattaccatataactggcggttacttggacagccacacaaccttacatgtttttgttcattaaccttgcttccatattgtaattaaacattactcacttattttatctaccctttctcactgattttgtaggaggaaatgtagaataggaattccatattatttaggatatacatttgggcagtttcagaaaacaatagagggtaaaacaatataaacgtttagttctttctcatgtaacaatgtaagccattttcaaacctgaattccgtctttggtctgtgggtagttaccatgttcacattcatgctaatagaagtgggaaagagggaagcagctccttcagtcttatatttatgagccggaagttacacaaatcaattcttctttcatctcattgtctgttacctgatcatataagcatggcaacagcagagggtgctgggaagtattrccttttgctgggtggacataatccccatcaaacgtctagaatcatagggaaaggggatgacagatattgagagaggatagaaatgaaagtctctgttacaggtgtgcatcatcattagtatttgacacaggagatcagtaaagtacttagtagcaaagaaaacactcttagtacctggtgcatacatgttggttacataggtagtttttaaaaatggagatggtaggccaggcgtggtggctcacacctgtaatcccagcactttgggaggccgaggcgggtggatcatgaggtcaagagatcgagaccatcctggccaacatggtgaaaccccgtctctactaaaaatacaaaaattagctgggtgtggtggtgtgcacctgtaatcccagctacttgggaggctgaagcaggagaatcgcttcaaccggggaggtggaggttgcagtgagccgagatctcaccactgcactccagcctcctgacagagcaagactccgtctacaaaaaaaaaaaaaaagagatactttctctttctgtagttggaaatgccatagttattaatcttatgtgtttataactactatcttattctacgttagattgtgtaaaataaaaaatatttttaattaactatgacataatgaagatagctcattaagcccattgtattaagtcaagtctgttcacatgtttcctgattttaactatagtgcatgatattgctcatgaaaagtctctcatttttagagttttctctaatactaccacagtccaaggaaattatctcattgaatgtacatcattgttacttctaaagacttatgtctcttgaaccatgagaagtttagcttcttctaagtactgagataaagccctatgtcttattcaaaattagtctgttatcttcacagtaattgagtcattgttaaagactctaaagttttggtggttttactgaaatcagagcacctggacagcatgttactgaaaatattgagacgtagaattggaacatctactatacaaggcttttaaaaaatattggatggctctctttgtttggtattgaaattgacataataggttacaaccattgtttcttcctttttattttataaaaataaccagaaaataatagaatagaacatatcaaagtgtgttggctatggttagggcaagtgttattttgtgaaaaatgtttttcacctgtgtgtatgtgtgtttgatgtgtgtgcttgcacgttcacactgcattaaaataaaatgtattttttaaatatggctctagttaaagtttgatagccaatgctatacaatgtaagggctctgatggactaaacacctttttcccatagtatactcaacacctatcaataagtagctattagtgagttaaataagtattgaattactacaatcaatgtcccaaacactgtgctaagaatttaaaaaacaataaagaaatctgaattcgttgtttaggttggtattaaattgagtcagaaatatcataagacattcaaaaagaacaaccatattgcacaatttcaggagtgggacgtagtgtggtagacgggctggacatgggtatagttcctttttttttttttaaagttctgtgggtaattttattctagagccaggtttaagagtcactgttatagataactgaagagatggacccttcgtctttgttttaaagaagcccatttatttttctctttctgattgttcatcttctgatagttttcatctcatagcctcataaaacatgatagtgccaaaaaggttaaacaagcatgcaagggaaagaacatccagtaagacacatttaggtaactgatcaaactttatatgttcttctgccaagtttttctttctttgaatttttgtttttagaatgcatgagaaagaaggggctaaggggaaaatgcagtgaaatcaattataatagtcacagtagacactacgaaacaggaactacaggaaggtgttgtagagatgaatagtctttttcaacaccaagtgctttacttgtgtccacccaaaagattttccttgaacttacttcttgctaccaccactcccctcacttaatgccactgggatactgctatggcctcaaccagtctctttggccaccactgttcacacaacaaaagtagtaatcatgctgaaatcagatctgatcattattcctcactaaaactcttccatagctccatatttccttccagataaagaaaagtccccacgaaggttttcaaggctcttcttgatttggtcacagctatgtctctagtcacttctcctattaaattatgtgattcagccattctgaactgtttttagttttaccttatctgaagttttttaacctcaagttttggacatggacctagagctatctttgttttcatatttgtgttcttgacttcgatgctttttttctatttgatacaattattttacttgtgatgatctactccctaccttcatactttagcctggattaatgaatcatcttcctcaccccccaccccacacaaactctgtgttcctgctctctatgttcagactggactttttactgtagtatagcacttcttcaccttctttattataattcactagttacatgtttgtttccaccactagaagttaagcttcttaaagactgtagattctgtctgctttcttcattgacagatgtttggtgcctagcaaagtggcgggtacatagtaggaactttatacgtatttttagttattgattttaaaatgcaactcttttgactgttttccaaaataaagtaaatttataggttgcttaacaaagttggcaattttggagtattataacattgcccaaacccagggggaatacattttacattattataattttggtattacactattccaagtaggaatagtgatattagcagtggtgatattggtaataatagcagtaacagtgaataatattccaggctcaattcttaacatgatctatccttttaactcttaaaatggtccttgatgtcgatattcttaacactctttgatgggtaagaaaattaagactatcaaaggtaacagaaaagaagtaaatggcaactaaagcatggaaagtgagttttataaagaaagtaaaaaaaaaaataacaagtgcaaatatccatacttcaattgtgactcaaagccaacatgactctgtctacatttcagcatctcacttaagattcttgaagagggtaagctgatactcaagaagaattagtctttatatttagcctcatttttctcattgttatcacaaattggttttcttttagttaccatcagaaaataatatttttttaaatgtgaagattcccaaatattataacagacaaataacagataattataatttaaaaaatccatcgagagattgtggtattaaatttgctacagagtggcctttagttaaatctctcatgccttcacaaagccagaattattctctataaaagttattcttaattggcttcttaatcaggaatttttaaattgtacatagttgtgtatactttctatttattcagaggaaaatgcaattaagtttttagaccatttgctttacttctgtccccagataaaaatgtaaattgtttagtcactatccacaactatgaatagattattttaaaaaataaacctgacttaattttaagcaaaaagcaagtcttgagtattttgccaatctactttttttaatttgtaatattgtttaatctactgtcacttgtaagtacttcggtgtaattgtaaaatggctcccaagattttggaaatgagggaaatagaattccagctgagagttcattaaatcattacttaatgagttcatgcaaagccccagaaggagataaaatagatgtagggcaattattctttgatcatattaacatatctatagaaagcacatattaatctgcagaagcaggcaatgggggctggtcatctttagaagtattgaggaagaaaaggaacctgcagaaatatcagcaatattgacagtggctcttttaaggcacctgaatcaatggaccgggagttctttgagcccaggtcgtaagatagacagagaagtctattttagagacctctgaatcttcttgttctgattccaagctcaccaaactgccactgattcctaaatagtttgattatgggagatgagcgtgggaaggggaggttgccgtgaggtgagatggttccactgcactccagcctggatgacagagtgaggcaccatctcaaaaaaaaaaaaaaaataatagataaatacgtaaataaataaataaaaagaaaagacaaaaaaagaagacaaaagaaaagaaaagaaaagtttattctgtgttcatatataatgaaatatatgtcatttatagtatatagttttccttttgtcatttttggttgtgtgcatatatccctcccctgtcacccacacaaacacagtatattaaacatttatgagagttggtgttggtttttatccttgaattgcataatttcagcacatttcttaacacataatacaacatcaataaagttttttgaagttaagtaattggaaaaagaaaaaaaagaaacaatggaagaaatgaaaagcaatgtaataacttgttgagaaattttgagattatacttgattacttcactgcttaaaattcatgcatctttccaagcatcctcttttatctttttttgtttttgacaaaatgcaaagacatattcattagttctgattaatgactcaaagccactcttaagtcattcctactttgatgccttataattatgtcaagtattacattactgtgctgaatatcagatattttctttaagtatttttggttaatttttaatggtagtactcgctagggtatttaatgagcgttttgtgatgaagatgatgatataaggaaatgttttttaaaatcatggctttttctactcgtagaagtctttacatgttgtagatgatcaataaatatctgttgaagtattgattaattattaactctaattaaccctattaactcatgatgtcttccgtattattgtaaaaaaggagataatttattaatcactaaggttattttaacattatacagcttatattctttttattttaaaaaaccttttataaaacacaaattatattttaaaatattttatcttctttgcatttaccttctttgtgtttatcttctttgtatttctttggatggagacatggaggaatttttattatatttttctatatatgtttcatggaataaagacatattttacttatggtagttacctaaattagagaagtaaaacagttctttttggtattttcattgtttaagcattaattttcttttagtagtttccaatggtttaattaactcttaaagtgaagttgataagagaattggaaaattactgaactaagaaaaatgttgtctttcaactgctatttatggctgccagttacattttttgtgggagataattatcatttgaacctggaaggggttattagtgaacatatactatgggtattatcttagtcttgctgggctgctatgccaaaatagcatagactgggtggcttcaataacaaacatttattttctcacaattctggaggctagaagtctgagatcagaatgccagcatggctgggttctggtgaaggccctcttcctggcttgaagatgtctgccttctccctgtgtgttcctatggcctttccttggtttatccgcatggaaagagaaagacctctgacgtttcttctttctataagggcactaatcccatgatgggggccccaccttcatgagtttaactaaaactaattacatcccaaaggccccatctccaagtaccatcatgtttgagattagggcttcagcatatgacatttgtccttaggatcatcatgatgttttgttttgttttacgtttggtaatcatactataggtctgcattgtcctctaaaggtagaatattgatgttgaaggataaattttaggatacttaacaaaattagaagttactgagatagtggatattgtcaagaagacttttggaacatcacagtacacaacccttcccctccgcccactgtaattcaatgaagctaaatgtggagaattcaagactacattgtattcatgtgcacagtacacagtggttttcaaatagagctaggagatgtactgttggatagctattttcacactacaaaccacacagctcttatcttacgaatcgctgctatgtaaagtttggtgaactgaagaagacatacacagaagaaaagaggggttagtaagagaaaaggaaaatggcatggaaatggcagggattgatgcaagttggaggaaactaggcatatttccatatatgatatatatttctttctagaacaatcttaccaaagtacagaaatgtgaaattttgggggataatttatgttttatccgttccttatttcctgtttattccagttaagctatgccatctttcgttagcaggattaaagtgatctaataatctctttctctgtcatttaaacagcttttttgactttaagtgcttaacacctgtatactctaaagcaagaccaaagcttttaagggactgcattaaatattttaagtaaatctattttagaagcaatgcaattgaaatttatatcaaatcagtttttcttcagatcttgcctttgaatggcttaagaggtgtccaaaacagtcatattgttcccaccttcccaaatacaatctagtttggttatattacttttctatttcttaaactcatattacttagtactgttataagttatgtcaggaatttatgggaaaaacaatactgcaagaatgattacaatatgaagtcagaaacataaactcttaaaatgcattattaagcattaatactgtggacatctaagaaagttttatttttaaaacaacgttttgacttatttactttcctatctcaaaatatgtaaggaatcttgatgtgtgttgtcatcttctgattaaccatgcagtgccacctggtgtgcagatggaaagaacattacacatcagaggctctgttcacacccacccccaccatacacaaacttacatggcagaaagttaacagatgttcattttgcttttgttactgagatacgttgtgcatccaactcttaattcataagttaaatttggagattaagatattggtatttgggttaatcagtcaaagattatattaatacatccattatgagaataaagtaatatttaattggaaaattgctgctttggatctttaaagtcttattttgtgtttctattctttcctttttttaaaaaaaatacttggtagttttgtctattgagccttatcatttatattttactaataaatttatcattcctagaatactgtagtttaaaactgattgctatttaatttctccctggttaagtttccattttacaggaaaaaatagcccttcttttgtctttggagattgtatcacagtcaggtatttttccacttctcttactcttttaatgccactgttggttgatcacattttaaagttggttgatcatatttttaagcttctgcaatatacctagcagtgtgctagcaattatatgttacagaaaaattaaagaggttattatatatttagaaaagtaattaatgcattttaaaaataagaactttgtgcatataaatataataaatagaatagctacatttattgagttctgtgcaaagtcatgtttaattctcacaaagtaattttggattggtattattcatatctctattttacatttatgtaaatggtgtctaacagatattaagtaaccttctcaagtactagaacctggatttaactgaggtccctctgaaaccaaagccctactcttggctaatacattaagttggcagaatttaatcattttttaaaatttatttatgctttcttaaaaaatattttaaattaattcttttttaaaaattgtggtaagtacacatagcataaaatataccaccttcatcatctttaagtgaatagtgggattaagtacattcacatcgttgtgcaaccatcagcactattcatccacagaactcttttcatcttgcaaaactgaaactatacctattaagcaacaaatctatgaatttgactattctatgtacctagtatgggtggaatcatacattatatattttgtgtgtgaatggcttatttcacttagcataatgtctcaaccttcattcatgttgtagcatgtgtcacaattttattcttttttaagactgaataattttttatgtatatatcacattttgtttaacattaatcaatcaatggacattggatggtttctgacttttggatattgggaataatgctcccacaaacataggttatacagatatttctttgagtccttgatttcatctcttttggccacacatccatatgtggaattgctagataatttggcaactctgtttaactttttgaggagccaacatactgtttccaaagtagctacaccattttatatttcatcaacagtgaaaaaaagttccagtttcttcacatcatcgccaacatttgctagtttgtttttgtgtgttttttgatagtagctatcctaatggatgtaagtagtatataatgatttttcatttgcttttcatttgcagcctgcttgttaccaacagaaacttgcagtgataatatatagataaaaaaaatttttaagtatataaacatatgattaatcaacaagatgaattagaaaataagaacctctcctataaaaattaaatggcattcacattttttgatattttgagggcctcaattagattatatgccaaagggatgaagatagagggccaaattcagcatgaagaccagttttgaattggcaaattatagagaggactattaagagatagcaaaatatcttatatttaaatttctaactaataaagtgagttgtctacaaaatttgtctataaatgaacagatatcaaatattttgtatgttgtgggctgtatggtctcttttgtagatattcagctctttacatttgtagtatgaaagcagtcttagagtatatgtaaacaaatgaatatggctatgtgccaataaaactttatttaaaaaaatgagtagcagggcggatttgctcagcagatgatgcaccaaaaaattacttaagaacattagttgcttatattttcttcttgttttaagaaaaaacattttaagtggaaatctagttgaaatataaatcaagtgaacttttgtctaatagaacctgacttgttttgcatgcatgcatctgtttgtggaatttaagaacaacaacataggtagcagaagagatagctatccctgattattttgtactagaactttaaaatagctgaatttttgtgaaaccccccatggtgagaaaccaaccttgcttctcactccttaattactgttttagcaaatagcttatttgaaaggtgtatccaaaaatatgttttcctgataccatgcttgtgttattttttttaaatattactaacacaagctgctgtttttatttctaaagtgtagtgttttgtccttttaaagtacatcttcaataaataactttatacttgattttgtaatcaaagaaaaaaaacacacacacacaaccaagaattaaaacacagaaggggccaggtagggtagttcatgcctgtaatcccagcattttgggagggtgaggcaggaggatcgcctgaggccaagagttccagaccagcctgggcaacatagcaagaccttatctctacaaaaagaaaaaattcgccatgcagagtgggatgtacctattcaataggctgaagtgggagaatcacttgagcccaggaggtcaaggctgcaatgagccgtgattgtgccactgaactccagcctaggtgacagagtgagattctggttctgaaaataaaataaaataaaataaatcacagaaggaataaatgagaactgaaattagtttctgtgaagtgactgatggttctgaaagtatatcttaaacactattaatgaatggttttatttttcacatcaatttttgataacttaagaaaaaagaaaatatacatatacaaaaaaatttatcttagcctctaggctaggacttctataaaacctctttaacttttccttttcactttattgttctgcctctggattcttcatgatgaattctaacaattagcacctattgacttcagccaggaaataacaaaaagccatccagagcatagttccttttattcaaggtgctcagggcagtacagtggaattattttagaagatgtccttaactttttatgcaagcatattcatcatcttgctatgaataacaaataagtacacatttgttatgtagcaaaatttgttaaaaaccataggaaaagtattactgataaattaattaaagatagactcatctgaatactgaataagaaaaatacctggatattgaatagaatttgtgatttttcttcatttagaagataatgtgattaggtagaaatgcattcttttgtggtggatcaaaacatgttagttcaaaatctgtttgatctattgtaaaaatttattaaattcaagactgactaattcaattttttattccttttgccttaaactggattcagattggcctttgtgatacttagaaaaacacaaaaagaaaaagcaaaaataaaaacaacaatgtgaaaaaagattgataatgaaaaatactattgttattttatgggaggcatgatcacttattatattaatgtctatttgtaattactaaaatataaacattttaagtatatggactcaaattattttctaaagcaaaccactctggcacagtcaagtaaatacattattgggattttgtgtgcatgtttgttttcctctcctgttgactgtagaaatatttggttaatggagtactctagggcaagttgaatcaatgttatgtttgtgccttttttcccattctaatgtggttttggtagctatattactagaatttctgacagaaacattctgggtgataatacgagatcatatggggcttagaaaagacagagtattaatctctagtgattgatccatctgtgaggttttctgttacagtggtagagaccgaaatgtgttagacttttagtggtaaagcaatcttatgtttttctgcaactgctttccactatatttaagtatgctctcttttcccctgtgtatgtgtgtgtgcgtgcatgtgttctagcttccagccttttacaacttatagtcattttttctgaaaactggaagcttgaggtggcagagtaaggaaaaactaaaattcataaaggcagcattatcttaaagttattttcactcgaagacccttgtttctgtaggatcagaaagcagcctaaaatcaacgagttatatgagaagcaaaattccctaaagaggttaaaggttttggactactaagacctctaataagaggaagcaaaataaggcagtgactaagaaaacttttgacttatagtttttatacccaaggtataaaactaatgtatagttatatatatattatgtagatatacaatatatgcatgtatatttgtgtgtgttttacttaattatgccctcacaaccttaaaatactatttgaaatagtactttaagctatagtttaaagtactaaactcatagctatacatatatatgtacacacacacatatatatgttttgaatagttttatacctatagctatatatatatacacacacatacacacatatatatgcacatacacacacatatatatgccctcatgaccttaaaatcctatttgaaaaatctaatatttataagtttccttagaatccaactttatcattgataaaatatcaacagtcatgtgcttaaagtagtaataaaataaattatcttcattctcataattttaataatgctaaggatttcacccacattaatgcttatataacttcatttactcattcagtaaataccaagttcctgatctgtgattaatgtgaccttgttatcaagaggcttacagttttgggggagacagacatgtaaatattttctaatctgtgactttgactattccttttttcccacaatatataacacaatataagagcatccaaaaaattttgctcacttacatgtatatatttctattcattcatcctagactataagcctctgtaggaaaaggataattcaggagacatgctggggcagggattaggagtgcacccagatacagggaatgtcatatgtaacagctctatattcttgctagagttttcacttccagagacgtgtgctgacaaatagggacaaacacaaaccaggaccagattcaggagacttcacatggcaatgcaaatgtgtttagttatctgtagttattgagtgtttactttgtgctgtggaaaatgaaggattttgatgtgagaggtaagagattagtgagataggtttggtcgcactgtgaaaatggtttggagaagagcaagaccagcactgggtgatttttacattgtggctattggaataattcaagcaagagaaaattgaggaccaaaggtagggctgcaagagctgagagcaggaaacaaacataaggaaatacaatgaatgagtcttggttactgattagatactgttagtgaaggacaggagtcagaaggagaaggcagggtaaagatctaagaaataggtacaagtcgggatgttttcaacacttcttttgaccaaataaatggatggtggtgacaattacccaataaaataaaataaggggagattatgagatctttcctgacttcttacgtttgagattccttgtgacaacctggtggaaatatccaggaagctcttaggtgtacctgattagttctggggaaataatatgagaagtgtgggcaggagaggtagatttggtatccttggctgtggcaaatgatgctagtggcagtatctcctcgctatttgctagtatgaatcttgaagctagttaaatgcaatcagtatgttatagttcatgattgttgggagtaatagaaataatataaactaccttttcactgaaattggcacacagtaagatgccatggcattgacgagattacatatttagttttcataaccaccctatgcagaacgagaaaaaattatagcccagtgaaactgtgtgactaccaattccacagagtgtgatattcacacacactgaaatgaataggctctaattccgtatctaagaatattatttcaacatgatttattcatagtgtgttttggtgttgccattgccccatccttattttcaccagatcatatattagatgaatctgtgtggctagagggattttcatgataatagggcaaaaaaaggttagtccacatgatgactaacttttgttagcactcttttttgtttttgtttttgttttgagacagagtctcgatctgtcgcccaggctggagtgcagtggtgcgatctcagctcactgcaaactctgcctcctggattccagccattctcctgcctcagcttcccgaatagctgggattacaggcacgtgccaccacgcctggctaatttttttgtatttttagtagagatggagtttctccatgttggccaggatgttctcgatctctggacctcgtcatttgcccgcctcagcatcccaaagtgagcactggnnnnnnnnnnnnnnnnnnnnnnnnnnnnnnnnnnnnnnnnnnnnnnnnnnnnnnnnnnnnnnnnnnnnnnnnnnnnnnnnnnnnnnnnnnnnnnnnnnnnnnnnnnnnnnnnnnnnnnnnnnnnnnnnnnnnnnnnnnnnnnnnnnnnnnnnnnnnnnnnnnnnnnnnnnntggtgaaaccccatctctactaaaaatacaaaaaattagccggatgtggtggctggtgcctgtagtcccagctactagggagattgagacaggagaatggcgtgaacctgggaggcggaggttgcagtgagctggagccgggatcatgccactgcactccagcctgggcgacggagcgagactccgtaaaaaaaaaaaaaaaaaaaaaaaaagttgacttggaaatactaaatatttcctatgtgtgaaaatatatactttttaaaataaaacttgatattatgtgtgtatatgtgtatatacacgtgtgtatgtatgtatatacatatttaaaaagagatgaatgggagaagaaaatcttttacttaaaaatattagattggggagttttaaaaagcaaatttccttaacattaattaacatatagcttgttttacaaaagctgatgaagatttatttcatagatgcatgttcatcataaaagtgatatgtaaattcattccctttttcttactaaccaataaagttattctgcaagagaaatttcaatatttattgtaatttgattgactttaagtttgcttcttccatagagctttgttcctggatttctatatattttttttattttatcaaagcgtagtatatgtcttaacacatttaaaaattatcttattttggcaagtatcaactagatgggtctctaaaattaactttttcccatagtcacagttaaatattgtattctcctaaagtaggggaggaaaatatgcattatgcattatggaaacataacatcagtcctcctcgattctatatgtttccataatgccgaataattgaacatatggtctctaccattgtaggctaattggtatacacacaagaaaatgagggggaaggaggtggagagaacactgtaggcaagtctttgatcttgggatttatgtttaccctcttcaaatgaatttgtaataatgagttcattacaactctaatatgtatacctacatatatgctatatgttaaatcaaatgagcatatatttttaaacataactggcattatgctaaattatttctcctctaatatgtaataggacagaaccagaaacccaaacctgtggttttctcaaacttccatggtacctcatacaataattatggagaggtaaatcatgatacagtggcttaagggagaagaagaggtgagagtttgtcagttgggttttgttttcctaatatagaaatataaacacattttatggcaagataaagaagtgagtagaaaacagatgtttgagatgataattaaatttaagcggggagtgagcaaaacaggaagagaccagaaaagaagaacataggcagaaatgttcgcttttgaaagttgaaaggatattttttttcccattgacacaaaaatagtgaagacagaaaaagttctaaggtggaacatgtcagccaagtgagttcactttgctttagcctcttcttagtgaagtagtaagggtttatttactcctttgagtaggaaggctttactagaatctaaaggttggtggggaggggtgaagagagagagagaaagaaccttgagtcctctccaggaacacacagaacagaaagtgataagtagtgtgaagaaactgtatgacatagtagagaagtatatacaagggacattacattgttaattaattttacatttatgatgggtcttaatactagtttacatttatggggtggaaggaagcaaagaataaataaagcattttattttaacagagggaacaactagggatgatacctttattgaacattagttttattgtttataattaagataaaagtaatatattttgtactttttacaatgaaattagtgattatttatcaaatggatattctaggaaacctacaaaattatcaccccttcaagcatatataaataaaatcaacaaacacacaaagctggtttgagccagttttatccagctataaataatactcaggttgtaattaattgctttgaaaagaagttaatcctatcaggtcattaaataaccccattagtaaattattgtgacaagcatattagttgttaaatacaagaacagtagcattttagcaaattgttagtccttagcagctacttttattttgcttaaatatagtgatagaaccaaccaccatgccattacagagtattactattggaaagaatatagggcattttctgagttgaaagttgaagatgaattcacctgtaagcatattatgctatgtgcactgggtttatttcaaaatcagatgaccatatgaatatacaatactcatatacagtaaggtggaaattgaagaaatgaaggtgaatgtgaagaaacaaaagaaagcaagaaaatgtatgtatgactcgatgaagggcaatgtaatttagcattcattcaaaaacttttgagttcttatactatgtgcacttttaaaaatttcaggtaaacttcacagcattacatgaataaaatagcaagttgaaaaatttaacttgctgttttgaggaatgaagtaattcattttaagctaagctttcaactttagttgaaggaagaagtgagtactgatttctgttaaagacttaattagccatgtattaaagaacaatagttcaatatacatggcatggaaaatactccccattatggattgatatttttaaactgtaactgttcagagcaatacagataatcaaataatatccatcactgaatatgttgagctgataccactcttatacaaatgtacagactgtatttataatctaaaaattatcattgaaagctttcccttgaatttccagactgccaatttataagcagcctggttggacatatgtaattatatcaaatttatatattcattctaccagcatttactatggtctgtctaggtacctgttattacgcattcaatgaaggggaaaacatttttcttgacttcacaaagatcagagattcattgggtgtaaagtaacataattacaacaaaatatggtaataacataagtagtgatagagagattcccagagagttgtgggcgcacaatgggtaggtccaacattcctgggatgacttttaagtgtgaggatgtgtattgggtcagggagggagccatagaaaacttcctagaagaagtggtgtctttactgagttgcaaagatgattaggagttaacaggaaaagagaagttagagggagaaggtttttttctgaaagatggttccagagagccaggtgttcagtgaactagcattataaacctctagtgtttctggatctgtgacagtccaattttttagtctttaggctgaagtgtaaggcaagaagcaagtcatacagtcatagagggcttgttagtaggttagaaaagttgggcatttattctactgaatacgaaaagtgatgaaaaggttttatgcagtgtaggctttctgggtagatgatgaatttaaaagtgatgagactggacatgtggagatgggctggacagaggttatacagtgcaggagagtgatgattagagattgaacttgggcaaatgctgaagtaattaattattatttaagtctaaattcttaggtcttttttccttataatttaatatcaggaactttaatgagaacattaaaaaataaaccactagtaagaagctgttcgaattacacgatgttttaaatttatgtggcttagtgttttcaatgttgtatttatccctatgtacatataatcaaatctaaccattatcataaaagtcaaaataattattttcaacctaataaagctatattttcccagtattgacattgtagaaatgatgtattttgatcagcatttgcagattatgtaagattattcctataattggtttcaaagcattttctcatatttatctccttgaatattaaacctcattaggaaatatatatttagatatgcagagaagactaatttataaaactaaaacataaaactaatttaagtgtgtaatagagcattaacagccattgaattctagtataaccaaacaagatattttcttgttgttttggcttatttgctgcaaactgtaggtactatctgtagaataaaactagtactcatgaacagaaacaagcaactgaataccttttaatttcagtagttgtgttcctataggtctatttcaactatctattggtctcaaaagtgtttgaattttcatgtgaaattcaaacgcaaaagctgctgtttgctttaatgattattcaggaataattctaattagcaaatctgtggttccattgtttctagtgcatggtctctgagaagaatttcagaaactaccagtcttcaacattttctgctagttatataataaatatatttctaattggaacacgttattgatgttgaattatcagttttctgataccgttattaagataaaaattgcagcataaactgttatttctagacgcccgtggttcctttgttagggaatcatcttttatcagatatatttatgactacaagaagatggatggttgttcatttacacacaatgtattaaaaataaaaccagttgcttagtcagtaatggcaagagaatgtgttttcactgattgagaggagatcattcaacaatgtcaaaaaataatttgctttatattacatttgcccataaaaaatattgacaactttataagtcataagagtgaggcagctgatgggcaagactgcatgttttagaatttggaaatttaatttaaaaatacaaattttaatattctttataatttttagtgaataaatatctacagaaagtcataactcattttgttttccctaatccttgcttactggcaggctaattgaacagtgaaggtcctaaagaatacaggctgggcacagtggctcatgcctgtaatcctagcactttaggaggccgaggtgggtggattacctgaggttgagagttcaaggcgagcctggccaacgtggtgaaaccccatctctactaaaaatacaaaatattagctgggtgcagtggcttgcacctgtaatcccagctactgtggaggctaaggcaggagaatcgcttgaacctggtagatagaggttgtggtgagctgagatcatgctgctgcactccagcctgggctacaaagtgaaactgcatccaaaaaaaaaaaaaaaaaaaatacaatcatgcagcagagttaagaaattgcagttgagttttgaatcaagcccaagttcattcttggaatattgaccatttatagtaagcaaagtcacacctggaaatagatctcatagatccagtcagtcttttgaaaaaaaaaaaaataaaaaattcctaagyattgagacaaagtatgatacaatttatcgatggaaattcttctttataaaattagtttaatgaggatttcatttaaaaatggcagaccaaatgcaagtgtatctctatatcctgtcctggattgtcacaaaaatgaaagcaacaggatttgtcaaaaatcataagcccagaaggaaaaaaagaatagaaaggagcagaaatgacaacattttggaagttgaaaagcagatggctacatgaggttggacttagcagacccaagaaagctaaatccttaaccagactggagaagtatcataatgtgtactactgaacctacttaaggtttcaagattggtagtaccaggtagctgtggaaataagagtgaagacaaggccaaaaaatagggaatttatgaagagtgtattaaaaaaagtagctagaccccttgattccctcattcatcttgagtagcttgagaattctgttgttcagtaaagaggataaacccaatgtctagaccagaggacacaagacagaaagatcttccgtgaaaagaaggggattagtgaatttctgcatgctacaagtggagaacattattctccttcttcttgctgggctgccagaacaactgctccgtaggtagaatatgacagtttggcttggttatttgttgcataagatgtgttgttgtgaattataagattgctagttactggaaaatggtacatttagatttacaaataaaaatggaaatatgacaaaattagagctcaggaaatgtaggtattttgaaaagtcactcttgtcttctaagcctttatttctacgtaataaataatgatgttctttagcagttatattattaaaaagtaaaaagtaaagtgtgtccttctttttagtttcctaggcatgctaacccttttcatcctgatttctcccaaaacagtgaaagctaaatgactcaaaaagaacctttaacgtcaatatttctgttaactggctcacaacacaagctaacatgagttcattcaaatttatatcaaatgtgtacagtttttaaagtttttgtttcccttggttggggcggggtggaggcagagtcttctgcagcagtgctttgtgtattcctatgcttgttattctaatttgattgcttctgctataaaaagactgtttttaagtattttaacttttattgttgtcaccaaaattttaatttccttgtccaagctgaattttagaaatcaacttgtttaagcaaaagcaaagcaaaacaaaacaaatttaactccataggaaattacttctattactttggatctgggaagctggatgtatttcagcaggcagcagtggaaggaacttgcaaaaagcatcttctgagagctgaaacagcagtcacaaatgtgtctcgctctatttgaggcttaacagagtaggagagctaagcttcaagagaccatgtcttagcctctaaggaaaaagatgtacatacttttgtgtgagctgtgcagtaattttaaaaatcagatccatgacacttcattgtgggatcccagaggattttgttcattttcagaattcctcttcactaaattaattgccaaagtttttttcttaggaaatgcaagggtcaagtatgcttgtgtatattcaagtaggtcacaacagttagaaaactatttctgttgtggtagctgatatggtttggctgtgtcctcacccaaacctcatcttgaattgtagttcccataattcctacatgttgtgagagggacggggtgggagataattgaatcatggaggcggtttccccatactgttcttgtggttatgaataagtctcacaagatctgatggttttataagggaaacccttttctctttgttctcattctctcttgccaccaccatgtaagacatacttttcatctgctgctgattgtgaggcctccccagccacatggaactgcgagctcagtccacatggaactgcgattccatttttctttataaattacccagtctcaggtatatgtttatcggcagcatgaaagcagactaataccatagtcatttttattgactattttcacgttatttttaattattatttaccatttaatagtatgtctttatttttataaaggacatttctgacaaatagaacaatgtagtgatcaaattattctttctattggtatgcttttgctgcttatgtcaaataatatgtattggagattctatacagaaagattatatacaatagaatacctcacataatcgtgaaaatatatggaaatatatattactttattataactccctgaacttttatgaatattaaagggtcccataatgaaatcttgtatcttttgtgaaatcactataaaaattatattatattggtcagtaaatctttatatattggctgatgtcatagaattccttaaagaatttagtgataggaaaatagtttggctcctaatgagtcagtaagctttctttcatcagatattgatttctaataatttcattttacttcaatgcaaaaaatctcagggttaatttcagtgctcaatcattgtaattatctatccatcatattagattatttcaaatgcgttatggaagcaggacagtgtatatttatagctacatattctgtaatctatttggccctgtgcaattctgtgaatggcatctttacttaactcgttaatttttgagattgttgggttggctaagataaggtgggggttataaactgtagagacaccttgataagttattgtgcacatgtatggagagcacacgcacaatattgatcactgctagatacaaagttcagacttcaacagagatctgattctgatttttctccatcactcttcagtctatactcacagtttcataattaaagccttattatttcgtataaggaccataccttatgtttatcctttgttaaatgtgtgtgtgtgtttatgtatgtgtgtctggaaggatagaattttatcgttattactcatttaacacttagtacaaaaatattgcagacccttccctataaaaaggtgagaggagaaggtagggagaatagaagagaaggaaaagggggacactggtctcatgaaaatataaaaagacaagaaaaattatcatgagaatacaaagacaacagaatataagacaactaagaaattgacattttggctgggcgtggtgtctcacacctgtaatcccagcactttgggaggccgaggcgggcagatcacgaggtcaggagacagagaccatcctggccaacatggtgaaaccctgtctctactaaaaatacaaaaatgagctggacgtgttggcacgtgcctgtaatcccagctactcgggaggctgaggcaggagaatcgcttgaacccgggagtcggaggttgcagtgagctgagatggcaccactgcactccagcctggcaacagagaaagactgtctcaaaataaaaaaaaaaaaaaaaaggagaaagaaacaaactgaaattctgactatgaaaggccacttttacctgattccattctttcatttaatgatttgtcagatttttgaaaggtattatttgtccatgcactatacttgtccttcggtaaagaatttaggcatactctcttcccagagatgctcataggtgtttaaggggaaaaatattattgtagtgacgtacaaagggaggacagagaagatagataaatgaccatctagggggttgagtctttaatctggaggggtgggagtatgttagatagaaaaattgaagcaggatcatcactggcagataaagtggtgtccaccataacacggagacttgaaagaagagggcgatttggaaaactgtgatacttatgggatggcatatgcctaggaagcatgctgagggaggcagagagtaaataacagtagataggacatgagggtaggagacaaataaacaattatgggtcatatacccgaggttaagaagtttacagagtttagatttatcctagagacagtgaaaaagyatctgagtttcttgattgatatcataggaaactgccttaggcctaccatgctcaggatcttcaccatataaaatactgcaatagaaatgtccctcacccttccgccctcaaattaaaattatgtgggttttgttgagacctgaatgaaatcttgataatatgctttgcttttagcttttcttatttactctgaattcttcagatctttttctggaaaattctcctgcacaaattcacataatgtttattataaatttactgggaagggggccatatccatgtgtaaagttattagcactataccttaatgggagacagattgtgaataatcagtaatgataccaattcataatgatgaaacagaatatttataaactatttcctttttattcaattgcgtggccatttctagtttatgaattcattatcaggtcagattttaagtgaatgttagctttatgttcttataggttaggagatgttagtcaaagaggatgaataacatgagaattttttaagagaaaatgaaagtgatttctaaaattctcttttgcagcatctgtactcttgagctgtttttaaggcagtaaagcaatctagattaaatcagttgtcctttttttaggttatatgactatttatagaatgaatatagtgactcatgatccgtaagatcatcttgatttcttgtattataaattgatcattctctattatttatttacttagagaataaaaaaaaatgagaaagattttacagttgtctctcactttgttccattttctttttgtgggcttaaaaattatagtaggtagataaattgcctttctttggcttctgaaatgattttaatagcttaagctaaattaaaaaatatatctctgaatctttgttctagcaatttgatgtgttagatattaaatatattcatagaaaaagagcttatgttataaatttattattattgtgtacctaattttaaatgcctattatgactgcatttatttggcatttttaaaatctggtttgatttagctcctgataaagcatattgaattcagaaaatataataccatttaggattttttgctgcaaaatctattacgctgtaggaggtttcacatttccagaatggaagcagtaagttttgtggggtcagggtgtaaccagtgaatgaaagatgaaagtcagaactcaaaatgaagtgccttttctgtttaacactgggcactgatagaaaatgataatgtttgattaatgaacggcagccttgcagcgggtgaaaacatctgcaagaagtgatttattatttcaaaggtattggaagcttgcagtatcttgccgatttaggtatgtgtgcctgaataaaataaatgagatgcaacatgtgaaaaatgaaaacacattacttgtaaaggatgtgtcacaagcagggtatttttgttcaagtacactttgtcatggggatttttaatgctgttctgaatacaaatcatttagctggttcataaaatcgcctcagttggaattcttgcatctatcatccaagacataaatgtgggttaaacttaatgtggtgtaacatatccttaaatgttcaaattttgtatcatatacaactattaaaattgtacatgttttatgtataaagatgaataaattatagctacttaaaataacggtgcccaaagagaaacaaggtttgaggtcttaattgaacactcatcaaatactcagagctaaggcttttcactgcagctattgtggctagacatttgaataatctatcattttatgattgaacaatttttagttaggtgacatgttatatgacaaataatagaatataatgaagggaatggtactatcttaagtactaatatttaagctctcctgtgtgtgtgtgtgtgtgtgtatacacaccttgaattattcactgtggaaacagataagatttaaatttttttcaaggaacaagtaaactgataatattcataataggaatgataaagaatgtgaaaataaacttggaataatctatattagagttatgccctagggactactaattccttcttttgtggtttatgagatgtttctatctgtttgtttaacttgcctctaaaatgcccttttgtgaagttgggtgttgtaattatgagcaagctcctctccagatcaacagaatttaggaaaatataatcaccatcataaactaaaatctatgggaaaaacatgtcttttttaaaatttgaaaatttcaaattgtgtgcgtaattgttaataacttagaaactgaattggagcaaggtttaggtatctcttttgaccattgttgccttaggtcttagcataaaactaaatcttcactaaatgttttgttgaatgattgaatacattacaagattagaagaggaaacattgttcttagcagttttgctcctttttctactggagtaatggagaacctgttctatgccagggaaagagctgcacttgaaatatgacagtaaagaggatagagtccttgttctagaggagctcctagcctttgggagacagacattcagtacaacacatcacataatgaaacactttgaaaagcagaaatgtaaggggctatgagggtgcattctaagggaacatcccctaagtggagggaggagggatcctgcaagctgagttttgagagaacaaagaaaagaagcagtggcaggagatggtagatagctaggttgggaagtgaaatgatcagatttgcatttggaaaaagaattactctgtcggcctcggtggatggcagagtagagttgggaaaccttttaagaggctatagcaaggggggctgttaataagaacaggaggtaatacattgaattctaatctatccaggcatacaaatctttgccaactatggaacctcagtgtttcgcctgtgtcccagtttctgttttcttccaggaatggtcatggcttaaaaataagagtgtctttcatcattactttttggaacttcctacttccctttcttatattaaactttcaaatatgcgagtcttaattatcatttaagttaaacacagtggtattcttctgacaataacacagttccagtaagattttatgttttccaagttttgacttcactaaaatgtgaagaaaaaatattattttattatcaaagagaaatacatgattaattgtagtatgagcagatttaagcaaactaattgttatttccaaccacaaaatcattcaagatagaaaaagaaacatattttaagtaacttattcatgtacagatagtatcataagtaggatgataaatatgaacaagatttaaaaacgcatttataaaaagaatttctacaacctttttattttctaaaatttgctaaccctcactgtcaggaatatttcactcatcttttgtgctatcagataaatccagtttttaaatggaaatagtcatgatcaccttgagagctccttatgtagctgaaaatctttattaaattgatttttagtatttacttctctaggctgaataattacagttccaattaattaaagactaaaaattgcttcctcaattacactgcaatatgtaggcaaacataggaaaatataaaccttcttgatttaggagttttttagagctccttgcttagatgttaaatattaatgtagcctaacatgcttaacatcaaaggacatatagagatttgttcttcttactaattatgtagatataacatatgtaaaacaaaattaagatctgggtgtacttactacaaatataatacgaatttagattcaatataggacactgagggtctatagaggatcttctaaggggaatcttctctgactgaaatgaggtaacagtagccgtatgcttatacatagtttctaagagtcttccattccaagtgattatgattaaaaagttacttaacaattctttgttctatttttttaaagttaattatgaataatcatataatttgcctcacaggactgagaggattaaatgatttcacacagcgaaaatgcttagaataatgcctggcataaaacaaatgcttaacatgtgttagctattattataatgtattcttacctttcaatagtgaataaaactgcgtgtctttataggagaaatcagtgtctttcctagttctgattccacttttacttgatttctctttttttttaataaagtgttttcttttagtaactatttctaaacctcattgtcaaaatactaattttaaccataatcatataacaggaaatccaggtttattccccaagtatttagcttcctatcaaacacatgacatagtatctattgagatgatccacaaacaccaaattgcctgtaagtaacacggtctacctgactgggtccacttttaccttagttttaagtcagtttgcttataatgtcttagacatttactctaagccccagagtgatttccatagtcatactttctaaggttagatgttctagatgatgactgcttgattgaatccatatttagtctcactatctagattccttaccatgattatagtgaggctatcagtatggttttctgattgccagaccaaaactatgacaattgactcaaactatcacctaataatgcttgcacttaaatccagacttgacattcagtaggcttattatgactacaaggttcctttcaataataactttctgtgtttctgtaaggctgtagccaaggtgaaagttaatgaaaatctgatttggtagtagcagcaggaatgaatttaagaagatggatgagagagaaagggcagagttgagtcatcagtaattggcaaaatatcagatgtatgagttgggaaaaactagaagagactctgcagttagtaactttttattttagtagctcctttttggacataattttggttatcatacagccttgacagtttagtgatcttaatattttattaggaaaaacttcaaatatgaagtaattttatatatctgttttctcagaagttatacaattatacaaagatactatgcagatataatatggtttgataacaagtcagtaattagagataatctttttagctcattcagagaaattataaagataaaatatttttgaatgaaattatgctcaatattattttattatacattgtatatatatttcccttcaaaaacatatgtgattttggatttaaagttgtctgcttttagtaaaacactcacgctggataaatatttattacattagaataaaaactgtatattatactggttctgttattgttcttattattgttttcttcatgatctcctacatgttatttcaacccaagagaatttatctttcatttctaatcagatagacatttggctctgtactcatctccccatcactttgggccaccaaatataagattacttataagaaaatgtataaatgttaaaatttaagaatatatgtgtatttaaatttttattggtggaaaggacaccaaaatatttaaacttatattttctagtaagctagttcccatttctccttaaagtcaacagccatatcaaaaaatgcatttttttaggaaatcagaaaacaaatacaagtggtatattctgatgtaatttaggagcttccagagctgatgaaatcaggcaataactacaggtgagaaagtgcaaataagtattttagagtcttgggaaacccaggaatggtatcagatacaagggcactttgttcttctttaaatggatgggtatgggaactgagatgagcaatgctggtgaggggaagaaacaacagcaaccaagagctttctgaacttgattttgttcagaaaaacagagtaggtgaaactactcaagtaatccagtacaaataagccatatttgcaagtagtgtcctatccctgtggcagcaagaaaggagagaactctgtccctcaccataaccacctctgcaggaacatcctgcaaataaccaattaagcaaagttagctcattacatgatgagtaataagatattctcatggcattaaaagaaaaatactacagaaaatttatggaaaagaggcaattaatttaccaagagataagcatactttccaaaaaaaattgcaatggaacataaagaaaataacaaaacattttgaattttatttaaaagaagaaaacttaatcttgtattaccatgagtgttttgraaaccataaagcataagcctcagaacaaaataagaaaaaataggaaatagaaagtgagttgacaaaatataaaagaagatgtgcgttcaaacaacataatcactaaaataaagacacaatgggaggagcataagaatgaataaagatagcaaagccctgtagaggacatctgatatggaaaggaggaaaatgaaaaaaaaaataaaaagaagatacagataaaagtaaagaatagggagagaaaataataaccaaaggaaacaatcaaagcagattcaacatatgcataattggagtacttcaggaggattctgcactgcactggaacagaatatgtatttgaaactataatacaaaaaatatttttgtgtgaaatgaaatgtttgaaattgtactttgaaaagacttgccctgggatgctttagacagaaatatcctaggaaaacttttgtattttacaaaataaaacttccttggacatatagggaaaatgatcaagtcatactgaagagaaaatattagactggctttacactcctcacagcatcattctgtaacagaaaacactgaaaccaaacttacaagatatttagagaaataaagtgtgagccaagtatttgatattcagctaagattttcttcaaatatagaatctacaagtaatttctcagaactcaggaaagattgttttttggagactgttcttggtgaaactgttagagaaaaactttagtaagattggggctcaaaattattgtacacagatcaacagcttttatatatgcaaacagtaacccatcagaagatgtagtaaggaaagmccatatttataagaacaacaaaagttaaattattttgttataaacctaacatatcattaagcctcatgaattaaaataatatagcattagatcatgaaaacatatattaacagaacagattaaaaaaacagaaacagacacaaatgcatacagagatttagaatatttaaaaagtagcatttgaaatcagtgtagaaaagacaagttatttcttacatggcattgatataactgggatatcctctgtaatggagttggatccattcactaagataaaataatatatttcacaaaaaaggaaattaaaatgacttctaaacttttgaagagatgctcaacttcacacataataaaagaagtgtaactcaacactccctgacctaccattttatctatcacactgacaaattgttgacgagggtacaaggaaatagacactcctatacaattattatataaaaccatcaattccacctcttggaaattacatacatgaaacaatgtgtctaaaagcttattaactgcactactgtttataatagcaaagtaatggaaacaacctaaatgtccatcaagaaaaactaggtagtaactgataaataagttacagcgtattcatgcaatagaatactgtaagttttaaaaatattaaagatctttaaatactgatggggaaatatctctaagatggaacagtactgggaagaaagttgatgtaaaaccatatatattataatttgcataaaaaagtaaaatttttcttgtgtatgcattaaaaaattatagacacaaggctacccaagaaaacttaagatagaggagacaacagtgaagggtcacttttcatggtgtatatttttatatcttatctttgcatatgtgaatatattaattattccagaatgtatgtgtgaaatatttgacattaaaaacatgtaaaattggccaggtgcggtggctcatgcctgtaatcccagcactttgggaggctgaggtgggcagatcatgaggtcaggagtttgagaccagcctggccaatgtggtgataccctgtttctactaaaaatacaaaaaaaaaaaacaaaaacaaaaaacaaaaaacaagctagctgtgtgtggtggtgctcgcctggagtcccagctacttgggaggctgaggcaggagaatctctggaatccaagaggcggaggttgcagtgagccaagattgtgacactgcacttcagacagggcaatagatggagactctgtctcaaaacaaacaaacaaacaaaaatggaaaattcactttataatgtattaccatctgatgtatatactcaaattatttgcaacatatagttacctgaaaccaagggtcagaaagcgatggcaagaatttttaacatgatcttttggtagatatataaaattacagttttatttttattaatcattggagattgaaaagcttgaaattttcttttccaagttcccccatatacagacatagcattcaatacagatgttttctgtggttctcagtagaagacttctgtgtagaaaaccattgcagtgagctcaaataaaggatgattctttttttttcagattttaaaaatacaattttcttttttttattatactttaagttctaggttgcatgtgcagaacgtgcaggtttgttacataggtacacacgtgccatggtggtttgctgaacccatcaatccctcatctacattaggtatttctcctaatgctatccctcccctagccccccaacccctgacaggccctggtgtgtgatgttcccctccctgcgtccatgtgttctcattgttcaactcccacttatgagtgagaacatgcagtgttcggttttctgttactgtgttagtttgctgagaatgatggtttccagcttcatccatgtccctgcaaaggacatgaactcatccttttttatggctgcatagtattccatggtgtatatgtgccacattttctttatccagtctatcattgatggccatttgggttggtttcaagtctttgctattgtaaacagtgccacaataaatatacatgtgcatgtgtctatagtagaatgatttatcatcctttgggtatatacccagtaatgggattgctgggtcaaatggtatttccagttcttgatacttgaggaattgtcacactgtcatccacaatggttgaactaatttacattcccaccaacagtgtaaaagtgttcctatttctccacatcctctccagaatctgttgtttcctgactttttaatgattgccattctaactggcatgagatagtatctcattgtgattttgatttatattactgtaatgaccagggatgatgagctttttttcatatgcttgttagccacataaatgtcttcttttgagaagtgtctgttcttatcctttgcccactttttgatggggttgtttgcttatttcttataaatttgtttaagttccttgtagtttctggatattagccctttgtcagatggatagattacaaaaaaattctcctattctgtaggtcacctgttcattggtgatagtttcttttgctgtgcagaagttctttagtttaattagatcccatttgtcaattttgggttttgttgccattgcttttggtgttttagtcatgaagtctttgtccatgcctatgtcctgaatggtattgcctaggttttcttctagggtttttatggttttagattttatatttcggtctttaatccatcttttaaatttaatgtaacttaatttaatttaatttaatttaatttaattttattattattatacttcaagttttagggtacatgtgcacaatgtgcaggttagttacatatgtatacatgtgccatgctggtgtgctgcagccattaactcgtcatttagcattaggtatatctcctaaagctatccctcccccctccccccaccccacaacagtccccagagtgtgatgttccccttcctgtgtccatgtgttctcattgttcaattcccacctatgagtgagaacatgcggtgtttggttttttgttcttgcgatagtttactgagaatgatgatttccatcttgagctaatttttgtaaaaggtgtaaggaaggaatccagtttcagttttctgcatatggctagccagttttcccaacaacatttattaaataaggaatcctttccccatttcttgtttttgtcaggtttgtcaaagatcagatggttgtagatgtgtggcattatttctgaggcctctgttctgttccattggtctatatatctgtgttggtaccagtaccatgctgttttggttactgtagccctgtagtatagtttgaagtcaggtagcatgatgcctccagctttgttcttcatgcttaatgttttcttggctatacttactcttttttagttccatatgaaatttaacaatttttttttctatgaagaaagtcaatggtagcttgatgaggatcgcactgaatctgtaaactttgggctctatggccattttcaccatattgattcttcctctccatgagcatggaatgtttttccatttgattgtgtcctctcatttccttgagcagtggtttatagttctccttgaggaggtccttcacaccccttgtaatttgtattcctaggtattttattctctttgtagcagttgtgaatgagagttcactcatgatttgtctcttggtttgtctgttattggtgtataagaatgcttgtgatttttgcacattgatttttgtatcctgagactttgctgaatttgcttatcagcttaaggagattttgggctgagacgatggggttttctaaatatacaatcatgtcatctgcaaacagggacaatttgacttcctcttttcctaattgaataccctttatttctttctcttgcctgattgccctggccagaacttccaatactgtgttgaataggagtggtgagagagggcatccttgtcttctactggttttcaaagggaatggttccagcttttgcccattcagtgtgatattgactgtaggtttatcataaactgctcttattattttgagatacgttccatcaatacctaggttattgagagtttttagcatgaagtggtgttgaattttatcgaaagccctttctgcatctattgagataatcatgtggctttttgtcattggttctgtttatgtgatggattatgtaggaaatgaaagcggaactggaaaatatcaggagtagaagtaaaatctttctttatttggtggttagaaagtcttttatatctgatctgtcactttttgtttcttctatctccatccccttcctttcctctgcacctttatatgtgctcattatatatgtctccaaaagaagttctcagtcctgtactttgcaccagatttcagccaaattgcccactacgcactgtgtacaatatctgggtggatttgtcagaaatcaggaactagattaggcgttcatcccccatctaatcaactgtgtataaagaaatgatcatttggtatgttcccccatgcaagcctgaggacagtctcagcagtgccatatagcttttacactccatccatgtgccagacaggtagtcatatccttcatctaagaaaaactgggagcctatggctcccttttcaaattgaagaggaaaagtttatgctagaagaattttatgctagaaggcccacccattaaaatcatagcaggcaagaataaacaaattacttatactaaatgtcatatcttggtgcctcaagcaacagggccaagtatgagtcatgcttttcttctatcactgttttggcctctgtgacttttctattgaagtgaccattttttttcacccaggggaaatttttatgagggaccacttgtgtaaaggggcaggaacttcatggcagtagcagttgtggaaaactcaggctctgtcccaccttttgcccatctttcagggaaagccctcaagcctgttaattcatggtgtggttacataacttacaattacagactctaataatctaacagaaagtaaataaattgccgggcacagtggctcacacctataatcccagcactgtgggaggcttcagtgggaggatcacctcaagtcaggagtttgagaccagcctgaccaacatggtgaaaccccacctctactaaaaatacaaaaattagctggtcatggtagcaagtgcctctaatcccagttacgcaggaggctgaggcaggagaactgcttgaacctgggaggcggagtttgcagtgagctgagatggtgccattgcactccagcctgagagagagactccgtcaaaaataaaaaataaataaaaataaaagaaaataaaagaaatttgtaagtaaaaatgcttctacaagaagctggaagcaataataaaaaaaaatcttaaatgcaacaattggatttggaaaatgccattttcttagaagttttttcttaaaaacaaatcgaagaatttgtaccctttaaatctgtaagtcactacgtaacttgacttcattagtatgtatttaaacattttaatgagttgtcagttatatatgaagactagacagatagattttctgatgtctgattaactttgggttgcttttgttttgaaaattaacttcatatttgtgatatggcaaaaacaccatttctgccccattgtttcagttaagttgagtagaataaaggccagctttcacaagattgttaatcagtgtcactcagaaaccatgttgtcttgaataggcatgttctgcgtcatctgttcatacacatgcgtttgaggatctaatttgaccatgtattttaaaaaaattggtattaaagcctccatagtagtttcttgaattaacaatgagataattggaatcaatgttttatctgaaaatcttatttctttgtttacctaccaattatatgaaattaagttcacatacacacacccttataacgctgaaggacccagcttcatagactatttataagattggggtcttgtttttaatgagaccattgattatttgatatagcacatcaccttaattatcactaggaaggagatttttaaaaacctctagtaaattaaactcttatttatacttttaaaaatgcatagtgcttacattttttttccaaaatttatataagtaagaaaaatataagatgaaggaaagcaactgaaaatacacacacaaaataacagttaatagtgaatagagtacaataatttttttcagtgtctgagccatggagcggtagaaaacaaaaggtaatagaatattatttttaatttagtacacacacatattttgtaataatggcattatcaataacagtaagcaatagaatttattaactgtttacatatatataccaatcatctataatgtatttttaagtcattattgcaatcctgagaatagtcttatttctgttttgtatatagagacaccaagattatttaaaactgtgtgccttacagttagcaaatgggtagtgctggttgaatgcaacccagtgtctgtatatcttctgcctcatcaactgcctacaaagaagatttgccttactacactgctgatgggtaacaatgcaggactgttctgtggctaaaaatatgtttttaaagcttcaaaaatatatattgaaaccgttatgataccatctccaaatgatatggtttggatgtttatcccatccaaatcttatgttgaaatgtggtcctcattgttagagttggggcttagtgggaggtgtttgaatcatgggactagatccctcatgaatagcttggcattgtccttgcattgagtgagttctcaccctgtaagttcacatgagacctggtttttaagaagagcccgacacttcctcctttctctcttgctctctctctcaccrtgtgacataccagctccccctcccttctgccacgattgtaagtctactgaggcctcactagaagccaaacagatatgagtgccatgttagtacagcctgcattggcaaataaacttcttttctttataaattacacagtctcaggtactcctttatagcaatgcaaaatggactaagtcatccaatatgaagattttctctcactcaataccaggagctttcaacttaattcttgaattttcataatggcttagtctatatgatcaataataaagagttggtaagcttgttgatggccattaatttagaaagtagcttctcctaggtgacataatgatttgccacaagtacccacatgtgcaaaaacatctgtgtcttattctgtcaggcatggcttcccagggcatagttctctgtggaaataaatgagagcataacttcaggggatgtgccaatgtacatatgtctgtgtgcctctcttgaccaaatcctggtatgctgagctgacagtgagggtttttaccctcactgtatgtacattttgaaaatgttatgcatgtgattctcatctgtaaaaccttctgccttccagatgaaaacttgttctcttccttggtctcaacaaattggaaacacaagttctagacttgtcaaggccaaggaagagagcaagttttatgagaacaccattaatatttaatgttacatgagatacagtacatgtgcttagagtgaacaccaagggctcatcaggcaaattcagagaaatgatgctgggcacaacgtattgcatttagcgcacccttcaagcaaaagagaccttgtcaacaaaaggtcttggtttatctgttctctattccatcctttcagaatgatccttagtatagatttgcacaaaatccatcagtaaggttagtattttcctgaaatattttaaaggaattggaaaagagatgtatagtaaagtaataaaaatattaattagaaagcagagtaggcatcactgttcttaaaatattcgttggctatcacacttgttcccttcgtgaaattacatctcacctatttcctttgttgtcttctttctgccctttctcttttctcacttctttcttgtttgtcttggagcaaaataatatatatgtctcctggtctaaggcaaagctctttagtcctttgcctggttttctgggtgcttgccaaccttagggtattttgtgttgttgagggggggaaaacttttcctgtactctcttatgttcagtgtctggggggtctataaaataaactgccaaaagatattatcagaaggaaaaaaggtttattcatatgcataaaggagctaacaaaagaagtaggtagctggataaatggttaaagttaaagcctaatatacccaacttagtaggggagtgggggaaggcttctatgggaataacaagtaggtttctttaggaaagacaaattggttttgaggagaacaaatgggagataaagtttgtgataatgttcatttatgaggtgtgtgtggtttttccttcttcttcatgccatgaaactctcctgaagagaggatttatggtagctgtactcttagtcttcttcctgggagtagaagccacccagaagatggaatttatggcagcctcatttcccagaagtttctgcttttagtcaaattgggaaagctccaacaatgtttttttctgcattggttgaatctcaaataccttcaatttaatttcttataccaactctggggacctgagtgggttcccacacagtgaatcaaggtccctggcattttgcaacattgtatgcctgccatccatgctcacaggatttcttactgaccctgggtaggtttgtcaaggcatttcatgggagagacaatgccctcattcactgagtgaacttctcatttctagtgttaagataatatgaataagaacttttcacttgttacagagattaaagaattcagacattactggggaagcattcaagactcttcggtagaaaataacattgtaaagctgtgttgatctcagagaagtggggaagcaaaagtttgttattaatgatgattttaaataataattataaaaatgataattcacatattatatgtcttcatttgcccatgtcctctttcatataaaaatggcaaatgcaagtaatcctaaaagtgttcttgtcaggcactaagaaacataaataaatcatacttaattttgcacaattctatttggtggatttttatctatattttatttataaagatcatgaaattggaaaggtcgggtgacttgcccagggtaacacagctgtaagcggtaggactcagatgtgatgattgtaatctaggagtaagaaatagagacctagagaaaggtggggccagttgaaatggaaatgaaagtgggaaaaagggatgaaataggatcaacagtatgacttcattaattggtattattactttgatattattacttggatgattgacttagtaactactatatgcttggagtgagagatgggaatgaagccaaaaatgatgctaagtgagcctggcttagtgatttttttttaatagaaattatgagggactatggctgggtgcagtggctcatgcctgtaatcccagcactttgggaggccaaggtgggtggatagcttgagtccaggagttcgagaccagcctgagcaatatggcgaaaccccatctctacaataaaatacaaaacttagctgggcatggtgatgcatgcctatagtcccaggtactggggaggctgaggtgggaagattgcttgggcctaggaactcaaggctgcagtgagccgtgatcacaccactgcattccagccagggcaacagagtaagatcctgtctcaaaaacaaagaagcaaacaaataaaaacaattatgaggaacagaaaaatatctagtttttgggacgggacaatttcttcaactttagacataatgagttgagttaatgagaatgtcagtatctttccttttaaattgtttgacattaatttttgaatacactctacatgtacaatatagacactgaggatagttgaataattttagcagacgtattccctgcccttgaagaattccatgctagttgattaagaaatgcatccatgtatttaatagctagagaataatttcagtgcaatttgtaagtaaattcattatttaggcaagaaccacactggtggtcttaaactgtgggtgccaattacatcgttaacacataatcccatggcggagccactgagggagaagtaggcagtacattcctctcccatcccaagaactgcaccctggccacccctagctcttggtatgtagacacgtcactctagggatggaacactaaggaatagactgtgcctcacaaaggccctggaaacaggttcagccttttgggaatggaattcccacaattaaatgggaggaaggaaggtgcgggcttgaggtgggcatatatatcggtccctacataattccttatcctaaggtacagccaaagaagagcagtgtcctctatggtcagtgccttttaaactctggagccaaggatcaagctagcctgggcctgaggcagtgccactccagcgtttctcttcagaggcatcactctcaatggcacctctgtgtctcctcactgttttcaacactccatttaagtaaacagaacatggactgaacacattttttttctccctggttatttgcattttaagccctttatctctagctatagattgaaaggctttgtctctagttaaaggaatttcaagcaattgcaactagatggataagattagatttggtcctgaggggcttctctttgtccctaaaactcctgatattgtcagttttactatatccagacagtgaataggctttgttctgatgctattctatatgccttgcagaaacgtgtatgcctactgtggccaccagtgtcaaatactgcacaatgctcacctacaattttttcaaatagtgtttctctttctattttattctttggtgcttataagacatctgttgttatattttgtatcttccacctacttattcatggctttttcctctaccttgtggatgaatttcttggtatcatcactaattactgctttgacatcttcagagtaagaattatctttttagttatttttattttgatgattatatatgttttctattgttatgtattagttattttcttcaaatctgttgttttatatttaattatttttctttttgtgtcataaattgatgcttcattttgataaaagccagtgtgtcagtttccattttaagcattgacatacttatttcaaagtttttgttggtgttccttaaaattaatttaaattctgtgaattcatgattcacttattgacttacttggtttttgttcttagcattagaatcttttacaggatttgagtttgggttttcaggcttatttttaataggaatttgtaaattcatgttggctttactttcttctctctcctcatctataaactgtccttcctatttagtggtttagcagtttcttcacctgttccttcaggactctagttcttatcaggtcttcaatgagaatctactgcaaaatattctactttggcataaggatgattttcgagctgaagcccagttgagaagcagaagatgcaggaagagttatcttctttccccttatctgtctaaaagcagggcataaattttcctttgtgaaggctctccctccctagcctggcaccaagaaaggaagaacaactcttatcactgcaaatggggagtcaacgctgaaacgagtttgcacgaataaaccttactaatataacccgactattccattaattcccccatatattgtctagccacttccccatgagttaatcatcccttgaagcctaatgcccccttttaaaaggcatataagcccctgaatctaaccacttgaatttcacttgttttctgtgaattcctatccatgtaaatattaataaaaattttagaccttttctcttacctagcttttgttagtttaatttgcaggcccccttgacagaacctatgaggatacaagaaaagttttttggttttttttcccaacatcttaataatgtgttgtggggcttcttcccacagtgatgtctaaaatcgttgatgatttggtttgattaatagtgaagaggctgtgtctatgccctcccactctctctaggttcccattttaaaataaagtcaaaattgcagtcagtgtgttggcaacagttttggccacttatctttggcagcttaatactaccctaggcccaggctttcagggaaaacctggttctagatccccatgacgcttttagttccctttacattataggggccttaagattgcttgctactttatatttctgtctcatttcgtggtccaaaataatctttatctcatatttgaccctaagtctttttctttcttattgaatataacttattgttgtcatatcctatcttgacccaaaattcttataaacatggtttacttcacattttaggttcacctttcaggtctctcaaatattatttttttggcttttaatcaatagcatgtgattagcaggaaaactaaagaaagccatgtggcctgggcaaatttgatacagtttgaaaagtatgccccattttttttgtgctaagattacgtgtgtttctgaaacttggagagaagccagggacattttatttagtaatgtgaatgttggctctatctttaggctctaaagaccaatctaagattgaccagcaattgtaaaaatgttgagtgatctaaaacaattttgtctaattttcgtcttttaaaaaacccatcttttagtctttttatctgaggatagtttatacaaatgaaggtagtgacacctgtaaatatattaaaaatcctgagaccattgttttaactgaggtccttgttgaccatttcaataaggaaatggttgcttatttgcacaacatttcaatcagttgaacttggggaagtcagaagtaagattggggtcattatttggcttaaaacttttccaatgagagtcaaaatatcattgatgaatagcaatgtacatgtatgattaatattccaagacagattttgtaaatgtattgtgtgtcttaaaatatttgttactctcattcatgtccaggtttcagcaagtttagaagtacatttgtatatcagtagtagtatgactaattatctctacatgtatttatcattaaataaacctcacaggagacagaaagattgtttacttaagcagtagaatactggggatggtagatagctctagaacacaggattacatcgctggaatggcactatttattaagctatgataacgctaatgttcctctttgatgtatagcatgtgcgacttcagctgaacttgtagagagccttaaggatgtttcattgaacatttagtatggcagccagccagaatacatttagcctaagcccagatgacgggctggtaatgaggtagtgattgatgaccacagcttccttatgaaaacctgcttgatatgctggggggaaaatgcattgccagctcttttcatttcagtccctgttatattagtaatttttactgtgaagaagttacatgggcttctgcttatgcacttttggcatcccttttagattacaatcgaacggtggtatagaattttagaagtcctgtggctatatttatgtataattcaaatctcaatttcaaaggggtctttaaaaatcatttttaaaaactataactgtgtcatccataaaatactctaatattatttttatgcatctgtttaatgttatggtttctctgactcctctatcccccatatccccacacagtgtcataaagctctacccactcccgtaactttaaagaacagacatttgttcaaattcctaaatatgtttcaagaagactctattttcaattattcttacatttttgtggtatgtatgtgtgtcttttcctgagtaaagcatataaaattaattcatatatatttttatatatgaaattcctctggcttagttcctttgaagcactttttctcttttgtccatctcttttttgctttatacatttgctctcttactcttttgtcaacataaatcatttctcagattgggttcacataagcacttatgattgcaaaatgctacttgctagaatgaccactttggttgcctactgacctgggacaaggtagagcaaggcccaagattgacatttcacccttaataagtcttgctcgttgaaacgccaacaacaaatagggtttgctgagattgacaagagaaaataaactatgctttaagccagcctgattgtggctggctgggctttcaattttgctagtcagagagagtctgtacccttttatgccttgcagccatcactccttttggcttgcagtggccaaacagaatgcttgaaactcctgatctcaatccagtcactggggcagctcagacaatgacagtttgaagtgactggaaatcctgttgagacgccatagcccacatttggcgtggttccagcaaatgaaaatcagtaagcttgctctcagaagcctgttacgtgcttatgtttttgttgtttcaactacctccatttcttcaattatttaagttattagaggacctggaatgaaacaaatcaagacaaaggagtattagtatccttttgaggtttggcttatctctcaaagcttttgataatacttcctattgatgggctttgtaaagggcaggaagttgtgttaccactataattctttactttgctccctatcaaaaaatagtagcaaaataagagttgtaccaaagtggaaggcttatcccttcctattatagaacttatcttttattaataagttgctcaccactattaccacaaaaccatactttcttactggagataaagaaacttgttatttactgggaaaagtttctggtagcaaaacttgacctgaaatgaattatttacaagtttagaagaaagacttgctaagtcaatgctacagctgagaaataagccaacactttctccaaaacagcttgaagctgacaaaacactaagctctgaggtcctagagaagcagcagttcagggtcttgttagcttcgagctgcaggaaagacaacactggcagagtgctcagaggaaggagcaggcaccccaagagggggatgtggagggagctagaaacagcattagagagaaggcatggagaaatagagcaacaccaaattaaacactgagagatgatgaggcacataaagtacttaaaggagttttggaggtaaaaacaaaacaaaagtaactggttaggaaaatgggaaatgaaataaaacaaattgcacagaaaactttagggcaaaatataaaaaatgtccaatgtaagaataatacatttgtattatatttatatagtgctttatatttcttttttttttgactgtatatagtggctttatccgtaatagccaaaaactataaacagcatagacgttcttcactgactaatggttaaacaaactgtcataatatatatcatattagtactagttagcattaaaaaggaacaaattattgatatacgtgacaacttagatgattatccagacaataagactgagtggaaaaatctgattctaaaaggttacatactttatgattctatttatacaatgttttgaaattatgatattttagaaatgggtaataggttagtggttatttgtattattttattcaattctcacagcccccagtataaatttcattacccccattacataggtgaataaaattaaaatgattgcatagatcatagcattgtctaaatcctaatttctaaaatccactcgtagaatttgctgaatatattgatatatggcaaagatttctagcattttatgcatttttgtttttgtttgtttttttttgtttttggagagacactattttaaataggattatcagaaatggcctgtctgtggagggacctttgagttaactgcaagaagtgagagtgtcagttatgttggctgtattctgataaaatatggctatatctaactaagtaagggggcaaaagagatgacaacattggaggaggatgtgttaaaagaactagtgcctctgtgagcagccttcaaaygatgaatgatgcccccttcatgcaccaactgcctgaccactggggtaggatagctttgaggtgtgtgtcctacattggctcctagaatttttagcatgactttttaacacatgctttattttgtttcctgtttcacttgcccaccctcctattggtgtttcctgggattatctcccaaataaatacttccacttgatttcttgactcaggctctgcttctggaagaacccaagctaagagagtggtaacaatgtaagtggtaagaattcatcagaatccgcatgccatttagaagtgagaccgataggatttactgatagattagatatggggtaggaggaaaacagaaaatcaaataaatgacttatttttaatgttaatcattaaaaggagccataaaaacatccaacttgtgtgattgtttactaattgccagggactcacctagtcctgctgcacatgttaaatcatatgagttatccctaaagccccatcattatgagtctgggttcttttatttagcatgtagaggctgggatttgaactcaaggtatctagttctaaagtctgagcaaataaccactgtcctcttttgcacagatagtacataggctataaaacagcatggtcatacattcatatttacatacatatatacatgcatattactagtacgtagtacattcgtatttactaattctatttgcatataatgaagaggtggtgctgaatttttcttctagccactttttttttgcatgtatgcatatataaagtattttgtaagtctaagttggacttggctatcatttcaaaaatcatgacccttctcataaaaattaagaggtaatattactatcattattattattggcaagatttctaagttgtactgaattttctataatcaactgttatttgatagaattgtttgaaaatattactacatgcttgatggcaggacctaaaacagcaggcaaaatatatatgatgccaaaggcatcttctcttatcactagctgatttacaaatgataatttaactgttaatgtctgagaatattttctctttcccatacacaataagaaaaatcactgtgtatactgagtggtgtctaggaatgtgatacgtattattcaaagtwtgagttgccttgaaatcaaggtatagggaggaatgatgaggacacatgggaagaatttagaaataggtccttacagcaaaaagtccatctggtccctagaatatagatggagggtattggagagcctgggcaatagaattaatagagctaggaaacaagtacttatcagaggaggatttggtccatgaaagtggtcaagatttggaagaccctttccctttcccccaacatccaggcagttttcatatcatgaagagtctgtgcctcaatgtctctgaaataggaacctgccctttcattcctactatcattatctttgtccatgcaattgtctttttgctagcagatagttacaactcactttcaaactggtctttttaaggatagcatctaaagtctttagcatggctcaaaaggccctttataattttgccttcctgaacctaatagtattataatgttattttttgtatatgtatatgtgttttatataatattaatatataatactattagtaatgttatatcagatgataatctgctaatgatgttcaactcctctaggtcatctaggctggataaatgtttcaagatagaatacttggagagaagagagttggtgttatttagagcagtattttctattaaaagcaaggtggaaattgaggaattttacaagttgctagccctatggcagatgatagcataagtgggtaagataaaggcatcctaatacagtgtcttgttctttgttaacaagaaatgaaaaagaagcatacattttttggttcttagaaaacctggggaattgcagagcaggagggtgatatagggaaaatacctgaaacagagtgagttgccacaggctggcttcctcgtgctctcagtgcacaatggaacactggggattaggcggtagcatcagttcttacttggaagagataattgaaaacttttctgtttctagaaataatgtttcttaaattattgttggtaatatttacatataaaatgacattaatcctggaggcaatatgttgtaagttaaattatgtaggatttgaatccaaatcctggatctgcatctcagcagatgttttaccttgtgttatggactgtttatgtctccctaaatgtgtatgttgaaatcccaacccttgttgtaatggtattaggaggtggggtctttgggaagtgatgaggacctgagagtggagccctcatgaactggattagtgccctcataaaaggagcctcaaggagctgggcctgaagaggccctgcaccagatccagacatgctgacacactgatctgagatttccagctcctagaactatgagacatgagtttctgctgtttataagtcacgcagtctatggcactttgacatagaagccggaactaagacaccatggaaaggtatttcagtctatttaagctctagttagttcccttgtggaaaaaaaagaaagaaagactactaatatattttactgagatgctttgggaatttaagtcactgagaaaatacttagcatgtaatatgtatttcagaaattaaagttcccctccattctctttccttactatgtcgtttatttttataatggtcaggctaatgcggaaggaagacatactaagactttatctttcccacctatgataatcaggcaaataataactgatattgatttaacattgttttagaagaccaatgtttgtgaaatgtatatatcacattcagaaactatagatgggagtagaaacttgaggcaaaatgtgaaccaattttcagttaggcagaggagcttgcctccttttggaggaaatgggaagtcattgtatgtttttttatgttgttgtttgtttgtttttttcttgtctttgtagtaaacagtcgtagtcattggaaatatttacttccaatttaaattgagaataaaatcttctaaaaaagaaatagttgaagtaactgaatatttatatgaattttctgtttatattaatgattttctcatttatgttaatatcattgacatttcagaatagttgcaacttagattagagcttaagacatttttttcccattgatttagcaaacattaatgaaacgctgacaaaatgcaagagactctggacttggcaccgtgggaaatacgagtttattcatttaacaaatagttaagtatttaatgctgtatttcaggcatcacggatagagtgaacaattaagaaagaagtggtctctgacctcactttgcccatagtctagtaggtccaagaggacaagctttcctacccttgatatttgaaatgacccgaaaagaacaattatttatttgtattgacagattcatcatctgccaaagcccacgtgaccttttctttcatttgtccagtctatgtcagtgatgtcacaattattgtataaggttgcaaagcttcaaaaaataaaactgagtgttttatcatcgtattagattgccagggctgccataacaaagtatcacagacagggtggcttaaaacagaaatttattttctcacagttctggaggcaggaagtctgagttcacggtggcagcagagttggtttttcctctgaggtgtctctccttggcattgtagatgaccatctcctccctgtgtgtttacatgctgtcacctctgtatatgcctatgtcctaatttcctcctgtttttagggcaccagtcatgttgaattagggcccactctaactaatgaccataattttaattmtttctttgaagatcttatctccaaatacagatgcattgtcaggtatttggagttaggacttcagcatatcaatttgaggggatactactcagttcacaacagttacccattgatatatcatctatagtcattctgtcatcattttacatccagttattctattgcctctgatactactctaatccagatgcttataaacaacagtgttttcttttaaaggcagactcttgttcagaaattcttcttacatgtaatccttccaattagaattatttctcaatagttcttttcttgatttataaaagtttattataaattgacagttataattgtatacatttatgaggcataagatgatgttataatattgcaaatagtatgtggtacaattaaatcaagctagttaacatccccatcacctcaaatcttaacttttttgtggtaagaacatatgaacttaatatcttaggaattttgaaatgtacagtattctgttatyaactatattcactgtgctgtgcagtataactcaaaaaaaagaaaaaagcacacacttatggtctgagattttaccctttgaccatcatcaccccattccccaacacacaagctctgtaaccaccattctcctctttgcatctatgagtttaattgtttcagattcgacatccaagtgagaacatgcagtacttgtatttctatgcttgacttgtttcacttagtgtaatgttctccaattccacccatgttgttacaaataataaaatttcccttttttaagtccgaatagtatttcatactgtatatatacattttctttatccatttatctgttgatagatacttagtttgattctaaagtttagctattgtgaatagtgctgtaataaacatgggggtgcagacatgtcttcaacaaactgatttcaaatcttttgggtaaatacccagaagtgggatttctggatcacatggtaattgtatttccagtttttcgaggaactgcctttctgctttctatagtggctctactaatttacattctcactaacaagagtgttttcttttctccacatccttgctaacacttgttatctttcatctttttaataaaagttattctgacaggtttgagatgatatttcattgttttaatttgtatttccctagtgattagtgatattgaggataattttcatatattctaggccatttgtatgtcatcttttgagaaatgtctatttagatcccttgcccatttttaattgggatttttgttttactgctgttgagtttagtttcttaagtattttggatattaactccttatctgaggtacagctttcaaatattttctcttgatctgtaagttgtctctacacactgttaattgcttccttggtaatgcagaagtcttttagtttgatcaaatcccatttctctatttttgcttttgttgcctgtgcttttgggatcaaatccaaaacatcatttcccagaccaatgtcatgtagcttttctcctatcctttcttctggcaattttagagtttctggttttatgtttcagtatttagtacattttgagttggttttttatatggtgcaaggtcaaattttgttcttctacatgtggaaatccagttttcccaatagtacttttcaatgagactatcctttacccattgcttattcttggcacctttgtcaaaaatcagttgatcatatatgcatgggtttatttctggatgctctactctgttcccttggttgatgtgtctatttttttttggcgaatacctttctgttttaattactctagctttgttgtatagtttgaaatcaggtaatgtgatacctccagttttgttctttttgctcatgattgcattggctattcagggtttttcaatggttccatatgtgttttggtaatgttttctctatttctatgaaaattaaagttggaattttcatggggattgcactgaacctgtagattccttttgtcagtagttattttcattatattatgactttgatccaaaccccctcattaaaatgtttctatcactatgcctgactccctgaggccttggtaacaattgaacactgtgttcccaaatttatttcctgttattctgcagtgaattatgtttgctgaagactgaacatcctttktactttccataagagaacatttaacagcctgctctagctttatgagtaagattatgtgttttctcctttgtggggaaattcatgaggaatctttactggcttgcctttgttattcagactgctttcttcatcttgcttttttgtgggggacacccctcagtttgcacctaattcttacctctctgcttcacagtctttggtcatgattcttgagagcattcctttgcttcttgagtcactggtcattgccaatatccttggactaactccattcactttcaacattgcccagcttgatggaaactagaatgaccagagtcctatctcatacccactttcttgagaagtggttttaaataatttttgcctgaagtctttgcatctgttttgcccttcagtatcatgatactcccttctcaacttcacatatgcaaatcttagctctcctgattctgtgtaaacgccattcttttcatgaaactatttcctgattccttcagatcttgtttgcctgcctttcttcttcactttcaccacactggaaactgcataaaataacatctaattatatacagtcttgtatagaaactcatacttcatgcaacttagtcttttattcctcggtatctttttaaataaacttttttattttagaacagttttagatttacagagttactttagagacaatacagaatcgctggagtccacattcagtttcctctcttgttagcaccttacattagtatagtatgtttttgttacaattaatgaaccaraattaatacgttattattaactaaggtccacacatttgctagatttccttagtttttacccagggtcggttttacctagagtctatccaagatcccaagttatatttagtggccatgtcttcttatgcttttttttggttgcaatggttttttcagactttccttatttttgatgaccttgacagctgtgaggattactagtcaagtatttttttagaatgttcctcaaatgacatttatatgtgttttttctcatgattaaactggggttatgggtttttgggcagaagaccacagaggtaaagggttatttaaatcaccttattttatatactatcaataagctttgtcatgattaatgttaaccttgatttcatgactaacatagtgtatgtcaggtttctccactaaaaaattactcttttatgactcyttgcatatcatgttctttggaagaaagccactatgagcaggccacacctaatgagtggggaattatgctccacttccttgagaatagagtatctacataaatcatttgggattcatctgcatgggaatttgtctattctgcccatttatttattcagtcatttatttatataagtatgatggactcgtggatatttattttttactttttgctgtaaactaatatcactttgttttgttgctcaaattgttctggctgtgtccattgggagttcttttagtttactcctgtgtccctttaatatatctacatctgtgcgtgtgtatgtgtgtatgtgcatgcattagtgtgtgtttgtgttttagcacttaatttctggccctacaagatgatctaggcttatcttgtatatttccttcctaagtcctagaatcaggtgtttctccaagggggccctgatttcttttattggataatggtattagaaatcaagatctgggagctaagtgtgctcattgctactgtgatgttattgcttgttaggccctcccagctgatgggtaagggaatatatatgtgtatactaacctatgcatatacatgtatgtggacatcagtacaaaattagacttatattatttatgtacaaatatgttaattattagatagctgatttttgaataaaatgctaatacatacatatttctttaaccatatgtatctgtattaaatgaaacatgtgtatatactgatgtcttccactctaattcatcaccacgtagaccattgtagcctctctctatccttttcttcttatttacatttaacctcccaatacaacagtgaaaacacctgactcccataatctactatcagtttacttaattattcaattcttatttacattcattaaaattattaattcataccaccattccaattcattatgtttaaaatgatacaaaagtgccagatacttagcatgtttctgtactactgaaaggacctagaataaagatgaatttatagtaggtcctatatgctattgatgagtctccaaaatagttaatatactcaatcaaatctaaatttcttttgatattcaaaaggcattacagcctcttgcagtgctgacatggccatcattataaaattagacaggcttgtacagtatatgtacaaatatgctgattgttagatagctgagtttgaatgaaatgctaaacttttttatttcatgataaatctcttaagaggatgaaagcattatctaattatcgaattgttaaataaagctgtaatccatgtacaagtaggaagctgattttttaaattaaaaaatgattatcaaaatggaaccagaagttgctaaaagaatgattagataggggcagaagtatgaaggaaggctaagaagattggacttttacattttgggacagtgaagaatgaaagagcatatacgaatagaatttataaaattatgaacaatataaaaggtaaatgtggattcctgtccagatatccagaaattgtaatttatctgaaacttcactgaaataaattttggccaactatgtttaaaaagttaattttaagagggcagatggttaataacctatgagatgttgccagtaagaaatctaaatgtgagagtgggtgccttggctcacacttgtaatcctaacactttgggaagccaagcggggaggatcaattgaggccaggagtttgagaccagcctgagaaacatagggagacctttatctctacaaataaataaatatatagtggagtgtggtggcatgtgccgatagtcccacttaggagggaggctgaggctggaggattgcttaagctcaggaatttgaggttatagtgtgtgctacgatcatgccactgcactctaacctggtcaacaaagtgacactgtctcaaaaaaattttttttaaaaggacaaaaagaaaatgtaaatgccttcaaaatgggtatgggaacaccagtaaatggcagaacattaagatgaatgccctgtgtatcaattggaatagtgattgcagccaaatctcactggaatctgagtgtaacccaggctaataattccaaagtgcctatgttttttttttttttcacttatactgggagattttgccgaactttaaaattaaatgaaaaagaatggctaaaaacggttcttacagctttcagcttttttgtatttagaatcagtcatggcaatcacagatgtttgaatttgatttaacttcctcaaatctatttttcaacatgagaaaaagctgtcaaacagtataggcacaaatgccactggcaatactttaaggccttaagcccagaaaataatgttttcatattaaatatatccattttaaaaagttaccttcaaatttcctagaaactaagtgaaattagatagtttgtgtaatggtaaaatcacaaaagataccaagagcaaggaaaaaactaacatttttcaaagttataagaagcatgattacttgaatttttatgctagtcagtattataaaaatagaagcaatggtcgttaacattaactttgtaaccggtgtttcccttgcattgataaaagggtggatgcggatttaatataggcaatacatttgaaagaaaagcagattattccttcaggattctcatatgacattctgaacaattaagtacaaacgtatgcttaagtccaatttcatggaaagttgctaacttgttatctctatatattactacatgctaaagacaagcgaatcaaacagaacatggtattttgtcctgtcaaccagcattccattttgatcataagctagtagttgtcaggttgatataaataagatacttaaatataatttagtacaaattgtttaaagtagaaataatgttattaggcatctctagcaatcctaaaagaaaggaaaatattttatgattacctaattgatttgaaactaaacaattgactacacttttctagaatgtaagattttgtaaattttaccaatctgtatgaaataaaacaacaaaattttaccaaagtatataatccttataacaacctggttgtgtgatatattatccccatttacagtctggtggatatccacatcaaatagaaacaaaaatcataaaaaggaatgaagataaataaaaacatcttcaccaagattacttactgttactgcagaaatgagacacaagattgcatcctggatgtttctggtgcattattatttcttctatctacactgccttcgattttatgtggtgagctcaccaaaactccatattaagctatgggcaaggaaccccgtgcccttcattaatmtgtgatggtggcttggttgaaactgttggttttgaagcctgattgcctggattaaaatcctacgtttatttctgaagtgtggctacctgaattcaaattctgtatcatctacctaaattcaaattctgtgtcatctatagcaatgctgctggttgtgtagccatagactggcgccggactctgaactggttattactggtctgtaatgagataagcccacacactgtatttagaaacttttatagaaacttgacagagtatacaaaaaaattaaccgggcatggtggcacatgcctgtaatcccagttgctcaagaggctgaggcaggagacttgcttgaacccgggaggcggaggttgcagtgaaccgagatcatgccactgcactccagcatgtgtgacagagccagactccatctagaaaaaaaaaaaaaaagaaaaaaaatccttgacagaataattacatgtctaatgaatcaagtaataaaatgtcaggacatgctatgcctgtgattttttttgtcaatttctgtttctagtaatttatttttgttttcttaaaaaataattgaaaaggattggaatgaaagaagactagtcccttgccatggagagtctgagaaacactgatctagaacagtactaaggcaaagctttaatgtccttatcattgaaatttgacaaaaagcaaggcagggcaatgatttttatacctttcaggtgacaacacttaaaggggtctactgtaccatataaaaattatttctctacatacttgcccatttggtttcttatatagttatcagacctacagcagatctgaccctggtatgacttacattttggggacccaagtggcaaactgagagagttttaaaagagaaggcagcttgagactttttccttcttttcataaaagtttctccttatttcgaggtgataactcatggtttaatagttcttaaactttaatgcgtgtaggaatcacctggagatgtgcatccatctctgactcagaggggtggagtctgagtttctgcatttctcacatggtgctgatgctgcagatgtgcagaccttgcttggtagcaatgatttgacaagtcttgtttcccaggtatgcactccacctagtgcctgtcagcagacacccccaacccctccacagcacctctctcagagatagaatctccctgcaaatattttgtaggtatccctagttcataggagatgttttatcctcaccctgaacttactctcaatgttggtgtttttcactggacctagagaccaccagaagccaaagatccagcaaagctaaagttctaagaattccaatgtaaatataattttatttaagccaaatagctttttaaattactaacttacaaatatgagtaggacaggctgactagtctgacacagmcactgttgcttagtgttttgtaactcttgtaaaaatatatttgcctgaaatcagtagtccctagccaattacctttatttaggcatggatagttgagtgtttttgtatagacattttagaacagtcttgtggttctgataaagaacgtttggaggttgtagacacgaactgtgtgtttgtgtgtgtgtatgcgtaggtgtttgtatgtgtgttttcttcatacttatgccccatctgaatatgtgggaattagatccttggatcatttacaaaagaaagaaagagaattttcctagcagcttggactgcatgtgtgcaccaccatgcccagctaatttttgtatttttagtagggatgggttttcaccatgttggccaggatggtcttgcagtagaatcacttgaacccgggaggcggaggttgcagtgagctgagatcccaccactgcactccagcccggcaacagagggagactccgtctcaaaaaaaaagaaataaaactttcatagccttaattttaggagaaatcactactctaataatcttaggaattttaatgcaatagtgaaatattcattcttcaagttttctttttgtacataacataaacaattgaaattaaaaattataattgctgtgtttcatattgtacaagtcattcacctaggatatatatttcttcttttttgtatgaactaggtctctattttttgtgttatcacggttatctaagcacttaagtaatttgagctacatggttagagacggtttttaatatttgtgattcttgggtttataatattaatatgcttgcaaatcttggttttagtaaaacatccaagtagtttgcatgaataattaagtgaacaataggtaagtatccagcatctccgtgtggtctctctggtcttttaatgtaatcctatctgtctcaaaaagataatattttgaataagaattttattcttgacttggaataattttcaatctcattatcctaaattacattttgatccttggatatttaaaaagaaagggatgatttactcacwtatgtgtggaacctttcttttatgatgctgagaaaagtgtgacaataaataaaaaatgaacaaatgaaaactgaatttaccattccttcattagactaacattaattgaatacctagtatgtcctaggcagaaagaatgccgagaagaacaaagcagaaactccgtaaagagttcccagacaaaaaaaaaaatcatttattagagtgcagtgtaaataccaataaaatagactcaaaccctgggtgtaaggataatgaagaggaggaacacatggtaggaatctgctatttctgtttggggtagggagtgacagtggtctgtcagtcttctcagaggagttaacgtatcatatgcttcataaggatcaaggtaaatggaagccaggcaaaggagggaaggaagggcatgccagtcagagggaatcttaactcaggggtaatgaaggggaatgttgtattcagtgcactataggacagaattcaaattggtttatcagaaatgaagtgtaattgctgaaggggttgggggagatgagactaaggttcaaataatgaagggccttatattccttgctaaggagtgaaacactggggagtccctcgaatttttcattttagaaaaacttatctgccagcatgatggggaatgataccaacagagaggaaagaagcaggaagatcagtttgggaggttatttttttgtcagccaggatagaaaagataagggcctaagcaatattagtgagactgaggagattaatttgaaagattattaagtgaaaagaataggatttggtgattgtagaaatgaagtttgatggagagggagttgtgtaggatggttctgtttgttacttggtaatctgcatagctggtatgtagtttgtacttaccaattattttgtcatgttttacatgaaggtcagaatcaccccactgttggtcagcatagattcccgacacccagcatagtgtctagctcatagtaagtgctctatgaatatattttgaatcaatgatcatctcatagttcaaaaagacagaaagtgtgaataatagaacatttggagaagaaaatgaagaatcgcattttggacatcttgaatttgttgtgttactagcccaaccagtggaagatgttcagtaagcagttggacaactggatatatggrtttatgaatttttatttttgtaaacaagaattgtgtcttactcatggttagagaccttagcagtgttatgcaagtttccaaatgtgtgctaactttaatcatagttagcactagtattcaaatagtattgcatagtttaagagtaagctagatcttttaggcatatatgaaaaactagatattgccctggattttaaaagcctacagtcttaaggaataaataaggcagagaaaagaggcggctttgattgtggaaagagcattgatttttgaattagaagatctgtaagccttaactttgctgttaactagattttagtcactaagaattgtaaaattttctagactgcagtttcctcagtgctaaaatgagacaatgatatttcatggtatccaatgtctcttcaacmtgtaacattaaataatcctgtacattcatacttaaagattttaaaatacatattgaaaagtgtgcatcttgatgggtggggaggatgtatagttgatttatattagtgagtagtcgtgatgcttccctccattgctaatgaaaatgaagtggaacttagaattagctaactggatttaggcctcatctctgtgaataattagctataaaattttggacttgttaagccccttctaggggctaattgtccttgacatgccttttatctctagtctactatggttttattaaaagtatttatgtgtgattttatcctgtcaaacttgtgggggaaatcaactcagtcttataaatatcattcacataatatctattaaggcaacacttgatctactgaaaacacagagtaaaagtatttaaattattcatcagaaacattgatattaaactaattcttctagctcaagtctctaactcttgtagtaccttaacaccttacctatatctttataattattctttagtaaataaaatctcgggttatcctaatttaagtgtgacatttattttttgtagggattctgtttgatacaccctgtcataaaactttaaaaaatttttaataaactttgaagatttgcctcatttaaaaatattaattaagttttaaatcaccatatcccaataccatgtgtggaactacggtagctgctatataaaatttttcagttacttgaatatcaactcaatgagagaaattgctgagattacaagtaagatccatccctccccctggctcttcrtgagccagataattagataaaaggatgagctagtaaaggaaattcaaagactgttataatattgtatgtatgcacaaaggaaaataacatggtagaactgctacttttatgatctctgtagctactgccactatgacattatcctttctacttgtgcctttactaattattgatgtttgctaatacataatcatacccattgttgtctatttatcttatttctgtcatgtcctttgtgcctaaaaatctgtacattaggattcattttattacttaarcgctatattcatgctctagctctttccatttataattttaattagtaaatatatattgaacaaatgaacaaatttaaacacatattggcagatcatgcgttgaaaacaggtgtttcggaaagtctcaccagcacactcagtatgccccagatttctagatgtcgcatttaaggactttttgtgagtgaaaccacccaatagtttatgtaaaacagatgataaatatgaggatgcrgaagagtaaaaaatttattaaagattttagtgacatgtccactctttttttctcatcattttcagagagttatgattgatttttatgagcacactgaacaaagagtgtgmtaaaggaaatattttccttaggaaagagggttcccagacttaaactcaattgactattaaccaccaaaattatcttttgactgtacaaatagactttacattcaattagtatatgatttaaacaaatttagataacttgcctagagaacaatgcctgttacaggaaggctgcttaataaatatttattgaaggaaggaaggaatcaagggaagggcagaaaaaaggaaagagagaaagggaaagagagagaaaagacatgtctgcccaacttggtttcaatatttttatgctactatttagcattttagggtagtaataaaaatgtgatggataacattcattctagattattcaaaactctataataatcartaagaaaatttcaaaattagatataaactcttaatgaaaaaacatccatgtagtgttgtcctggccttgattatctcagtatttcagagaagcacatgctcatagaaaggaagcctcaggtaaatgacaactcttgctcagcactgggggcagcatagaggatgagggattgaagaaacaagcccaactgctatggtataatttgtcctgaggttttggaagacattttgcatataatcattaaagctaaaattaaagatatattaaagccaaaattaaagatattatttgctgcttaataaatgatatatgtcttataacttcattaaggatggtgccttccttaattgttgcatccatgagattttcagtgaggtgcatattaactgcagagataataatgtttctatatgttaataattttagatggcaaacacttaagctattttgcagccacatgggaggaatcatttacatctttaaaggcttgttttaccattaaccccttcatttgagtacagtggatagccatatgtaaagtattaatttttttttacattagtgctaatagcaagtattttagacccacttgtgtgaaaagattaaaagccacagcattaggcatgcaccaacatttctgagattaatccttgttagaccaccctaacaggaacatataacttgattttctatttattgatcagatgcctcctggttcttttatcgtgtgaaatgaaactccacagagacaatagtatattgcattaatatgctgaatttaaaaatgcaacaccatattaagttggtctattttgccctctctacttttaataccacttaatatcaatacagggcataaggggatctgtggaaataggatacatcctaaatatttgtcattatgtcccagattacacatgagccactcatgcatcttctagtcataaactaatgcttgaaggttatgttaacaataaagttatgagaatatttcctaacgcagtccttgcaacacggggagtgatgaatgtttatgaaagaatgaatgaatgaatcagaatacgttttactacaactaacacctgtgtagtaactattaagtaccacgagcactacttctaggtttgcttatattatctcatttaatcattacaaaaaatcctaatctcagtgctattaaggatcttattcttgttttgcagatgaaaaaatctgtagtaaaagatggtaagctaacttgctggaaagtagcagagtcaggactcaaacttaggttctggctcggatttgtctagcacagtacgtgatgcattgtgaatgtttgaaaactgctgtgatgatgtggaattggaaatgttatctgatgtatagaaaaagttatttaatactaattatagaattttcaaattgcagttgcatggattgcccctgtaacctcctagaacaccttatatttacttgattttcaacaataagatattttattttttctctctatagaaaaataagatttgtgcatttttgtataaactcactgatacggtttatcacccaaatgaaattctctgtccccacccaactctcatcttatagctcccataattcccatgtgttgtgggaggaacctggtgggaaatgattgaatcatgggggcaggtctttcctgtgttgttctcgtgatagtaaatgggtctcaccaaatctgatggttttaaaagcaagagtttctctgcacaggctctctttttgcctgctgccttccatgtaagatgtgacttgctcctccttgccttctggcatgattgtgaggccttcccagccacatggtactataagtccaataagtctctttcttttgtaaattgccctgtctcctgtatgtctttatcagcagtgtgaaaatggatgaatacatctattatcatatgtatgtttgtacatacgtacacagacacacacacacacatatatatatacacacacacaaacacaccgatatatagttacaaatagagatatgaaactaaaactggtaatgtctttcctctttctgacatcacggttactttgcattttaaagctccccagatgtatcaatgtacttggatatatgtattttgtaagcagctaatcatgatttgagcaaacaatgaattctttaattgcttaaaaataggattttcacatgaagaagttgggcaaaaaattgtaatckttatagagaaatctgaaatctgagatacaaaaatctgattccatctgaaatcatgtactgaaatcactatggagtctgtttctgtagttatttgatcatatgtccacgaagatagctttgctttttaacccatcgcgtacacagttttcagtatttagttctgtcaatagaggacctggaagcagtgagggtaaatgaggaggaatgatagtttagatgtgttctttcctgaaatgccagttgaattaaatctttcattcccactgcaaacatgcaaatctataatctcctttcaagatgaatccagaatcaggagtctgcactcttttattcttggtcaggagattaaaattgatcacaggtcacacaagggagtcggctgtggtatcacagctcaatgtggttaacgaggacagcacttgccttctgttctccttaaccgtgcacttacaagttacaaatattattgattccaggggttatctgagggtatggggggtggtgtgacttgacaatattttgctgtttttaagggataagaactatgaggcctgataacatctgggacakktatagtttaaatttgtcaaatgaagatttatacttttttgagctggcagaatccttcatgtagaaataatgaatgaaaatttgatagttgatttaacataggccaaatgacttgcagtgaaagaagaaaaataacactttaattattacctctttctcaaaatgaattgatttttgtcattgtagatctgtgctttaaacaaatgagtagtgcttagaagatacttttacaagaygccatttaagtttaagtgggtgtggcttacctaaaatcattccaaaatgtagtgtaggtgggatgataggtaagtaattacctactaatctttaaagcatatttttttctttcttatgaataaaatagctatattaacattcaagcaccacatagcattgtatgccaaattttcagactaggttaagcttcctttttctctctctaacaataaagattaaatgctgccctaaagtatattttatgaaatgatggaagaaacgatgtatttaacagtttttgctattttaaatctgtctttgccacttgtctgtgagattatagaaagctttttttactgccttgaacctcagtttgtcatctgtaaatgagcataaggatacctagtccatagtgtttttgtggggctcaagtatataagaaatatttttaagtaataaatcactttacaaatgcaaagttttaaaatatttattattactgagcttgtataatgttgagcctatatttaagacagttagtggtgaaagaccttctgaattagattctctctctttttctttatcttctgtagaatacattgacaaaacagcaagttagggtttcaaaagagtctagattgtggctggaatgtaaactgattgaactagacttcattgccggtagtggccctttatacagcctggtcttagaggatgaatcacatggcttagcattagaatatgccttctttaaaaaatataaacgtatttacaaatgattaaaaatggccctaaaaccatatgtcatcatagaaattacctattcagaaactgaaaagaaagtatcaaagcagactgctcagtttattaaaccaaaggcatttggaatgtaattcattattttacattgactttaaaaatgtgagatttttattgattctgtcaaaatgtatgctctctatactatcattagagtggttcagatgttagtataattcgtgaattggtatgtattatatagtttacagtgaacttaaatagtttctaaacagcaactgagaatttctatttgatctccctaattaatccaccatgaactgttgctatagattcttcacctagtagtgggataaatcaaaacatgactgtttgccaattgcacattaatatacatttatatgtgtattattaaatttatattaaatgcatattaatgtacattttaatgtgctccaattaaaatgaaaataattttcattattattaaatttctcatatctgtctacatgcttcataattcaagagcacttaggtcaggtgaggaagcactaaacatttcatttcacaggtgaggaaactaaggcacagggaagtaagctaatttgccatacatcacaaagctagtaggtagggaaaccgagagcaaacctaggtgtcgctacgttacccatatatttctactgtctaggagtctttatttggttttggtttcagaggtcagaaaatctgtggtagggtgaaccagacgtgaatgtacccttctgtgggatttccaaacccactagtagaaaaacaacacctccattgttcagggctttagttttgatgtatttatttaagattgtaagagaatattttctaaatgtagtttttaatcaaacaaatattacacaaattaagttatgtcccttttatattatttactcagaatgtaactgatgtgcagttgccattactgacttaatttttacttcttgagaaagtgctccagtgcgaatatattctccattgtactgattcctgggatttcatgtgatgtattctccttctggccaattcattcttttcatacttgtccaacattgccactagaatacttccccatgtggctattatagagttttcccctttcttcttctgagttggctcatttaaatagattctaatagttacaatatatgtatttgtgttttgttgcttttgttctgtttaatattctctttcaataaatcttttttgtttatattatttctaaaattaattgtaggctagtggccatgtattgtactgaaaaatcaagaaagatgactcctaaaatcaaaagtgttcttttgaacactgtttgtgctttacagtgtacatagtgttatgcgctgtataatgttttaaatttttgcatccagttttcttctgtgataacaagaaagtttgagctgatacctctctttttttgacttccagcatgccgctttttcctacccctcctcctgactgattggtccttcttcaatatctcctttagcttccttttctctttccttccttaaggtatgtgtgttatcttatgctcccctcttggccttctcttctgattattgtatacgctctccctggattaatgctcattagcatctctgactcccagcaccattttttttgctaacaattttcaaatctgtttatctagacgggatttccctcctgagcttcagatttttgttccacactccattaaatatgtccaaaaaggaacaacactcttcccttagaatctgcccctcttccactatactgaatcacagtgcagtagaagaaggacatgtaataaaaaaaaattagaatggagcaagacatgtgctatgagagaaggacgtataggctattgagatacaacagaaagctgagactcagctttgaccttgccatttataaccacaagggaccaaatcctatgaagttaatgcctaaatatattgagattatatttttattcttctgcatccccactgtcagtatcttagtataagtgctattttttctcatttaagttactgtaataggagaagagaatgaaaacatacctctagggaatctggaggcacagttttgaatgccatatatagaatgtctttgaagtattaaaatttcattcaaaatttgcatctcatttttcagtctctctacatttgtcgtaatatgaacactataatttaagttacttatctttgagtgaaattgttgccccaggagggtaagctgtgtttatactaagctatggataccccctgcaatgccatgttagtggaggttactagtaatcctggttaagaagaagaagagaagttttcctttcttatctggatttatgcagtatccccttatatccaccttcttccattcttattttctgcaaattatttctatatactactaccaatttgtccttgctaatgtacaaagctgattatatcatttcctaaaatgtttcctcagtgtaaaatccaaacatcctggtgtgacttgaatgacccctcatagtttggaccctgcctatttgtcaaatttcgcattttgcttcttcctgtctcctcctatctactcccctcatcataccccagttgttgtcagattgaactcataccccatcatgcccttgtatatgaagcttatactccccctttttctatgactggaaacattaatcttttaagactcagctttagaatgttgtctgcagtccaggtgaagtgcctttgtaactgctcctgtggtaacctatgcatccttctctcatagcaggtgtcttgctctattctaaatttttttattacatgtccttcttcctactaccccagaagctatttatctatatattcccagcacctaatatggtgtttagtacatagtaggtactcatctatgtatcttcatcacctaatatggtgtttagcacgtagtaggcattcagtaaatattaatgaataagtggttaaattaatacctaggatttgtatttccaactgattgtcctcatgattcttaaaacatcaagctggtttccagatccaaaagttgaatatgatagactattttaaaataattttatgcaacaaaaatttcagaactagatatataatgattatacaatgaaactgccaagttttgtatgcttaatcaccaatactcaaggaaatttcaattgggactgaatgttttaaagtgtccatagttttcattgttgttaaagttgtttttatggtgttttatataataattgtgttaaatatcaaggaagaaaaaatrtcaagaaaggtatgcatatgaaaataatagattttttaagctttaagtacatcaagatcagttcatctgttaacattttccatatgccagtcagtatgctaagcaattatcatactattgagatatattatctcatttaatatcccagcagagcagattttatagttgagactgagacttaaaatttaaataactgtgattatgcaaggttaaacagctagtatttatagtgaagtagtatattagttggttctcacgctgctatgaagaaatacccaagactggataatttataaaggatagaggtttaattgactcacagtttcacatwgctggggaggcctcaggaaacttacagtatggcagaaggcaaaggagaagcaagcaccttactcacagggtagcaggacggagtgagtgccagcaggggaaatcacagatgcttataaaaccatcagatctcatgagaactcactcactatcatgagaacagcatgggggaaatcacccccatgattcagttacctcccaccaggtccctcccacaacatgtgagaattaatggggattacagagattacaattcaagatgagatttgggtggggatacagtcaaaccatatcacatatcgatatgaacataaggatgtctgatattaaaaactgttgcttccgcttacactggacccaatattcttacaacttcttttataaacagatattctttcttttatgaacaggtatgtagtgattgttagatgtggaaaatcgcagtgcatttggcattttcagccatagtctgtacacttgaaaagacatttggatatggtatagtgtaattgatttaatgctagagtggggaaatgtgattctttaattatttttgagtcacaggatcctaggagaatgtcatgaaaagtgtgagccctctgtacacaataaaatgcatacttctaaaaggtactctgttttaatatagtcttggagtctgtaaaaaacacagacaaggcccagaactccatttctagatgatttacctattttatggatgaagaaactgaggtgcaaaaaggtcaaacatgtttctggaattgttgaccaagcgcatccatcaagaatgccctttagaaggtgattttcttgtggaattttctgaattcctagaaaagtactgtgattttaagtctcagcaatatgacagtaatactaaatatattccaagtatatttatgcatgaaaatgatttcatattttctaatatctaacatatttcttgtaaaaatctattgagaacagtaatttttttggaaaacttatgaaattacagtaatgacttagagtaaaataaaataaatttgcacagaagtttatcatttaaagaagaaaatgcagaattaaaatgaaataacactgatcgatgaatattatcaccagataaaataattatatggtagcacgacaaatttctatgtttgtgaattacattttctacctataaaattatttcagtatgacagagctattttatgcttacttgtccacataacagttctataaggagatgcggttttgtagcttctcattttaaagatgaggaaactgaggcttaaagtttaattatttatgcttggatttatagctatataagtaacagagccaagagctcattagagagatcttatccttctgaactgagcagctctccatcgtttcacatatatgcctggagaaaatcacatagatgtagaaaacaarttccagcagctaagagagtcacaagcgcgtttgctacatgttctttattttaaagcctgccacttgcttcctcagtcttgcattgtttcactttgcagagctctgaaggccagagcatacatgagtaattcagaacgattcttagctttcatttccgttttaatccatgaccctaactcatacattgtgtttcacctcatttttttccagtactatagcaaaggctagtttacttcaaaggaaactgtttaaatgccattatcaagatgcatgatatgttaacaattattacataaagtttttcaaatacagaatgtttcagtctcacaatatgattgtataatttgctagaacaattactgataaaggggttatcagtgcctgtgtttaagaatttacttgagtaaaaaatgtaaaagtacaatttttaaaaacgccttccagaaagtaactaatacaatacaatgaatgtgagttacatttactggtgattaacactttagtaatacttttgatattacatttttaaaggggtcttcttccttctacggaatgtgtgtttatggtggcagctttaatgmtgtttcctactgtgcagttcaatagagtatgtttttaggtggttggttgagggtttttttccgttatgtatgtcgatggagataagtgttttaattacttttttaatgtctgtgcttttgtatttttctcctctctttccttttatttcctgctgttgagattactgcctcatctccacagcaggtggctgttgcaaatttgttttctttgtaagcctggaagatttattttgtaatataactgttcctttttagtattttattattaatgatttctttactttgggayatagtgtacttacacagtcctaaacagtaatttcctaacactatctaagaactccaatcattaagaaaaaaaatctttgcctgaggcgtattgtttgagatttttgcttacccttacttcacaatgcggggattaaaatttaaggaaattgttttatagcaaaagccaaatgagaaaaagaaacagagaaaatagaagggagggaaataaagaaaaggagaagagaaaaggctcaagagacaaagtatactttaataaataataccataaagcagagtaatgaggataaatttatggctgaaatatgaaattacattaacatcttttctagaaatgtttcaactaaaccaaatgcttatattaaagtataatttcaattattgcaataacttctactaattataagcaaattgcaatattataaaataataatgaagaaaaaggtacttcttttttttgtccaaagggtttgttgttctcattgtgtcataatgtcctatagatagaagaaaagatgcaacagatcctaatatagacatgatctgttataaaagtacaatatactcaaggatattttatccatctccataaagaaagccataattttgttaaacaaaataaaatctatgtattttttccaaatgtataaaggaagtaaaaagtatgagaccaaaaatgcatggtgaacccatattctcattgtgtttgtattaaatcactggacatttattacagataaaaaatcctctataagaatttcaaccactcaaattcaattcatttcatatgtgtacttgtacttcttaatacattcattgctttgttataaagaatatgttcacatcctttctcacctgtagatattctaaattgaagtctgatataagttctaacatgaagttagrtgaagtaattacattggcacgatagaatttgtgtgttttctacatgaagtatagaagccaattgaaatactataacttcataaaaattatttgattattttattctcttttctagtgctttttaaaattgtactgttttatacattaaatacaaagagaaattcagcatgtatcagattttcaaaatgatataataatactcagtaatccacttggttctggacttaytgttatgtgctggtgtacaaaaagaatcttgtgtaatggaaaaaaatactatttaaatggtgtctccattcataacatttttaaaaatgttcttgttattctctaaccaattgtgtgatacacacaattaatgtgtgtggtcacatttagagaaagagtatagacagcagttatatgaaacagatgtttaatggggatttcaaaaatcaatgaaatgaatattattgtgatgcatggtgatctaatttcatatgtgttatattgaatcactccatttttttctgcattctgtctgaacactcagtactaaacgcatttacagcagcacatcgggaagaaaatggggagttttattgagaaaagaaccacaataggccatcattgatctattctctttctcatcaatatatagatcctagaatgataacccatatggcactattgtcccttagaagtaagacataaatcctttgagtgatctttaagtgacagatgaaacactttataatccattgtggaaytgcgacatgcttagttagacacttgaaaggaatattttacttccatattgtaatctcaactgcttgggcttgaatcaggaatagcttatcttctctaatacatatataaacatatatatacatagatgcatatatttatgattttctacctacttttacacatcctgtatacagccacccaaatggcttatgattagtttgcaatatcttctttatttgaaagtgtttattatgaatctctttatcatgtaagcctttttcccccatagtttttatattttaccaaagacagtaataatgacttacattttaatgttattttagatttaccagcatgctttatgtgcacttttctacctaattttccaaagaaccctgtatagtaagcagggttgtctgcattctaaaatcaaggagtttgaaagccacaggattaagcaattttattcaattacagttagaaaatggaaataatgagattagaacccagttctttagaccctaggtcaatgctgtctgagacatgattttgttcttaatgctccaatttgaatgacactttgagcaggagtggactttatcttgctgttaatactttccttgttttgatgcacatgtagctggagttcattgtagtctatagaatgaatgaagttagaataatactcttatgtggctacatcctttcattttagccaaagatgctaagtttcgtggactgtgatactacctatccaatactgaccacttaaatrtgtaataatataaactgtgtatatcatggattagatgatcatttaacttatatgtactcaaacgtatcatttcattaagtcaaacaaaggctttaaggaagcaaagaaaattaaaggaaacatttatttcacatctgtgcaaagagctttatatacctgtttttcgtgttaattctcccaacagtcctgtgatgaggaagctgttgcccagaaagtataatttatttggccaaggtcataatagctagtaagtgctagaactagaattttaatgcaggaagtctgacttcagagttttcagtcctatccagtatactgtttacaaataattatacaaataggtcagtcggccttaagatattttataagatttaataaacaaaaataaagacaaaagttgttacatggatttttcttttactaagacagagggggaagttagcctggtttattccataaatacatgtttaatctgtatattttaatactgtccctaatgcagcaccatttcccaagccagcattagaaaataaggactgagtaacataacatgtgagatctcacatacaaaagtactttggaaggtgaaaaacttacggtatttgccatcagctacattttgctgatctcatccagaaaacttgagagtagtgacaatcagtgttgttttatttgtctaccaaagtcttattgaaaaagcacctgtgtgaaataataagaattggtgttcctgtagagttcagtatactagagcattgtccatttgtttttgtttttgtttttgtttttttgagacagagtctcactctgtcacccagsctggagtgcagtggtgcgatctcagctcactgcaacctctgcctcccaggtgcagcgattcttgtgcctcagcctctggaatagctgggattacaggcatgagccagcacgcccggctaattttttttttttttttttttttttttttttttkgtggagatgggtttttgtcatgttggtcaggctgatctcgaattcctgacctcaagtgatccacccaccttggcctcacaaagtgctgggattacaggcaggagccaccgtgactggccagcatcacccatttctgtgagccacagcctttggccagggacctgaggtagtttctctgtggtctgtgctatcttcttcacacctgggatttgtgagtctatctccaaagatgactgtctttctcatgatggcttagctgtcattcagatgaatcctttcaaggacaggaagcatcacacaaatgcttgcatcattcagttaacactaaacaagtggcttggtgaagtaacacaagcaaacattatagaatctgagtaattcttaaacatgccctaccatagctatgaaagcaaagccttaaaagcttttttttttctcttattacttcctagattttaatatgtaacagaacatctaatatcttgttcatgttaactgaagttgtgcaaaactttatgtgagcacaaggaaagaatttactatatatactgctgttatttattctgtagttgttccagagggaggtgctttggcaacaatgcaaggatacacatttcaaagaatatcaaatagtgaaaaataaccaggatatacccaagaggaattcacttaagaaggaaaacatttcagaaagggattgtactggagaaaataatcacaaaacaaaaatgctgacaagagaagcagccagtcctttctctgtcactagattggaacctggctgcagacacatcctgtgaggtaygcatatctgcagccttgtagagaaacttaatacatacatgttgaatgattactttagataggaytggttatgtagcttcacattataacctggcctagttataaccttaaacatgaaaaaggcagccattttgaactcataacatagactctacaaccagtgtccacgttagaaattggcgctgcttcttacatgttctgtgatccttcagcgagttacttaatccctatatgcctcaatttcctcatrtttaaaatgtggataataacatcagttgyctcatacaattattttgagaattaaaatgagttatataataatcacctgggggccaggcatttagagtagtgtctgtagtcaataaaagttaatttaaattttctgtaacataagcaggatccttccttccttccttcgttcctccctccctccctccttccctccctccctcccttctttttcagagaacgtgaaaatcaccatttaaaaataattcttaaggaggtgttcctttgtataaatgcatgctaaaacaccaaaaacttcaataactattctaaagaaacaaactatccggcctccttgaaagacaaagactatacatatctactacgctgaactgttttgtttgtcaaatctttgtcaattcatctttattcataaactctctttttcacactgaaaggtgaattaaaaagtcatttcagtgtcattttgaaatcatcctagtatagacacataccttatttattaatatgccacctactctcagagaagtcttcctttgatagatgactatttgcaagtttcattttctttcatatttcacttaaggttgcctcatttttctttctttgtggaacttgatttacatatgctaaggtttaatactttatttttatttaagcttttattctttccttgccatgcaatatgaagtatgaaataattgataaattatagaataaacctatcttaatattaatagctaatgtttaatgagtattcacgatgtgccagctctcaattatatatatggtttatccatatggatatatttttaatattttcataattttgtaatttttttaacatttttaaaaaatctcacatccatgagagaagtagaatttttatctctgtttttagaaatgaagtagtggaaaatcaatttcagggttctccagaaaaacataattagtaggatggacagatgggtagatagagatgacttattttagggaattgggctatttaattgtgggagctggtaagtccaactccttagcgcaggacaggagactggaactcccaagtaggagctgattgtgcagacttaagacagaatttctccttcctcagggaaaccacaattttgttcttaaggccttttgattaattgattggatagggcccacccacattattgaggcaatctccttaaagtcaagtggttgtagatattaatcacatcaacaaaaggctttcccagcaatacctaccttagtgtttgattgactaacgggtgttatagcctagccaaattgacatctaaccctaaccttcacaggattcacaggaacttatacaataccacagaactggtaaatgagagaggaaggactcataccaaagtctgtctagtgacaaaatccctgcttctgatcatcccacagcactatgattagcatagactatcaaagtatccacatggagaccttcagatgcactgtccctggccagaagggatgacctgtcacccaggtagaggaggagggctccgtggaccttgaggccctatgtgtgacctggggtgtggctaaataaactggaaagaaaagctaattatatgtagcatatgtatatgttggtttgaatagtcaaatgtagacctaacttcagtcttcttttaacaggtttcagaagaaatcattttgtcattagagagccttcaagaacatattcagctatttttaccaaccccatccctccaacccaggttttctaaaagaatcacataaacggccacccatttatataattgtttctgttactaatatacctttttatgtcataaaagggggaaacagtcttatccccatttcctttacagagaagctgaggcaaaggcaggtgaggtggctcccctaactatgctactacataatggaaatcattttgaaagcaaaagttcttttaaaatcatttatgagcaaatgctatggaaaaggagattcaggggatgctggatggggaagaaaaatgtttggtttaatctgaagagacartggtggtttattgctgattacaggcaacccacagaaaccttcagctttcagatcagatatggcacccaccttatctcatatgacaaaagtcatccttcggctatgcttattactctgtatctaccagcaaatgtccattgcccttcatttcattgtaaaataaactcctgcctctctagaatgacccattggtrgaatgagtcttagtaataaaataaaactacatgttttcccctgcatttatggaattgagatgaattatttctctacttgccttggatggggtgactgctataagattttcttcatttacactttggaaaaaatttagtctgccatttrttttcctttcaaagttttggtaagaatttactaatttatagttgatatatgtacaatgtagaaaatttggaaaataaggaaataataaaaattggaatatccttaataccaccactctaaatgatctctgtttagattacatggtttatattaatacatttttttacaaaatttgaattatactatacagagttttgaatcctgcaggttcatttaagactgtattttgattacaatcttataccatatttctcaaatattcgttctgttgtctttttcttttatacggtaaaactaatttcttcatttacctgacattctggtactctctcatcttattttcctctttctgtattaatcatttttgtgcattaaacctttatttgcatgtgtcagtattttcttaagatagatttaagactattttctagatattgaacaccaatgtatatttccactgaaagagtatgacaagttccatgtctacccttggtgtatagtttaattttcttaaatatttttctttttatagagaagttacaattttattcttttaatttgcagtttaatgacttaatgragttaatatttttagtgcttataggtgatttatattttttcttctcccaatttttattattctttatgtttccattgaaaagctaatatgttccttactgatttggagaatttatacagtaaagacatttaattattaaaacatcttcttggttaataattttcgttttaattcatttatattttttaaatttagcagtggttgaattattgtggcaaaatacattgttttttcctttaatttttttctttcattaaaaaagaaatgattttacttattcaggaattagataaatatgtacccatttttaactttttttatatttagtactttaatgtagctgaaactgacttatttatgatatgaggcaagaatataacctgattttccctgtaatgttatatatgtttatgtgtgtatatacrtatgtttccatatatttataggtatacattaatgtgtgatttacgatgtgtacttggttatatattaaagatatacataatatactctgagatccgttagactgtattatgtacattttatattgatttgcttacagatgttttcctctaagaatgacattatttcaaagattaaagttttcttttttgttttaatatctaataggaaaagcccctcctcctgytaatgatattttataaatttgattacttaggtttgccagaacccaataaagatgccatcttccaaggcctgacgcaggaccaggggttttatacatccaaagactttttgccacttgtagccaaaggcagtaaagcaggtataacatattgtcttttatgcttaatagtgagtatgctattttatttatgataaattaatatcaaaatcaagctcagcagcacattgttcagctctcacacccaaccttgcctaagacccaaatgtaaaatkaaaaaaaaaaaggccgggtataacagtttgccagaatcatctgtttgttcattcttccaataaagtatcatcgtaaggaattttcactgtaatatatatgtctaaactacatcatgaaaaattgcttcaaggtaagcaagtccttaacaaacattggaagatgtttttcaaagaaatggcatgaatcgtcacatatcttayatgatttgtatctacacaggcagaaagattgactgtcttctcttaaacagtaattttatgatgttaaaataaaakactttgatagacaccctatcactttatacaccccaagaagaaccacctgaatgaaggttgtaccttggtttggcctgaccagagtcattgtctttggggaaaattgtaatattttatccaaagtcagataatctaaatccttcaaatgtatatttttaaagaggtctgagccacagctattcctacattaattacatgtagaaatgatacaaacttttatgcttctcccaggacttaaaacagtaagaaactttctatattaaattattcttcagaagtttacagctaaagatgcataccctctccaccttctgcctctcagtagaactggatgtttgtatgtctgaaaccctttctgaggaaggtcatagtgcacctagcttgtatttgaaaattacagagtgtcccaaatacaaaatcttccaagcaaaatgattacacttattgaaattataggtttattctattcttggtaccatttaaaaaattatagtaattgatcttataaacagttttatttaatcttattatacactgctacctaacacataaggaatacttgcattttactttttttacaaggatcttcatatggacagcaaatcttaatagagatgaccttgagaaatggatgcttagaaagtcatatttcttttactgcccagtttcacaaacaaaaccagaggaaagcagtgaaagggagaaagatttatttgaactatttcaagaaaatagttctcagaaattcttcagttacataaaggacacttattcagcacgttaatattcaaagttaacaaaatatataacagaggtatgtgttagaaattatataaggtaatacataaaaaagtattataatgaaatattgcaaaccgttaacacagatcataaggatcacttttttcttctagcaaaaggaaaattatgctgagttaaagatagatagcacaattttgatgaagagagttttaattgattgattccagtctgttatgacctaaacttctcaaaatgtgttgtaggaatcctagaagaaaaaagaaactaaagatactgactatgaaattacatatatgagcatatttttaaaatgggaataaaactgtctttcaatgaagcagaataatttgatagtgacacttcatcctggaaaactgcaagatgcaattttacactgctttgagtacaagtatcttttgagctgtcatgcagaaatggtttctctacttgaaaatggggttttcctttcatcattcaggaatgtgcgcctgtcactctccattgccatcgatacggggagtcgtgattgtacttggagctggagacactgcctttgactgtgcaacatctgctctacgttgtggagctcgccgtgtgttcatcgtcttcagaaaaggctttgttaatataagagctgtccctgaggaggtaaaatggaaccatcagaaaatatggagttgtactccaacagattttaggagatgaaactgttaatgtttaaatcgctagaatgttgaaattgtcaaattcaagtttaaaaatttcagggctacacataattgtttcttttctaattcagacattccaagtaaaagaaaatttgtaatactgatttgggtaaaatgagaaatttaatctttgtcaatactcaagggcttcttgttagtgttaatatgcttgaaatgtattctatgtaactagtaacaatgtaaagtgctaagtcttccatatcctgaatagtaggtactcttcacaaaatgtatgcatattagaagaatgtggtaataagacacatacggaattttccgtaagccaatttacagactgcattctaagatgtataccttggtcatactttcagtcagttcattatttgtgaagcaaatagaaagaaaagggtgtcatgtatatttttaaagtgctctaatataagcactactcaaaattagtagttagttagcatactaaaaataacgtttggctgtgcgcggtggctcacgcctgtaatcccagcactttgggaggctgaggccggcggatcacaaggtcaggagatcaagaccatcctgactaacacggtgaaaccccgtctctactaaaaatacaaaaaaattagccgggcgtggtggtgggcgcctgtaatcccagctactcaggaggctgaggcaggagaatggcgtgaacccgggaggcggagcttgcagtgagcccagatcgtgccactgcactccagcctgggtgacagagagagactctgtctcaaaaaaatagtaataataacatgtttaaaatcatttcattcttaccagtgactggtgagtagtcttgggtgaggtatcggctatttacatgtactacacacttctcaaattttaatgctattagagaaatataataccttataaagaatattagttctgagaacaagaaccaaatgtatttatagaaagataaattactcatttaaatcaaatcagtattatgaacttgacttgcttcggaatgcctgaatgtgtttggagtctctatactaggcaagaattatagctgtagtcaataggtaatttgtcatatgtagattacccacattacaaattaatcttaccaaaatatcagggtcaccattggttcatggctgagtttcaaattccacgtttattatctggacttttctccatccaatctaccctttttagacttttttataaaatccaaggtagtttttatgatcataggtttcttttttttttttcctggratacagtcttaggcaataattagtgtaatcatggtttttttttacacatagaaagaaacattttgatctttgtattcctgtgcatagcacaggacctggcacatagtttgtacttgagaaataggttttgaactaaacattttaaatattaagtcttatccttctgattccaatgttagaaaagtttcattaccaaaggtgacttcttgagggttggaaggggaagatgacactgattggcaatatcaatttacttcacattttatatcatagtcatcttccatttgcaagggtcactggaaatgaatggtggttatttcttctgtcttaggtagaactaagacacaaacaaactgagaccagataagaagagggtagcggtatgaatttatttattcattcattcattcatttattaamactacatttactgagcatctattatgtaccaggtattgttctgggcaacttagatacaacagtcagcaaaccagttagaatttcatgccctcatggaatttgtacctagtgacagaagatacccaataattaaacaaataaactgtcacataaataatatattgaaaagtaattagaactgtggagaaaaattaatataggagtataatgagtgtgtgagagatgaggataatggtggaagagaaggcagggtttgccattttaaacagggtggccctggaagacctctccgatgagatgatttttgaacaaagagatgaggaagttgagggaaagtaggcatccaggagataaacattccatggcaagctaaatgccttcaccctttattgtggaagtcttctggatttgtggaatagaaaaaacgccagtatcatcagaatagagtaagagaggacagaatgtggctgaccggattatgtattgtaggcattcataagacctttagcttttactctcattgaaagagaaaaatcactgggctgctttgaacagagaagtgccaagctctgatttaaattttaaaatggctactctgctgagaattgactatagtggagtggcatcagaagcagagaggctagtcaggggctaagtaaaagagtgagctattggttaatgtgagtagattacaagaagcacaggatcagagtagaggcatagcaccttggaaggccagagctcagctgcctgaaacttgattaccaaagtgttgagaagcaacagatccttgagataataggtaacctgcctgcagtagagcttagtagaactcaaatgggtctggtcttaattaaaactagaagaacaaatgttagattgtttgaattattttattattagcttacaattaaccaaatttttatatgatattaaaactaattgaccttgagcttcatgagagaaagggccatgatcatctctctgggtcacttttaccttccgcctgtttagcamcttgggtgctacctataaaagattcaaccaataattgtggaatgaatatttactggagggaatcagcaccgaaggctttctagcattacacgggctaataccttccaagttagataaatattataacagtaggcctttgaaggttcatctcataattataggcaaaatttcttggagagatggaataataagtaatatatgattagattatgcaaagttttcaggattgattctcttaccaggggtaataccatgtaaggactgggaacttttggcattcatagaagtttcagtgttaatcctttatggycattgcttggttttgtatacatcaaaagaggagccaaaatattgcagtgctaacactcatgaaactggaaagtcaggagagtacaggtccaatatcattatctactttaagatacaggttttgaaaggttaggtctagcacataatttttagccaatatgaagaatttaatattggccctaatttcttgagtaattgtcttctttctcctacactgtctcccctagtaaaaacttcagccacatttggtttctttagagtcagtgaagattgagggacagggacatttagagatgtcgtcaaatatgtgtgttatttaatggtcatggactcttgggtgtaatttggaaatagcatggtttgtcagtaaaatgcctcaccattaggcatgtcaacatgtatatgtctgatggtgcagtctaattctcattctctgagtgagggaaatacagaacaatatgaagtttacttatcctttagtgacaaatatgaattatgacagaagccagttacatttaacatggtttattagtccattttcatactgctgtgaagaactgcccgagactgggtaatttataaaggcaagaggtttaattgactcacagttcagcatgactggggaggcctcaggaaacttaacgatcatggaggaaagcaaggcaccttcttcacaaggtggcaggaaggagaagtgctgagcaaaaagataagagccacttatacaatcatcagatctgtgagaactcactcaccatcatgagaacagcatgggggaaccacccccatgattctcccttgacaggtggggattatggggattacaattcaaaatgagaattgagtgggggcacaaagcttaaccatacacatggaattgtttgagaccatgtatattatgtggttagtaaccaagaactatatggttagactcaggaatgttttaatccacaaaagtaggagacatcatccaatagactctgtagtgacaaacacatcccatttctctaatgtagaggttttcaaactttagggtgcattaagtcacctagagggcttgttaaacacagattgctgggccctgtccctagagttgctgattcagtaagtctggggtgggtctgagaatttgcatttttaacaagtttccttgtgatgctgaggttgctggtccactgctctgatgtatcatcaacatgctttccagctgtctaattagagtcacaaacagtgtgctgtgtggaggtactttccatcttggctaagaaagcattaatactaaaggatataggtttgatgaaatgaagatatgcaggcatcatcagcatattgatgtaattctgattccaagtgtctttccagctcccttgtggcctcacrcacatgctaaataggatgctactgacaaactagcgcttctcagccatgggtccttagggaaaccagccaatcactcgacactatcctctaagaagatgagggaaaatctgttaataattccctccagtactttctgcaagcttaaataggtgagattaaatttcacaggataacagaatcccccaaaatgctggtattaaaagctgttgacagatcagatagaactgcaaggatgctttaggcagttgggaatccctaaaaggaggcatgaaggtcagaactcaacagacctgctagagttgataaatttaaaggataaggttagagaaggactttatatttcttattaattattaccgagaagaggatggtttcaaatttacttttaatagcacaatcccacacacaaagtatatttcaaagatctgttatttacatattcaattttccaataggagcaaaacacgattgatctttaattctgctgcatttttatggggcctgcatgctacccctggtacgccttagcttccctttgtttgtttgtcaaaatggtaactgatttaactttggtatgtcagtttttacatgttttagctattgagagggttaactgttttgataattaatgctactttattattttaattagaaaaataacaataccggattgctcagtctgttcatcaaatttttcttcatctggtactacaactttgaaatagcacaacatttaaaagaatgtgccttttacctgatttttttccaccaccacacagcataccccataatagatcatttttgtggcatgacctataggcctcttctcagatatttttaatgtcaaaggaccatgttaaagctatgtctatggatagttttgtcatcaatttcttatggctaaacatgcttttttttttttcttttttttttttttggagatggagtcttgctctgtcacctaggctggagtgcagtggcgcgatctcgactcactgcaggctctgcctcccgggttcacgccattctcctgcagcctcctgagtagctgggactacaggcgcccaccaccatgcccgtctaattttttgtatttttaagttcgaaacggggtttcaccatgttagccaggagggtccccatctcctgaccttgtgatccgccctcctcggcctcccaaagtgcggggattaccggtgtgagccaccgtgcgtggcctaaacatgtattttctacagataactgatgttttctagttttaatttaattacaacaaatatgaacctgggactatttttagaaaatagcccccataagctgacaaatttaattttatttactaaaagtgatgcttacagcagttcttcaacgtttggcacctgcacgtcatttgagttggtgttcttcatggaaggtaatcagagacatgttgacatgatttgctctctgaaggtagctgaaaacgaacactcacacaaaatcttctctaggcacaaaaagctaattaacagtagttaggggctcccctggtactaagatattaaagtacacctttaagactttatgatgacagggggatgacacattccaaggatctgtatatatttatcttttggaaagttgtgaaacttcagtgtagtatgaaaaggtagaatggaatagtcaaaaaggaattacagttggagcacttggttcttgatttacattctagtctgagtatgcccatctataaaattagtgttgtaattatatgcttcttaaagttttttccattcctcattttatatttttaacattcagagaaatatatatgaatgatgtggaatctggacaggaaggctctatttcttcacagagtgacagctctatactgaaaattttagaaatgtgtataaatattacacttaaaacaaattgcaattaatgtatccccagccaattggtgaggtaaaatctaccatattcaagacatgagtataaagaaactgacaggtgaaattgtcagaattctacagtacatgtgataattcagatggtgagtggaaaaaaaagaagactgcaaataggccaggagccaacaaaagcttgtgcccatttaagattacatattttaaaagcataactattttcaaaattctgaaggaggttgttgcattatgttgaccaggaatatctgaggagctgaaaattatatgcttttaagaaatctttactaatcttctatatatatttttttcacagcatatatatatatatatatatatatatatatatatatatatatatatatatatattawgtatgtatgtattttcacagataagcccacagattcattaaaagtgaacgttttttacctggtgtgtcactgtcaggccttatttaataacaacaagttgttattactctattaatttttttttcattttagtagtttgtaatgaaaattgtatataagactactttattcctgcaccatctctatcgtttctatcttatgtttgtcctgttcctttcccacttggtgagatttggctttccattcaaggatcttttgtgggtttttttcacttccaacctaataaccaccttgctggggcaatgcccaaacgaatagttgtcctattagcccagtctttttctgctgcacccgttcaatgtaaatgacataattcttcctgtaaccttggaccactttgccaacttgctgaactttttagtgtcctcacacaacctgaacttcatcatcctttcagatgggcatggatcaaacattgtacttctatctcagctctttggaaagaggggaagacataattgttctgtgaacatgggaaggtgcattgaaataccttttatggttctttcttgctgtcagaagtcacaaaggagttgaacttccctttggccactgcctggcaataattgaaagtgggaagagatctgtatgctctacttcattcatttttaggtgaacattagaagcccctcttcatttaaaaatattcacctccgcttttcaatatcttttcttgtcctataaaatgaaaatattaaaaagtaatttgtataatctattaaacacacattagtcaatgtatatgctattcgaaagacataaatgaaaaatacacatgaattaacataaaaacaaagaattgtcattgttttaaaagtgattttttaaaaaattttaaaatttttttctaaaattctaaattctaaaattccattctaccttttcatactatactgaattttcacaactttcaaaaagataaacatatacagatccttggaatgtgtcatccccctgtcatcataaagtcttagaggtgtacttaatatcttagtaccaggggagcccctaactactacacgtgaactcatccttcaaggtctgctccaaatgtcattttctcttgaaggcttccttagttccctaccaatttaatttctcttttctgtgggctttttatgcttcctgctgttaatagaatttatcacatagggtacttattactttatacttattccataaactgaaatacaagcttctttattggattgatgaattcaacttggtatctgactcaacatatagtgcagcccttgattcaaggtggcagaccagtgaggcatgttgaattagccaatatattaaargcattgaaaacttcataggaagactttaagttaatatgaaattttcaaaatatataattttacgtatgtacatacaactcaaaattatttctgatagcttttaaataagtacacattttattttatttctttattattattattattattattatactttaagttttagggtacatgtgcacaacgtgcaggtttgttacatatgtatacatgtgccatgttggtgtgctgcacccattaacttgtcatttagcattaggtatatgacctaatgctatccctcccccctccccccaccccacaacagtccccggtgtgtgatgttccccttcctgtgtccatgtgttctcattgttcaattcccacctatgaatgagaacatgcagtgtttggctttttgtcgttgcggtagtttgctgagaatgatggtttccagcttcatccatgtccctgcaaaggacatgaactcatcattttttatggctgcatagtattccatggtgtatatgtgccacaaaaattaattcaagatggattaaagacttacatgttagacctaaaaccataaaaaccctggaagaagacctaggcaataccattcaggacataggcatgggcaaggacttcatgtctaaaacactaaaaacaatggcaacaaaagccaaaattgacaaataggatctaattaaactaaagagcttctgcamagcaaaagaaaccaccatcagagtgaacaggcaacctacagaatgggagaaaatttttgcaacctactcatctgacaaagggctaatatccagaatctacaatgaactcaaacaaatttacaagaaaaaaacaaccccgtcaaaaagtgggcaaaggatatgaacagacacttctcaaaagaagacatttatgcggccaaaaaacacatgaaaaaatgctcatcatcactggccatcagagaaatgcaaatcaaaaccacaatgagataccatctcacaccagttagaatggcgatcattaaaagtcaggaaaccacaggtgctggagaggatgtggagaaataggaacacttttacactgttsgtgggactgtaaactagttcaaccattgtggaaagtcagtgtggctattcctcagggatctagaactagaaataccatttgacccagccatcctattactgggtatatacccaaaggattataaatcatggtgctatgaagacacatgcacatgtatgtttattgcggcactattcacaatagcaaagacttggaaccaacccaaatgtccaacaatgatagactggaataagtacacattttattttaaactgttaaaaaaaatattgcgtcacatttttatgtcaatctaacattaaaagtagactgaaaaaagtaaattatccctagttttcagtctcttaaaagatacctgagaactaaaaaaaaaaaaaaaaaggaaatacgagcaagcaatatataaaaaagcaaaaaataataaaaattactagaatccgagagtattagcaggtggcagaaaacagatgatcctaatttgtaaagaatttgtacatggaggcattttaagattaaaggaggaactacaaaggcaccaagttacacagaacgtagttttgtgagatactccaacagctgccagggaggcttgaatccatcaaaacctaagatgaagaaaataggtgttaggtttaagaaaacgtcatcatatgtaactaacctgcacattgtgcacatgtaccctaaatcttaaagtataataataataaaaaaagaaaatgtcatcaatagtaaatgaatagtgtttaaaaatactctttttggtcaggcgcagtggttcacgcctgtaatcccagcactttgggaagccggggcgggtggatcacgaggtcaggagytcgagaccatcctggctaacacagtgaaaccccgtctctactaaaaatacaaaaaaattagcggggtgtggtggcgggcgcctgtagtcccagctactcgggaggctgagacaggagaatggcgtgaacccgggaggcagagctcgcartgagtggagatcacacccctgcactccagcctgggcgacagagtcagactccatctcaaaaaacaaacaacaacaacaaaaaatcaaccctttacttgttaaaagagatgtatttaatgatagttgtgtcaagccattttaagcctctaaattattccttacattgcatatctgggttttgcagcacaatagtgacacaataaaattagtaaggactcagttaagggacgactatatttatccaatgtgtagtacaactctcatttggwtaaatgtttctttatrttcaagattcttcaactttaaaaaacttaaaatgaaaacattctatatgtgaatgaagcctgtaataccataccaggtactaaaagaaggaatgtcaatttgtggtctcagcaaactttttttgcctaattaaaagaataattgcagaatttgcttgtacaggccagagattaattaacatataaaaattgttctgcatttcaccactcaaaataaaataagtcaaaaattactaaatattaaaaaactgtttagtaaattaaagaatatgagatcaagtgtgaatgggccgagtttgatgcctcttcctttaccctccttcatgtccttggtaaccaagataactagaagattggattgtgaaatcaaattcatatgaattaaatatcactctgtatcaaactttattattaacttcaaggatacaattaaaaacaaactcaggtaaacaagaagtgcaggaccactgcccacagatttcctcaggttctatcttgctgcattaggatttgctctaaaccagattaacatgtggtctctaagtcatgtaagtagctccatcacttaggtcaaaaaacttgtttcacttatgagacatctaatttatactcagatagttatgtaacttgcattactctttatagtgatctatgccccctaaattcacgtttccaggtttgtttactatagcaatcctaaactaacagatacgccatgccaaaagcattccattggtaaggactcttccacttataaatgacaatagtttgtttcccagtaggatgtttacatattacatagagctttaaccaagctgctttccttcttttcttcttgagataaactcctttacccttccacacccacttcttcaaagagagagaatggattccatacaagaacttcctagtaactaattcctttccagtgattaattcctacttttctttcaagattagcttatatagcaccttttccatgctgtcctttcttttttttttttttttttttttgagacaggatcttgctgtgtcaccaaggccrgaatgcagtggcgtgatcacagctcattgcaatctgaaacatctgggctctacagatcctcccacctcagccttccaagtagctgggactacaggcagatgccaccatacctggcaaattttttaaaaaaaatttagtagagatgaggtttctctattttacccaggctagtcttcaactcatagccttaaacagttctcccacctcaaccttccaaagcactgagattataggcctgagctaccatgcccagcaatgctgcccttccttgatctgcactactgctaggtgaaatgcccatttatgtgccattcaagtacactgcctttacacatgacaaagattcctaacttggccaatttttttttttttttttttttttttttttgagactgagtctcgctctgtcgcccaggctggagtgcagtggtgcgatctcagctcactgcaacctccacttcccgggttcatgccattctcctgcctcagcatcctgagtagctgggactacaggcgcccgccaccaccccagctaatttttgttgttgttgttgttgttgttgttgcatttttaatagagacagggtttcaccgtgctagccaggatggtctggatctccagacctcgtgatctgcctgccttggcctcccaaaggccaaattttaatcaggctcctaaaccttctccaaggcccacctgtgtacttccccataaagtgcagttttagcaagaaccctccattatcaatatctgatgacactttttatcccccaaatgmgagttaaactccaaatacagaatgcggaggtaggaagtaatagccaaggagtaggttgcgggttagtagataaaatattactgaaaggaaacatcaaggtaaggcttaatcctgttggctaaatcaatctaacaggattcttgcagaagacaggcgagggtaagacatcacctgggtcatagtggaggatgaggtacctgatgagatattgaagatgattagatatcaagggtgagggattttgctaaactgacttagcagggttattgctaaatctggattttacaaaaaagcacacaagtgggcttaggaaaaggttcagaaacctgactaaagttgggtcaagcaaataatgtttgtcatacattattacctacaaatgctgattttctgcttctatgagatttttaaggcagagtttattttaactgtagctcacagcactatttttgtacataatatttaacaaatgtttggttagatttatgcatagagsgtgctcttaccacatggctctgaatgtttctggtacatccaataatttaacagtgatgaaatgagataatattttctaggtttatcactggccaaagtggacttctaaacaattttgcttctaaataatatttttaggtttttgtgttcatatagaatggataaatggtcaattagtattagagggtaacctttataaagaatgttgtttcttcatattgcttctcaaactttggcttattagaagttattccagaatttaatatatgctggttttgagctctgctcattatactttataacctattcttgctttgcctatgtgcaatctaaaagtgagttgacatcatgcttttaattatagaaaattaagttgtttcataatttctagagtatgatgcctgtaatattaatcagaccaaatcatcgcattacataaagttaatcattaaaatgatgatcattattgcaagtttatagcatgctatttttatttcactcagcatcagccacatatctttcctgaatatggaggtgaaaatcaaagctgagaattttttttaactttcccactactgtgtaaaaagaaagtgacaacctgatttgtcaaatgtaaaaaatggacccttatagctgcttactactttattggtggagactaggaaaagagaggttggcatgtttgcttgataaaccagttgtccctcataaagacatgctccatcaaacaaataaatatatatgggtgccatgaggagaagcattcatatccagattcagagttactgattattaatgattattgacaaacattagttgttaaaaggcactaacactgacatgtgtgaattacttgtcacagaaggctggttaatttaaacagtaacgctgcatgtggttagaccacaggtcaatttggtccatgttttctgatagcagcataacttgacaactgatgaggaacaccatttgcttttttatttcaacctcgcaacataggatgatctgggcaggtagcatgtcttctgctgtgtcctgttacttacattgggatggakgtttaatagccattcactcagtatactactagttggttgtactttccttaatttgaatgttcttcagattttcataataatttgtccttcattctactaaacaaaactgtattcaaggtctactgtgtgccaatcattttgatagacacaggtagggctgtgaccagtcttgatgccctgtccttccatgtgacattcacttgatgcctcttcgttggcttattgactggcatatattctgatttgctgggtgtctatcttaatgttcatgggcttatacttatcaattgttgactattttaatatcactcttggacataaaggatagaatgttaaataaggtattcttcctctaaagagtgttgagaacgagtttactatcgaacaaacttatttaaattctgttagtttttaaattttgtatcttaagataatatgttctgtgtatctaatatccactttgtgaagtagtacttttttttgttctaaatttactctttatctggattcaaggtgtctctattaactcgtttacagtattgggttcataaatccatcatgtggttcctatatttcatgattttatagtacctgtaaatgagcttagactgggaagcttgagtctcctcttcccacaaagggaactatgtctagccaagcccttcacctttcactttagcttttccttttccactttgctttgtttgaggttcagcaactagaatcatacagtctcattatttcaaatatactacagttgttattcttggacataatgaagatcacataggatttcgtttcagccagatcctaatttcagataagttttttcatcccttagtgtatttttggcttctctgagcctcagtttctcctctgtaggaagaaaataatgcttgtccacagattttttttttctttgtgaggccagcaagcagcagtgtgcctaaggctgtatgctaaatctgtaaaatcatgatgatgcccagtgcggttttggctttttgcaccacagcacggagacaaagtcggtttgaagctaaatactttttttttgtaacaaatatatgggtgtcataacattttctgtctgaagattgagttacaggtaaagcattatatgtattttctgtgtgaagattaagtgaattacctgtaaagcacttaaaagaatacttttaagtgttataaatacttattaccattattatttatcttcttataaaacaagatttatggctgggcgtggtgtcttacgcctgtattcccagtactttgggaggctgaggtgggcggaacacttgaggtcaggagtttgagaccaacctggccaacagagtgaaaccccgtctctactaaaaatacaaaaattagccaggcatggtggcgggtgcctgtaatttcagctacttggaaggctgaggcaggagaatcacttgaactggggaggcggagactgcagtgagctgagatcttgccactaccctccagcctgggcaactggcaacagagcgaaactccgtctcaaattaattaattaattaattaaaataaaataaaaaataacaaaaataataagacaatacttataacaagacaaataatagatttgttaaatagtgaaagtaaatccttataatgtccaaaaatatttcaaagtatatttcacttcacatgtaatgtcaattttaatttaggatctttaagatgagagcattccttcaatgattgggacaggctcaagatggaaataaagattttattacttacagttcctgaaggggtacacataatgcacagaggccacacacacggaggttaggagtgcatggagagagagaaagagaaagagagaaaatgggacctgcgggccagtgcctttatttatgggtccagggcgttatccaaacaggtttctcgtgggaaattttaactggttggtttaaagcaagcaggcacaagttccaggacgtcaagcattgactgagaggcagtcactgtggtgtgtctgcacagtccatgcagggtggagggtcagcaggaccagtccagcaggctgcatctactcgtttcatagggatgtggtgatcagggagcaggtgtataagggaaatatcttgatccaccacactgagaaacgggggtgctgcagggaggtagagtatagaattggaaactatgtgtgtcaagggtgactgaatctttcttctgctataacaaagtccagcttatatttaaaatagatgccaaggcagcataaaatgataagcattcactatacaagtttaccctgtgttttcattgtcctagtatttccctatttcccaagataaatcttaacatgatctcactctcccaatattaatactttccaaacaaatatatatatgcaaatgatattactattttttctttaaacaattttccctttcttatgtaaaatggaaaatctagctatcgagctaaatagcagaagtggtgtgatttatgtctgctgcttaatagtctagttctacatgtactagtgagtgaagaaaatctcyaaagtttcaaaagcaaaaatgcagatgaatctctgtggggtccagtgctcatgccatccccagtgcactgtcggataattggtaagaatgccagatatttgaatacatgtaatcaaacctggggcacatagatgagcatatgctaaagccagtttttttatgtttgtaactatatatggttatacaaggtcctcaaaaatcaaaaccatggtgagaacattactaaacattactaaaacatgcttaggcattcagtgattaataatctttattttaaattcatagaagtttttgatttagtcatgtccaattttttgtttccaaatttaatgccaaatttgccaaaatatataagagattatctatatgtaataacagatactgtagaggtattaatagatagcaaagatagagtgggatcaaacagatcctaaatcgatctgtaagacatattcccaataggtacagcatagttcagtgtttcatttctgccctccacagaaaacagtactgttacaggtacacattgtatattgatttattcaaaccataaacatttggagttgttattcagtcaagtgtggcattatcattaaaatgtagcaccacttgacattttgaaacacaataaactggtttatattgatgagttataaggtgatatgtggcacaaatatgacaaaagcgatacagaaaacatattttacatattggaatcatatttattttgtaatttgaattattcaaggaataatttgccttccagaaatcatacatttttattttgtagaaaactaaagaggagtctaaggtttgtctttgtgctgccttttactaacctttgttattgggccacctttctcttgaaatcacaatcttatttctaagtgatattgaatagctgaagaatgattcagagaaaaaaaaagtgaattcagaaaatagcaactatgagtacatagccttctatatgctaaattctgctttaggcattttacattttggagttgttttaagtaacaccacacataccgattaatgagatggtgttctccccattttatatataaggaaactatcccaaataagcagcagagcagttttcaaatttgattcaattccgcttacctctaatcttcctgtctgaggagtgagcagttttatatcaactgttttgtatgtttaccagcataacatcccacatgttttgttttatattgctaatttcttgattttcataataaaaagggaaagactgtgtaataatttttatgtggttccaatttttaagcctttaatgacaatattaaaaatatcctaaataagacatagattgaatagcttcaaaataatgtatagtatagatcagtgtttcccaaccattttcttcttaccctttttgggagtatctttagatttttttcttaatcctccctgctatgattttaataccatagatatactgtataactgtttacatactttagctcttcttgaagggacaagaccattatgatatctgagratttttttctttcccccaagaattaatttttgctccctaggggcaatattcctgtctttgaaaatgcatcatagagaacaagtgctgagccagtcagctataatctaataaagacagtggttaacaaagtatcatctgtgcactagaagcatagcatcaccttaggcatttgttagacatgcaaatcctcagtccccacttaaccctccaaagttagaaactctgaaaatgggcctgcgcastctggtttaattagccttccaggtgattgtgatgcatggcactagctctggataggttgttgaaagatgggcccatggcttgattacagcattgagttaattattttatgtctcagtttttccatcttgacaaagctcagataactcttagtttgaagcctcatacacacaacctcagtggaaacattacccagggagcctattgagaatctacctggctttcagagtgaaggaaaataataagacaacatcccaaaacacttcagtaggacatttttgcattttttaaaaaaagaacattcaacatagtacttctgattgcattgacaaaggcctggatttctccaaaaacaattaatggaaaaataagcaaatgagtaaacattaatattctgtctcaatgaacattccattatgcatatgaaaacaaacagaaaccgaggtatccagattttatggcaaaatgaattacgtaggaaatggggaagaactgggcattcatcaggaggacatgcttgtttcgctgtcctcagtttttcatttatagtatttgcttctgtggttttataaagggaagaaaaaatgttttttatttcttagttctacagagtttctctagtctttttctcctacctaccattctaatcatgtacttgcacagattggctcacccactttattgacttttttccagcttggatgtatgcaacctggtaataaacagaagtatttattttaatatgcagcatgattaaaaaaagagaccttaatctactgaattgaaaacataaaaataataggctactatggtcagaaacctcacaaactaccaaatgtagagcatgcagtacttaaaacttgagaaataccttatgatgccgtgatctataaacgtccacattacaactccaattcaagactccctgagtcagtgatttacaaaatgcaaataactggtaactgaaactcaggtttggtgaaagaaaaagctgcatattgacttaatatcataagctttagcatgtgtaattcaattagaaatcaaatactgtgtggaataagaaacattttcaagtttcttctctgtyctgttttgttttagatggaacttgctaaggaagaaaagtgtgaatttctgccattcctgtccccacggaaggttatagtaaaaggtgggagaattgttgctatrcagtttgttcggacagarcaagatgaaactggaaaatggaatgaagatgaagatcagatggtccatctgaaagccgatgtggtcatcagtgcctttggttcagttctgagtgatcctaaaggtacagtgctgggagctgaaatgtgtgatgcaattgtctgttattttagtgctgtaatagtttctagctttcagggaattgtttttcactttaaaatttattttcctcttctagttaagaagtaaaagcaatcttgattcaaaaggcttagaaatgttatttaatgcttatatagaattatttttaaagtggcaagtattgaaaagaacattaatctttcttttaagcttataaccaaaacacatattctactctataatgatatttgccttgtttcttatagaagaatggctttttcttcaattagactagagtaagaaaatgaggcagagtagttggaacagccagtcttcaatgattcagacaaatcaaaatctaatgaatggccaaaaatagaatttgtgtttattaccatccttgtgccagatcatcacttcagatgtcagaattatcaaattagaaagtttaaatgtctgtcattttcacctggatggcataaatgagcatgctaagaaaaacaaaatgttttttaaaaagataatgagagaaagaaatgttttatataacatttcaactgaataatgattcagtcaagtaagactactttatgttatacttttcccacatacagtgtttctgtgggtcattgtagatgaaagcttatgtatctaggtactttcattttacaaatccttttaccttttaattcacattattgaaatgacaattaactcttttgttttctgaagggaaaataaaatatgtttttctaggtcagagattcattaagaacaaccataccaaaaatctctctaaacctgatgattcctatgacttcctactatatccatgctaaaattacattttttgtctgaagttggaagagatatatacatgaaaatgtatatttttatgccacagataagtaaaggattcaactagtcatcagatattttatctgcagggcatcaaacatcttggtatgtggaaacatccagatgtttaatgtcatcgagataaatgttttcaaatagctggatgatggcctaaatttgtcactttttatctagacatttatgtggtatgtagacacagtcagagtatagtttatttatttaactgaattcaggaaggaaraaagaatgatatataaagtgcttatattatcttaaaaatcccattcttcttactattaaatactatgtacatcaccaaaaattgagtraaatgttgaatcatgtttaactagcaattctgttgattatttgcctatccaaaaaggttagcttaactatttaaatttgtgttccataattgacaatcctaatattaataataattatattttcctaaacaaacctgaacagatttggctcagaaaacagcttttgcaatctcagatacgattttataagcttgtgcttgtgtgtgtgtgcgcgcaggcatgtgtatttgtgtatgtatgtatgaagaataaaagatttaagttagcatataaaatatgaagaaggagaaaatttgatctattcaagtttgactaggtcatttcagaatttatgcattttattccagaatttactgtgtatatttcttctagtacttcacatatgccacctcttataaatttagagaagtcaaggaaaaaaatgtttcttcgctatttttttttcctcttctggtttgaaataataaactgcctgtagaaattatccttaagtagaattactaactttaccaggagccttccatgtttactttaataagaagttattctccaagtgagaggggagctggcagagctgcagtgtgagatagcattcattcctggactcccatctaaatgttttcagtactgttcttttggatggaaaacattaaataaaggagtcacagaagcagtgtttgttagaatttgatcaagaagatcttactcaataggatttaaaatcttaatagtttcaaagtcagaaaactgtcatgtgcacacatatatgtaaaataaaatgaaaagcattttattggaagcaagwtgtccatttgggtaagaagagaagatattcatgttaatcctcttctaccataaattcttccccatcctaacactatgtcatgtcatttctggatggtacctagtgattatcacatatgtgatacctgttttaatgcattcatcttttaaaatgtttacttctctttccacccctccacttttctccttttcaacctcactttgcccagacttcagtgaactgcatgccaaatgcagtgacatcctttcagtccttagtatattttctgcattttatgattgataatgttaagaattctgtttaaaatgctctcctccaagtcacttaaactttctgaggctcaatttctttatctactaaaaaaaagcgtagtaatacattatctttctacctctcaggactattgtcagaattaaaatgaaataatrtaaaagacttggaaacaaaactagarcatattcttgtttgtgacactctattaccttgctgcttcttttaactattcctttccaagcctatcactgactgcttttcttcctctagctttttactttccaaagttcagaatttgttcattttctctccttatcgtatttatttcttcagtgaaatgaatgtcttgttcattctttcatttatccattcatacgtgcattcattcctcaagayatataaatgaacttctctgtgccagacagtggctagacttacagtaggcactatttcctttttgtgtaaaaatgactcttaaatctagttttccactccccatttcgcagaagacctcctttcatcctaaatttttgctcaggcatgtgacaaacatttactgagtacctaatgaatgccaggtgccaaattatattctagagagtatgaaaatgagcgagtcattgcatgggctttaaaattccatagactagggtggaggcagatctgtaatcaattaattttattacaaagtgaggaatgtgtacattaagagagatttgcacaaagtaaaaaaaaaaaagttcaccttatcagatttacctaaaacagatcttttctcaaattcactattattrcaaatggtaccattagtactccccatagccaaagttcaaaattttaccccagttcaaatttctaattataatatttattaaatgtaccaatgttatcttatactatggtataaagcttccacttctcaacacttgagaacatcagcaaatggccttatatacattctgtgtatccacctatattttcttctgttccctgttgaattattcctgccagcatccagcacagggaacattccatagtggcaacacagaaaatctttggtaaatgcattacataaagacatactgaaaaattcaagtaatgaagtaaacttgacagagtacatataaagtacagtgataaattacactctcagaagtctctggttgcaataatattgtaaatgaaaatacttttaaaatctcaaatatatcaataataagaacttgaaaagctaagctaattggaaaattgaaaggagattacatttttaatgtcagttttttctgaaatattccacaatctttgtaagtttctaaatttgtttcacaatggagaaygtaaaataacttttttagtgttatacacctaatatatctgtaataaatattccctatcataaaatgataagtgcctcaacagcttatagaaaagataagtatatcatttataaaataaacttggataagagtttgggattatagttgctaattatttcgttgccactaaggataataagagtgataagtaatcatcattactttacataattctgtttcttccatcactttttggattgtaccagggagtgggaagtaggaacaaaagactacatattccatatccatgtgcatggaatatgttatgtgccgatcagcataatttaattgaatacttcattaaacactagctcaaattttaaaggcaatggtgtccaatttctgactcaattgatataacgtcagccttaaatatctttcttktgaaaaactcaaaatggttctacttttaaaaagtctcctctattccctctaagaatgtacgactccatatcacgtcacattaacttgggattttgttgttctagatagactgtaaaggctatcaggagattaagcacaaactttctgtaactgcatttctgctttacaaatattgtccattcactggaaagttctaaacgtttatttaaaatatgtatatgtatattttattatacatatatgtataatataaatataatataaatatatgaatatatatttctatatatgatataaatatatatatttcctaatataggatgtttcctcttctgctaaacactattttcaatatttattgaattgaattgtgtttcttcttgtttgttggtacagtgtcaggtttaatcgatttattgtttgttttatagtgtatctctccttctctttcttgttggaaccaaactggcagttgttaagtgggcccaaatttctgttagttttgcattagtaagaattcttccaccctttcactaatctcactgcttcatttttacaaccaaggcaataaggttgcctgtgtcctcacattcctaggagatctggatgacataattttatgatttgttgaatatgctttcagacaactgaatgaatgtactttagctcattctgtgattctgtgcctcctccataccctgtaccacaaccactctttcattatatgaaattttgactctgtaaagatttatgttctgtgatcttccggaatctattttattttcaaattatcctataaaccccaaggagagcaaggagtgcacctttatactaaattgtagtcccaatagcaactgacatattagtgtgcccataatagatccacaaaaatatttgtgcatttgacttgacttgcttcatgttagggtattaattttcttatgagttactattttctcctatgatgggatctgcttggtttatttttcttcgaaaatgtaaaagttagaaaaataattctattattctattgctctgaatttttcctttgttgtggcataaattgttgtattcttcataatacaataaatattacactaattagagtctatctggtatattggctgagagtggggtctctggagccaggctgccccagctggaaacctggctgtcctccttctaacttcatcgtcttaatgagttacttagtctacctgttcttcatggtcctcatgctgtaagggggatgactatagtatgaatatcctagagttatttagaagaaatgaattaataatatatgtaaatcatttacatataggcgtagcatatagtaagcttaagttacagatgttattattaatctgtaacaaaaccatattttagtaattaaattgatttatattaacttttatgtagctattcatgttgtttgggaataaagtcatttgaatatcaatacttcatcaggaactttggaggctctgtcaacatgactttgtaaataagtgaagcagatgctcatacattcatgatttttttaatgagaaawtgttcaatatatttggttagtttttttcctgaaaaaaagattgaacagtctgtaactgtattatatatttttaaactattatcaattctaatgtttttcatgccatcgaaaacaatttttcaactatttttagttgttagaaatctccattttgccaaattttcttgatccagatgcagcgcaccaacatggcacgtgtatacatacgtaacaaacctacacgttgtgcatatgtaccctaaaacttaaagtataataaaaaaaaaagaaatctccattttgaatttctgcaaatgaggtatgtaaaaagcacatatttttaaatgacttttgttcttcctcttagaaatggtgaaaattggaccacatttttttgtttagtgtaaggatcattcatttgtattttaagacaagaaaggcacttttgaattttcaactragtttgagattttaaatgcttgaaaattatgggattacataactaagattaaaaacccatgttttgggaaggaagatgttaggatgaatggtgagggactcagcatcatgttgcaccacactgctcagtagagcggagacaaggtgactgagctcagggcacagccagggaagatacgacccttctgttaggaaaggaatttacgtacttcacccactgcttacattttctttctgctcactcactgggaactagagataacaaggaaacacaaaacctagatagttctgaatcttaaatgcaactctcagaaatcagctcccttgataacattgattgcagttagttccataagggagtgtttgcaggaaaaaaaaaaaggtttttaaatcactcatcagttcctcttattagaaggccctcagaaaagtttttgaaagcctcatggggtaaatcaaacattctgtcaatagcagctttgagtgtagctttgattcacttgcccccatactgagaaaaggtgcaggccatgggttaatttgccttgttctggcctaactcagaactagaaattgccagttaggcaagaaatggcctgctaagattcttacgatgcaaaaattcaagaatttttcaaatgtgtccatttttcttttctcaattgtttaagtgttgggaagagcctatgaaaaatgttttaatgttggcattatattatttaggtattcaaaaatggtagttagctatgttttaaaagacctggaatcagtatgtttgatttgatttactccttattaaaatgtaacttatttggtaatttataatgaaattgagaatgctagaacattttaataaaccacagtttttggttaacatcatgttctatttttcaaacaacaaaacatatcttatagaagctactggtggcaaaattttctttgaacaactaaccactctttatgaccttcagcttacgtaatttctcatatcaaaaataaaggggaagggggaaaaattgaatactaatttgagaaactatcataattcatcaaattttcactgttgcatgcattttaataaacaaatatttacaatgaagtttcaaagaacagrttaaagaatactgcattatattgctaattaggatacctttttgactaatggcaaaacattagaggaagggacttattaaggattaatataagtaagaatgaatgacattcttacctaacattaagaactaaagtaatcagtccggtataatacactggatacaatacaataacttgcattaggattttccttatttatatttctgaatgtgctagaaggaccttagagatcatatattctaatcccctcacttcacaggtttttaaataacgtatggtggctagtgcagrctctttttaaagatacgtttcagggataaagtagtgaaaagagaaatgcaaactttgcctccaagaatgcacattttaacaggggaggctcagaattacaataaattgtactttgagaagtttagattcccgaggaagcacagaacagagtctaagcattcagggaagcttcctagaggaagtgggttgtaaattgaagtctgagtgatgtgtaggagtttccaggtggaacgggggtggaagggagggaagccacagggagattatgcaatttgctcaacaccgcactgttagattaaatagtcattttacagtcattttaaaaagctgtaaaaaatatatgtctttagaaagttgtcatcagcctacttacttcatgcatgttctcatcttcgtaaatgatggtctgaatttttcatttgtatttctaaatagaactttttattttatgatttctactattcattctctcattattcaccatgcaatgaacatttcttgatgcacaactgtgttccaggcactactcaggcactaggaatacagacacaagtaaaagagtcattgcccttcagggacctataggctaatgagagaaatagacatgtaaatacatatatagcaacacagtgtgctaatttgagatcacatttggaatgggttttagagcttgagtaggagttttcctgttacagagaacatcatatacaaaagtatgggccgacaaaatgacctcatatgcccagacaacggggaggcattctgttttgctggaccagatggtgtgtggttacataagggtagggagcaggtagggataagatggcaggaaatatggctaaaatatatgtggagtcaaaggattatatgctaaagtagggattttgaattttatgctgtagacatgcaggtgacaaatgaggaggtttaaataaggaagagctctttgtcttgaatgaggtaattctagcaggtgttagagcttccttctctctgcttggattgtgcaccatttgtaataatcttcaaatagttgggggttagaaaataagcaaccacattttgagatggttcatgttagtaggcaaatgcattttctaacatttggtgacctgaattaggtggttattcagtcacagggtatgatcccacacagtaaatgccgttatgagaagctgacccagtaacattttcagtatcaggggcgactgagaacctatgctcagatgggcagctctcaagttataggtttgacyagggtggattatatatgccttatttcttcttccagattcactaatttggattctattttagtgttttggagagaggcgagaaaggtacaatgcgacaccctgactgttatacaaatgattgtttctttacatggaaggcaacatcaggagtgtggaactacagtgtcagtaattttgggaaagatggcctggaattaagaaagacaagttaaaggattaaaataattttttcagtagttaccgtgactaagttagaggaagtggaaatacaggagaaaatttggaatcaagatatatttcttaagtagaatagtcaggatttggttatctgcttgataaagagattggatgtggggtagctagctgggaggtaaacaggtgtttatagtgctgacagaactcacagatagaagagatctgagtgaaatggtggtgtgttgaatttggatttgctattgaacaactgaagcaggggactagaactaaggaaacagagaatgactgaaaacagacattgggaattagtacacatcatcttcctgtcttttcactactataccttaatgcctacagcaggagctgttcattgatttaattaattaatgaaaggtgttgtagcctatcatttaaataacagcttcttaagagtgtgattaaagagtatatgtggcattgattctggaaatccagaagcctgtcatattccataatatgaagagaaaaaaggtcagcttttgttactgttgatttcctgatggtaaatattttaaggaggttatgacatgaagggacagttttattccatggtactctctctaccacctgttcgctttttaataacacacatgattcctcatgtgctgccatgttgttttaaaatgcctgaataataacattgatagatcctgtgtaccgattgcgaaatgatgaaaatgaactatttttgccttctttgtacagtgctttgcctttaattatattttgggcaagaagaattttcaggaacctaactgaaacactgtacatgtttcaaaaattgttctgattatcagaagtatttttgcttggttgaaagatttatcatctttctattacgaaatatgttgtgcagggtgaggatgaagtggtggaatctagtgtaagtactggcatttctgcagaataactatccaaactaatggaatccttgcacaggttttctttggaattattttgaaagggtggaggtgatgaggatggaggtcaaactgataacagtgttgaaagtgattgggaatcaacaccacatcacttacatctgccttagatatccatttgaagcacaacatgatatttctgtaattattttacttccctctaataactgcataggaataggtttgtttccccagtgaatagctctgctcagagcctttccttatctttattttccaggtttcactactggttgatatcatatgcattcttacagggagacagtggataaatcagtagttttccatcaaattgaagattacatacaagaagtagagcagtggcatgtaacaagttttgttagggaaagaaggtagaaaatgggaaaaaataacgtaattgtttcagagaacagaaatcataaaacatagccaatggttttgaacacacagtgagtgtaatagatgtatttaatgtaatagatacggtgagtgtaatagataaactgagctttattgaccacagcctataatatttttattttaaaaactagttagcttatagtatagtaaaaggttattctgaaacctaacatgctggtgaaatgttaaactaaaactaagccgctgtgagatgtaaaatcaagatgtaagatttaattaaactataaaatgataatatagagtatagtaaggttcttaattatatgtattttgtattgcagagtgagattattattgttaattactttgtgtttctgttcttgactcaaagcacaatataaataggacaacatccctatctaaaatactctggttaaattagatatttggccgggcatggtggctcacgcctgtaatcccagcactttgggcggctgaggcaggtggatcacttgaggtcaggagtttgagaccagctggccaacatggtgaaaccctgtctctactgaaaaaacaaaaattagccaggtgtaatggcgcacacctgtaatcccagctactcgggggggctgaggcaggagaatcacttgaacccaggaggcagaggttgcagcgagccaagatcatgccactgcactctggcctgggcaacagagtgagactccatctcaaaaaaataagacattgatctgcatatatgctattgtataaattagaaaattacattaaatcttattcaatatctactcccaaaatatggaagctactcaattcaaatgtaatatactgccattgttggaggaggaaaccagtattaatgttaacatccatttggggatcctgcctaacagtatgtggattaatgctaaccagtgctaatctttttttcctctttaacaaccatacttgttatattttgtaattctaaagctctttaaagtgttttcaagacttacctgaccattttttccatacaagtatgtgaaagaatggcaagcatgttgcatagtaagtgtttgccaaatatccagtgattttccaagccctcctcaaagtgtatttacaattcatttggtttaacatgacccagtgtttctccctgtatttgcatactgatgccaaatgaactttacatcaccagtctcatcacattactctcatactttggaatctaaaactattcttccctgatggtgggattaaaaccaaatgcttcaatttaattttgacatcctactaatctgccctcctacatacttgtgggatgttacttcccattctttcattctgtatttattatatgtgttttgtattaattatacaagattcttttaggttctctaaagttcacaaaaatgaatacattgtccccatctgcaggagcttgcagtctaataaaggaggaaagatgcatgcaaataaagttacctttaggtagaaagtgactcaggagaaacagataaatttctggtgtaacatacagggtagagagatgacttgcagcagcaagaattaaaaggttttgtggaggcagtgacatttataatagttgaggattgggtaggaattaggagaacagagacagggattgaaagcccattccagttatagtaaacaggctggatgaatacatgggggagtttcttygtctagattataaggtatatgcgaaataatagagtaagggtggaaaaacatatcattgctaattcatgaaatgtttttagtgtttarctatgtgaattttattccagaattgtggtactggaaatctaaagaggcacgtagattaaatatgtttgctacacacatatagggaccatgtagttaaatatgcttctcctttttgattcttgctcttctatttcactctgtatatcttacatattctgaagtatattgacagtaccactgcagggtactttatttatattttaacccaaagatccagcacagtccttaactcaataaatattcaccaaatggatgaatgagtgaagagatgaataaatggttgaatgaaaagaatgaagtgacttattctaaatgtctktactgaaaattaacagtaagggcaaaatcatgtgaaagtgttgtatttgtgaggtgtcatgaaggccagccagccctccttctgttcagggaatggtcagacgctggaygctttctctttgcattgagaatggtttcctaagactggtcatcctgcttctactctcacttccatataatcctaccagaatgagcttctaaacagagattatttaatttcttttttgttgttgttctaaatctacaaatgctgtcctattttattgtaacaaacttcttactacagtttctaacacactccttggtttggcccctgcctatttctcagacttcctctcttgtctcacttgctttccttcacccacataaaaccttccttctactcctcacgtgctataactgcatctcatccttaacacccttgccactgttcccgcttcttggaataatctgcctctaagtcatcacgtgactggttcattcttatcctttatgttttagctctgatggcatctcatcaaagaggcgctctctgaccctccataattgctatgatctaaagcaccccttctgcttctcacatccctcatcttgtactagtctctttcatgtaaccctattcataaccattttcactatcatatagttcacttacttatttacttttcattttttatcttctgccagatgaaatttacaacacacaaggatgggtctcttatctgtggtttactacggtgcctgcagcaggatgtaatacatgagagaccaaaaacaattttttttttttttttttgctaattgaatgaatgaaggcaaggtaatgccttgctttttttcctattaaaaattatgaaacacctgggaagaatagcttgtgtacactgtcttatgtctttgccagatactttgtccataacttcagaattctgttttttgcctttactatttaactgcaagtgtcacctttttacggttcattgacctccacgtcatcaatctatttacctacattatatttcttttgtatttaatacttgttgaatttacctctttacttggcttttgtggcttagaaatattttgattctcacgtaactctgaggaattattctctagctttagttcaggttatgcttgctgacactttaaaaataagtggatgattctattgtcacctgtttttgcactctttctttggaaactttacccagccttgtgatttatttgatcccaagttgcagtgccttcatctgaggtctaggtgtgtatctccaaatgcttctgtggatttttcaggcattttccaactacatatrtagttaatttctagtgaggtttaaatcctaagggtgtgaccttggtaacttatctcaatctcacattcctcaactataaaattgagttatacctattttgtgaggatccaaagagatagtatatacagtgcctagcctagagccagctacatgctgatgaaagcgctcaataaatgttttccattattatagttttatccccattagatatagcctttgccaatgttgatattttttgagtgcatgataatacagctagttctctatataaagaaactatacttttgaattgcacatttacttatgtactaaaattgtttaaacaaaattctactgtgtgttttaagtttgcattgaagtgtgcctactgacgattgacaaggaaaaaaaaaagccgtaagatggatatcaaaaaataacattaatgagctgctaaagctaaaattacaggaacttatgaaattggttaaacataaaaaccattaaactgtttactgaagcttcacagatatactgcagctaatgagcatttctgctatttaaataagcccaaattgaacacacattacatggatacataattagtcatggcagtcagacacacatagacttacttttaaagctctatttagggaatcttttccatttgatttattttgttaattaaaatatttttcagtgttcacttatattttaataatattgttttcacaagtagtataatttactactggtttcctatttgtttttatttttccgttaaatgcagcaaatgggaattttatatgaaacatttttcttaacccctttcagtaattgtttatatcatttgatgacataattsagcatttaaaaaattttgtttgctgagaagtatacaaaaaatatttcaatacsctattttttcactatctcataattatcaagaaatattaagcacccaaatgtgcatagaattataatgattatggtccaaaccagattaaaggatgatctattccttcaagcagtttgcagtcttaaagagatggtatcattgaatataaataagcaaatcaaagtacagcatttgggaatccaacagagaatttgaaaacaattcccatatatttacttcaaggacactgacctcctggaggagatctcttccaggtaaaatgaaatccaatgttcaaggagttcagcgtcttaaatagatakaattatttcagagacataagcagatcaaggtgaagtgcttggactattttaattctgaattggtttgttggtcagtttaggaagtggaaatgaaacttccaatagaatacaaataacacaaaaggagttgctataggctattattgacatccatcgtttccattcaacttggggagcctaagtttatcctgaatagggtgagggagaagatcagatctgtattttaccctgactgaattctactagcatattcaaactgaaaattatctaaccatagcagtaggaaaatcagatatttaaattgatcaaaagaaattcactatgtgcccattcttccctagtcagtatgtttgtcagtgtagaaatactttttctccacatgatgaactgactaattgtgaaaataagatctacaagaaaaataactaagacagaataatatgaatgctaaataaatggaatggacaaatactacattttttgaccaaaaaacatatactagattccccttatatgccaattatatgctagatgctggggggaagtagctgacttaaataagttatctgaacttaggagtagtagaggtraaacaaatacttgaaataaagtcacatagtgcctagcgtaacagaaagtcgttagtggttaattcactagaaagggggggaaaaaggtttcattggaaaggatgctctcaaggctgaatctgtgaagctagccaagactagaattctttgctgttcctgtcttcactttagttattcccatgatccccaatgctgaattttatgagactgtggagagtctatttattctggctttctcttgcccccacacccaaagtcagaagcagcaggactttggagatgaaataattggattcaaatactgcctctgccacctcttggctttattgaggatgataatatccaccttcaagggttcttttgtgatctaataagatattctatggaaatatccagcagtatgcctgccatgtactagagatccataagtgctgattgattattttttctaacattcttctttagttgacagtgatgttaatggaatgtaagaagtaactaggataaaattttcattggatggattggcacaacatgttaactgactggatgttgatatatttggaaacaagattcatggattatactaagatttgtaagctctatttttagttttgaagaagggaatgggaccagatgcgatggctcatgcctgtaattccagcactttgggaggccgaggctggtaaatcacttgaggtcaggagtttgagaccagcctggccaacctgctgaaaccccatccctactaaaaatacaaaaattagctgtgcgtggtgacaagcgcctgtaatcccagctacttgggaggctgaagcacgagaatcacttgatcacttgaacctagtaggtggaggttacagtgagcggaggtcatgccactgcactccagactgggcggcagagtgagactcctcaaaaaaaaaaaaaaaaaaaagaaaagaaaaagggaatagaaaattttckcaacctactcatctgacaaagggctaatatccagaatctacaatgaactcaaacaaatttacaagaaaaaaacaaacagccccatcaaaaagtgggcgaaggacatgaacagacacttctcaaaagaagacatttatgcagccaaaaaacacatgaaaaaatgctcatcatcactggccatcagagaaatgcaaatcaaaaccacaatgagataccacctcacaccagttagaatggcaatcattaaaaagtcaggaaacaacaggtgctggagaggatgtggagaaataggaacacttttacactgttggtgggactgtaaactagttcaaccattgtggaagtcagtgtggcaattcctcagggatctagaactggaaataccatttgacccagccatcccattactgggtatatacccaaaggactataaatcatgctgctataaagacacatgcacatgtatgtttattgcgacattattcacaatagcaaagacttggaaccaacccaaatgtccaacaatgatagactggattaagaaaatgtggcacatatacaccatggaatactatgcagccataaaaaatgatgagttcatgtcttttgtagggacatggatgaaattggaaatcatcattctcagtaaactatcgcaagaacaaaaaaccaaacaccacatattctcactcataggtgggaattgaacaatgagatcacatggacacaggaaggggaatatcacactctggggactgttgtggggtggggggaggggggagggatagcattgggagatatacctaatgctagatgacgagttagtgggtgcagcacaccagcatggcacatgtatacatatgtaactaacctgcacaatgtgcacatgtaccctaaaacttaaagtataataaaaaaaagaaaaaaatcataataaaataaaataaaaaaaaagggaatagaaaaaagcagcaatgactattaaaaatgcatcatgaggacaggtggaaagcagaaagtatgatgtcacagaagccaggctaaaagactttcatgaggaggaagtggttatctgttgaattttgctgagaaatcaaggagcacaacaagggggaggcaccttaggtgcctgtccaacaactttgcctttgcatgaccctgagagtaaggacctccttaaattttgttctttgtctgcctcactcacctcaccctatttcaggctctgaagcaagatgatcactgagaagaatcactggacttggcgacctggaaccaattaatcatatcagtgaaaagaggtttagtgaagctttggagtcaaatgcagatgtggaatggttttaaattgggaggtactactgtacatgtatgtacctacatatgggaaacctctaatttgtagagagtggctggtaatagagaagagagtggatatagtgtcaggggcaaaattcctaccaggtcagaggagaggattcttgggcccatgtggagagaatggcttctgatagtagggagagttccttagtggtattaaaaaggaagagagagagagcgaaggtatagatccagtaggtttgtagttttgctgakgggaagaaaagagagttcccatgtgatggcttttatattctctgtgaattgtgggacaaggccttctcctgacagtgggggcaagagaaaggagtcaagtctatagaagttttgaggagtgaagcaaaggtaagacgtgttcacaatgagtggaggaaatgaaagagtaaggtcaccaataataaatcatgaggtgggaaggcccaggggaagcttgtgaactgagttttggatgtgatgatttggaagggacattagagcatacaggttataatcttaaacaggcatccagaagttccagaataaaaggaagaactcaagggagagttcgaggccatctttatagagatgaaattgaaggccctaaatgactatgatttctgacagagaaagtgcagtggactgaatatttgagagctgagaagaggaaaatgaagaggtgaagaggggctagagcccaagaaggacagtttaaagataagcagagccagggtagaggagcattctgcaaatcaaaaaagatcaaaattaatgccattcaactgttggatgctacagaaaggcaaaagagctgaagactaaggtcacagaatttggtgaccgtggagaccatactttcattcaaggaataatttggtggtgagacaagtaagcagtccaagtatatgaccgagaaattgggtaaaggaagatataagaatggcagtgagaaaagataaccatgtcaaaaacaaagtttttttcaaattggagaggagaggagaaaatgacacatacaatatactgaaaagagtaagagacagtgtttgaggacctggaggagcaggaaggtacagaatcaaggttatcttctgagagactggcagaaggaaaacaatgaatcttcattgtggagagcatactgattaaagtactgagaagtggaagggagatgtgaagacaaagctcaagccatccagacttgatattcttagttggaggcattctctggttctggcccttccttaccccaggttattctatttaaacagaactctgatatcctggccttgtaattagaatttattttgatcttgctgagattttgctttcagcgctgaattactgagattactgcctcagcacaccttttagtttcattgtgatttggtcctagtgggtgataggttatgtaaaattaaacaacaaggacatagatgaattcatctatgttttcaaggtatcattttattgtaaatgttgaaagtttttattccccccattgttttataacacatcaaactctccaaagaatactaataatccttcttcattatgatatctgttgtattgttttattgtttatggagaattaatttatatttgtgtactaaaatataacattcttgacatctttttataaaaactgagaaatatacttgtcatatgcttgtgggtttctcttttacatatgtgacagcacagctacatcagtttaattgaccttggcaatctgcatctgctagtgatgtgtccctgagggacggtttctgcaattttaagctgtggcttattgaagaacttgtgtgtcacaataccattaagtctgtataaaaaatcatttcatgcacagcattaaattgactaaaagttccaatttcaaaaccgtttcttgttataaagctacctcagagtgtctttgttttttaaataagctcatttgaacatagtagtaattaaagcagaaaattaacataaatcttgaatgtttggtatgaattaaggacgttttcattctttataaagactgcataaaattccaggcaccatatcatttaacaaatttctcttccaattgcagaataatatagactgtgaataagcatgttttgggattctttttcaagttctttttctgttcaactatggagctcctgggacatatgccacagtctccatcaagatgcaatctcatggaaaatctgagaaaactgtgcatgaacataacagaaaatcccccccgttttataaacaagaaaggaataatacaatccttctattaatattcatttaacacttcagaggaaatggcaagcagttatttggtttgcagatgtaaatatacatttttcattcacttatgctttcactccttccaagctgggtaaagacagaacagaagatttgcttctgagttttatttttattgtattccaagttaaatctatcagcagagatgtaaaagagctctgaggagttcatagaagaacagttacaatgatgaggatgatagtcttcctcataaggagcaactaaataaatgaattcctttctgagaaattatgaataacatgcacgtggattttttcactgaatccttgatttgagttctaagcttaagaaaatgattaaataattaaaataatggctatattttaaaagaattgttgaaattaggaaaggtatttagctccagatttaacaaagtttcagtaaattcatatatagtatgaatcaaattcataytatatatgaatattacatgtgcttagagtctactacatgtacaaggaaatgatcctaaccatttgatattccagttgtgatagtcattcttggtgcttagggctactgaaagaaatatttctgacccactgtagcattgcttatatttataaatgttgtccatattctactttcttagtgatctttttgtagatatttgatgagccaaatattgggtattaaaatatatacagatggtctctattttgattgatgttagtaacctcataaccagctgtgtgatctctcagctttttctttttatttctggaatgaaattaggaacatgttaaacttgaaggtctccaaaatgagcaggaggaaatttggtagttaattttcaaaaggagactgagatgatttttaatatgaaagaaaatcctttttctattttagaatagagtatcaaagaattgtttgatttttaatgaggttagctggatattacaaatgataaaataattaaaacagttgatattcaggtttaagacttcacagaataaataaatcaaatattaaggaaagaaagcttatttttaaaagtatacatgagtattatgaatgtttaaggatacataataacacaatgcatatacaatagaaatgcccatgagcagaagagtgcttttgaattcacaaataaatgcccctagggtggcttatratgttggtgctaaatattttaagaaayataaagttacttattaaactcagagtaacatttcctgactacttatggaccgagtttgtgacaggtggagtgttaaagtgaattgttctatgtacattttttgcatcctaaaatatggtaaagcacattcttcaagaacttcaatttaatttgtgaagcatttattcagcacctcctgtgtacaattcactgtgctcaagtgaagattcaaattttatgaggcctgaagtgtatacaatttgagagytcttctttaagaaaagaaaaattcatagatttgaaattaggcgcagggctttgaaagagtcccatgcaagtgagggaccctacttaagcttcagtaacttcatgataaagttatcccttcacatctaggggggcttggttccaggatcccccatggataccaaaatccatctatgctcttaagtctgttatagaaaatagtgtattatttgcatataatctacacatatccttccatatactttaaatcatctttggattacttatggtatatctaatacaatgtatatgctgtatatatacttgatatactatattgtttagggaataatggaaagaaaaaagtatgtacacgttcagtacagacataaacattctatttttttcccaaatattttcaatgcacagttgattgaatcctcagatgtggaacccacagatatggagggccgactgtaaacatgtctttgactctaatttatgttgtgggactcagagataactaaggaattattcctaccttgctcaagcatagaatgaaatctctacttaaatttcaaggatattgctgtgaaacatgagataaatgtaaaaaaaaatgctttgatctcctagtgataaaattttgaatttcttatctttttattaattatctttatttcagatctsttgtaggccaaagttttggaaacataagatcatttctgatagaacagaattcatttttaccccttgccactatttataaagctcattacatatatcattcaatgatgatgtgttacagttgccattattaaaataggttgaattgatgagccatactcactattgactttcttgcaactcaagtaactgtcaacagatggtagtgatgatctgttatgcaacagggaacaaatgataaagatctcttttcatgtgacctttaaaaacattagaaaaatttycttaaaatgcctttctgctttgaaaataattacatgaatatttaattttcctctcaatgaaagacgaaaaaacaaatagaaacagtagaagattttaaaataaaaacctgagtatgatagcattgacccatctactcattcattcattcatccatcaatccaattgagtgtcctctgctccaaraactgtagtgtgctctgtrgaacacaggcaagcagtgtggacaaattgctgttctcatggaacctatgatcttgtgggaaaaacacaatcaacagtaamccctcaataattttctacaactctaacattctttaagtagaaagctacaaatatataccagtgtttattttatttctatttttttcctctattttactcagaagaaactggttttaggtgtcaaaaataacattttttgtatttggctattttgtgttatacttgattcataaataaattcaacaactaacttttctgttccaaaatctcccaagctctcttcctttagtttaagttgttactaatattttctctttggagttggagtaaagaataaggcccttagtctgtctgagatgctgtgcttaaaaattatgacgttacctggagagaacattttatcctaaacactggcttactcagtttactccatcaaatagggtgttgtccacctttcttcatttcttctcttactcaaccctttctctaaattgcatccattgatctcttccacatgtcaggattatgctttcaaaatgttcgttagatatttttcttaaagaaacacagcttcattcctcttccatgactcttttagattcattagaatgcagcatatttagtaaataattgcaaaactactttacagagcaatttccacaaggaattaatggtaatgtttgcatttgttgcttttaacaaaacaaagcagaaattgctggctaaatgtaactgtatactagatccattaaattgcttaatagtaagtgcaaataatttaatgaaaatgttatatatgttgtctcattttgctttataaaatgttttgttgtaaaagggagattagccattgacctgaattcatgatgtaactttcaaaagtgacacacatgaacaagttggggataatataagtagtaacagatttgtaaaaatgatggctatgaataaagttttagaaaaatgtattttgtatgtatttaaaaggttgtactttccttctttatagatccatacttcgtagacataaatgtccgctctgaaacattgaccaaatctgtggtctttaattcctgtatgtgaggtgtaaagttaagtcagtgcmcttcaaatgtgttgttaactccaatatttcgttagcttttcatttttatagtttactaaaaacagttgtttgaawccctggaacaataattaaaccataatttttcttaattttaaaattattgttatggaattgtctgttgactartgattgtctattgtttttcacttgttttttcagtaaaagaagccttgagccctataaaatttaayagatggggtctcccagaagtagatccagaaactatgcaaactagtgaagcatgggtatttgcaggtggtgatgtcgttggtttggctaacactacagtggaatcggtgaatgatggaaagcaagcttcttggtacattcacaaatacgtacaggtaggcatttgccatcatttccacttaattcttttccaatggataagtgcttcatttatttttgatactcatctataagagcatttctatttggtatataataagcatatatacaatatgtcacgtacatacttggatacaaattttaaaatgtagactaggtagtagaactgttkagttgattaaaaattgggccaggcgggcatgccacctaatgcctataatcccagcaattttggaggctgaagcgggaggatgcttgagcccggtgttcaagatcagcctgggcaacataggaatatcccatctctacaaaaaataaaaaattagatgggcatggtggcacacgcctgtggtacgagcttcttgggaggctgaggtgggaggatctcttgagctgaggaggtcaaggctgcagtaagccatgatcgtgccacttgcacttcaacctggacaacagagagagaccttgtctcaaaaaaaaaaaataagaaagaaaatttatcatgcattcctaccatttgagtactgtgaagtcattagtcctgatgtgttcaaaatatttattattggcttaaatacatagatcatacacttatcaaatctgatggtatacaatattataggacatatactagaatctacattaattataatcttacatactccaaaagatggtttgatctgttcatttggaccagataaggtcctgtctgttttccaaattctatgcacctaagtggaaaggaaacaaacatttgatgaatttcagttgtaatttttattttttaaattaaattaaatttaatttttttatattttttgagacaaagtctcgctctaatgcccaggctggagtgcagtggcacgatcttggctcactgcagcctccacctcctgggttcaagcaattcttatgcctcagcccctgagtagctgggactataggttcatgccaccacacccagctaatttttgtatttttagtagagatggggtttcactatgttggccaagctggtctcaaactcctggcctcaagtgatccgcccacctcagcctcccaaagtgctgggattacagacataagccaccgtgcccagccttcagttgtaatttttgaaaacaatttagtttttaacaatttaggatacagaatgtgaaatgatgagatgtgaagctgagcatactttgccacaacgactgtggtcttgaggaagaaargtgtaactaccagatctcagtagcttactttccgactaaatgctttgttttctttttgttctgtgatttaattaaatgtagatacagttacctcatttatgtaaaatgttcctggaaaatttgctcttgttaataaaatttttattctttctttcctattcaaggaagagtgctcacactatgcctttttaccactcttgtttttaccactcttgttttggttctcttgtttgtttcccacatgctaacaaaattcactttatctttaatgcttcctttaatttcttcctcttttccatgaccattttgtctattctagttgtccttctcatgtttgtgtaactaatgcaggacctacttatttgctaggtagggcctggacttgacactgatagtatcatcttttaaaagtttgattcacctgcctacttccacctcctccttggcatctttgagtagtggggcttgagttgttgggccaaaccgtggtgtcccagaaatgtaggaatctcaaaatgaatgaggtaattgggagactgaggtgggaggattacttaagcccagaagttggaggctatagtgagctatgatcacaccactgcactctagcctgggtgacagagtgagacctcatstttaaacaacaacaacaacaacaaaacaacgagagagaaagagagagaaaggagcctgtggattttgcaaagagacaaagctttgattcaggaaatagcatctagggagatgccaaatctaaaattttaaaactttaaaaagttatacatcaaaagggactaggctaggcaaagaaagaaagaaagaaaaagaacacaatttaarcagagacagacactggraaacccaaaggagacaagttggtgagtggttcaggctccagtctttgcagtgactgaaggatagatagcagcactatgctttaccaagtgtttattgcctcagacagaggaagcagcaaaggacagctatccactcagggagtggatggttccctactttgcctccttctgcatttcctgccccccaaactatcttcctgtttttattttctcattctactcttattttcagagtaatttcacagttttttttaataataacaaaggatttattatcatttgcagatgaaataaatgcaccatcccatacttgaaaggtttcartaagccttaacatttttcaggttgtaccaaggcactgccactgcctagttatattatgcacccatttctagagtaaaaaaactacacctccctcaacatcagttctgtactgtttctggtttatgataaacttccaaaacagcaaaaaattgcaaatatgtgcaaacactatggtccattcagagtactgcttagtcatcatcttcctcttcctcctcttcttcctcaaagctatcttcaaagccctcactgtcctcctggtcttcatccccctctattgctgtatcccactgtgggtgattttctggcacaggcttggcctcatgaacttccaacttcaatggtttaatctgatccaaacccatataggagtctgatctcagaaacacagtatactgataatttccaggcttgcctggtgcaggaaacttcagctctacttcctctgtatcttttagtgtacacacatgatatggcatggatattaatgtctgctccttcctatctgcaatgtaaagccaccaccattcttgtttttcctcaggaaagtaaaggctatacacaggatgtgttatttttgatttggtttccaatagagcgctctcttcttgctgtatgctttgtagtaattcttgccactctgcttcatcatctttgttttgtttttcatcttgctctctatcagagtctctgtcactaccatcatctttctcacttcaggaatctctattggtttcttcttcttcagaatcactgcccttatctgaaacttcttcttcatcttcctttactgcagcttcattcccaacaactccatttgccagcttttgtttctgttgctttgactgtggtaatagcacaggtgcaggtttttttttttaaaggtttctttttttttgatttagcagttttcttgggtcctttactcttctgttgccatcctcgttttgtcctgttcttgttagtttcaccctgcccatcttctgctggctgttcctctgcagcacagaaggactgctccttttcaaatacttcagccattgtttgccttgtcaacttaaccagcactgtaactaaggatcctactgtgatgttgttgctgtcttcatcatctaacacctgtgattttatattcatggtcacatatggaaaactcccaaggacagccataacctcttcatatttttcatcttcaaggaagtgcagtagagtatgacaatctgattctttaaactcaccaaatcctggatagtttaaattttatacttcttatgattagaaacctgtctaagattgtcctcttcaatgtaagggagctgcagaaggggagacttaaattgctgaagtccctgaacggccatctgagaaagcttcatgcagttttctagggatgccaaagttggagcacgaaattccctttcttcacggttcggggccattactattagttggcagtttttagtttcacagtttttaatcttacctcctgctgtgtaactctctaatctgtacctccaacagggcactctcttgcataatccagcagtccactgaatatcttcccttgtgtytctaatctacttttcatattcaccaaacatcttcatgtaaatgtctttcctacatttcagattcactgcttttaagtcaaacatttcttcccaacttgctccaactccagtatttaacattttttatttccaggttcaaacctactaagttagtggtcctcataaattactcagaataattaaaatttcaacattgatttggaaatcaatacaatgctgatggcttcttcttttacagaataacaatattagaacaaaggaaactgacatttatttatataaattaataggacactttatgaaaaagttaggaaaggctagagtctcagaataagagatacgctcaagaaagtacagttaaaagatttacattggtgcacatatacaacatgcacataattttttttcattataagacaaaacggtacatagctgtatttaccaactacttatctaagttttattcttctctcttttctatataactggtcaattcttattctatctcttaaaaactcttttatacccttattttattttatcttttgtgtggagttataattttgattgaccagaaatcttactgagcagcctgctagctcctttaagaaatgaaagtggaatcaagggataagagatgaggttcttgtgttagaccagatgaagcccagtgaatgtgtgaattcatagtgaaaatggtatgtgggcagagaagctaaaaagatttgaaaaagtaaaattgaacacaggtcagtggaggattttgttttttgttcttatcctaaatatttaaatccatttatagattttaaattaaaatgaataaacaatgcttaaatatatttatgattgtagtttggtggtgtttcacaatatcattctaaaggamtcttaatgttttttttttttctgttcatttcactgttgtcttgtaacttcctgaatctaataaatgtgtactggaaaaaaaaagaaattattttacttccatgtaatggcagataggaagtttgaatagaaatctgatgtgtagagaaaggagagaaacagacctttagctataatgaagaaaacatgcatgtgctttaaaaacacatattgctaggaatgatagtgtttgaaatataaaataaaggttgtgccatgtaagaattttggatttggttgaaggattcagacttgtcaaactaagtgttgaattacatgttaaaatggagtagagatggaaggtaggtaaaaatctctgtcaagtaaaatcaacatttccaccttcctgccagggtgttggatgcaaagtgctaagcagcgataaggctaacaaggtacatatagacaaagtgggatttttctctctccacattgtcattaacttagttctggcctctatcacctctcttgaaattgcctccactttctctcctgtcaaatccaatgcccctacactgcagccagagtcatctttctagattatcagttgaatcctaattagctcatttaaaacccttcaatgacttttactcacactcaaggtaaaggccaaacttcttagctttgagatgctgatttgaatgtccccaagcataccaagatttctcctgaatctgggcctttcccccacttcacccatttccctctggttgagtcccacttgtccttcaggattggctttctcctcctcgtccagggagtttgtgacatgaacttcctttgtgctccttgtttgaagcctgcttactggtctgtctctgcacaagctaggaaccatgtttatgtattgctgtaccctcaaaataaagtattcatctattacataggaaaaatatgcagaaatcatttatcttaaatacatttaaggaggagttaagaaaactaatgagtttgttatatgataagttcattagcatataatattgttttctcacaaatgtagcatttgttaaaaaaatttctgtaatgtctatagtatgtttcacaactaaggcttatgacattttgtcttatattttacattagtttgttttgggggaaaaggtaacattgaatagcttattttaaaatatgattttataaacagattatagtattaatgcatgcaattgggtgtttagaaattctttgtaatatgcattttcagataaatgtgattgtttgaagacatccatgttgggagaaagtggaggcaatttctctgaggagagcttcacttaaatttcatcagttaatttgctcaattaccacttattaagtaatagcctttgggcccacacttgacttcgggagggtaccacaatgcataaataagagcagtataatatagtggttataaatttgggctctctgaactacagagaagacatcagatccagttccaacactttccaatcatgttaccttggacaggttacttcagcactccagggtatagaagtgaataagcaattataaattattattattacttaaaataataattagagctgctatcttcttgggtcttgcagaagattatgaaagaaagtatggaaagctcttggtaaagactaagctttgtgaatatttgttgtgtataccattgttgtgggttattagaaatcattcaccttgtattgttaaaacgagatcaggaaaaagatggcaaataggaaatttgaatagaaatctgatgtatagagtcttaacagatgaatattgaaataggatattttaggtagttgcaaaagcattttatttagtcattaatttattcatccacatacatccatcaatctcatttatgcattaattaattcattcattcaaaagatgcattttaaaaagtagtggatataatagatagcaccaattattagatttaaatttgcaagtaagaatcctattgtctagtaaagaagtgagttgtgtaaatgtaagcccaatatagcatacttaacacaataataaaaagcatcaagttacaaaggtaacctggaagagacaatgactgattccatctggatgtgggtattaggatgtggaatcagcaaggacatcacaaacaacaagaaacaaaatttaaaaagaataagaaaaattagaataatactgggtaattagatttactgggatttaaagaaggctactggataagattttatatgttgctcactccatgaggggtacccagaccagggtacaagctggctgaaatccagaccaagctccactaatcaaacaataaaaccttttgttgttctgcttctatacagaggagggagtaccttcctcaaattttcataaagatgttctctgtttggtccataagttttgcactgtgcagcaactcctttttatttcaccaaaaagcatagggtggacaaatggaagctctgaatatagagattatataggaaaaatgagagagagaaagttcagtaattataccaggagtagaacatgatgagattgcctagctaggrtttcaatttggagtaggtaatgtggtaggaattgttcatgtatagaaatgatatggtagtgtcagatctggtattaatgtgaagaaaagcgttttccagtttgtcagaawttcccttcttaagtgtcattctgttataatattaaatttacttttttagttacttctactaataattcaatatgacttcaccttaattgtttataatgtgatattagtggagtccaggcatatttattttcttctaccaaatgaataagaattactgaatacgaaagataattttgacagtgtacctaaagaaagaatttgtaactgaaagaatgactatagctaaatgaattccttaattagtttaattccttaatttctcttttcctatgaaaccaaaattaatactttgttggttaatcagaaaaagttaaaatgggaaactgtaaaaaggatatacacatacattaacctcatcattttattatttattacataagcagcacatgaccaaagcttataattttatttaaagcatatagatattttctcattttcctttttcttttaaaaaaatccagggccaagatgtttttaaataaaatagccagatgtgtattatgtatcttgcctaaatctatctataacatattgtctaccattttcatttttaaaagtggtacaagaccttcgagaatcatacaatgcaattttccagatttttatgtttgtcctgcagtcatttcagtggtttgaccaacacctaatttgacagcagtattttttaagtaactcatttttatcatatccttcaagaacattcaacttagttttcatagaatcaaccttctttctttttgcatccatataactaattaatgtttatttatttacatttatatccaacagaaacagggcgagaaacatacagctgactcttgataagtagacaactcaactaataaaagcagaaatttcgtaggtatacaggggtaccactggttataaagcatcagcattacttggccatcttttgtgtctcttagggaggaaaacaagggaaggaaatagtccagtaaatctgtcagatgcaaccaacttggttaagagagcatgtagaggacctcagtttcttcattacaaaagcaccaaatagagactgaattaatatccaatgttactaatttataaaaacacatggtgatattgtgaaattttcatctttaccctgtttcctggcatacaactcctaaaatctttggaatctccaaagtgatgagtatgtgtgtgtgtgtgtatgctaatgagttgactgatggctgacagcccataggtaactacaggataggggctagtcaccagaaggactgaggcaggactaggattgggactttcagccctgctccccaacctccggggagagtcaaggggctgaaggttaagttgattgacagtggccaatgatctaatcagtcatgcctatgtaatgaactttccataaaaactcaaatggactaggttctgagaacttgccaatagacaaatatgggtgacgggggtgcttccaggaaagtaaactagaacgcttccgtgtgccaagaaggtggcacaccccagctccacagggacagaagcttctgctctgggggccctttcagaccttgccctatgtgtctcttcatctgactgttgtgtttgtatcctttaaaatactctttgtaataaactagtaaaagtttggtttttgttttgttttgttttgttttgttttgtttgttccctgccccgccgccacccccaccccccaccccccaccccgggttctgtaagctgctctaaccagttaatctaacccgaagaaggggttgtgggaatcccagtttatagctggttggtcagaagcacaggtaaaataacctggggcttgttattggcatttgaagtggtagggggcagttttggggaatgagctctcaacctgtaggaactggtgctatcatcaggtagatagtgtcagaattgagctgaattagaagacattcagcttgtgtccactacagaattgattgcttgcttgcttgctggtggggagcagttcgcacacacctggtgtcagaagcgtgttgtgagattttagtggagaaactgagtttgttttatccactcacacagcattcagaaggcggagcacttactttgttctagtattagcatatagacagatttggttgcaaaaagtggagagaaaaaggctatatggatatctcatcatgttttgtcctgccactgagaaaaaacttggagatagaacacaaactaaattattctaaattataatcccagatcagaagctcattgtcccttcagtagtcatggtagtcctgagaaggagctcttataaacatggaacattttgtcaaataatgttgatctttatagaaattataatcacaaaactaactggtttgttacatcattagagttatttttgccgtgtcattattcttttattaagaattgttttcaattctctatattttagatgcaacrtttaaaaagccacagtatttattaccagtagtggaagggaacaactaaatgtacatgttgctgctacaaaagcagttgtggtagaaatatatatatattgagagacaaaaaataagagttattaatagaaggataaatatggaatcaacaggtagaggtagaaattcaaataaaataatttgtatagagcaccattttaaatataggcaagaaatgaaaaggaaaagatctattttcttccaagtgggattcattccatgaaaatcaaacatttaggggaaaatgcaaagtgtaaggaaggaggcgtcagggcattaaatttaaaaaaaatttgagtacatatttctaagtgacttcaggagtcactgcctacttagttatgtacagaataattgccgttgaatagttatagaatattgtttattagcagccagcatttgaagtcaaccttcaacaacaataaaaacaacaacaaaaagttaattttttcattgttggcttaggttcaatatttctactactgtatatatatatgtttgcctaaatatatgttcctaaatactattcttctgttttcttcagcaaactttatccttattaaaatatgctgtattcctatagtaagtgtccacgttaaggtgtttgataatgttttgattatttcatttatgaatctatattatttcttccaatttgtcaacccccctctgaaactaacttgtgagrcagaattattttagaatagatacacaagacacacacacaaatattctggaatgatactgaatctaaaatacattccttaaccctgtaagctcatgaagcacaagtatcttcagtttctctgcagtgtttttcagcttaatggtagcttatgtgaaatactattgaaagttacaatgaagttctttaacagttactgtgattctactcaggtacatgtagtatatgggtatattttgaaataggtgtttattaggttcatgagaactatcatagatgtcttgcattggtgacctacttttctactgcttagattttttctgtgtgtattttcttctggcttgactgaggcacaaaaaaaatcactagtggttgagggaactaagtatctcaggggattggtaatgagatacagagcctttaacctcttggtcactagttcaaatctgccccaggtcaagagtgacagaaagtcattaccatctgatggcagttcaataggctatgtgaaaygaatgtgtgatttcaagacctagtggagacaaattcatgccatagacctgcagtagagtgagtacaaatggtagctgtggttttggtttgaagagaaatgagaagtccagtcattgctagatattccatcttctttctgtgagctgagcttccttttggtggattcgttaatggaatggcatgagaaaactaggtttatgccgtgatttggggccaagaggtgcacatccattgctaatgaggtacaattcagcatcactaaattgacttttttttttttttttgagacagagtttcactattgttgcccaggctggagtgcaatggcacgatcttggctcactgcaacctccgcctcccgggttcaagcgattctctggcctyagcctcccaagtagctgggattacaggcatatgccaccacgcccagttagttttgttggtcaggctggtcctgaacttttaaaaagtgattttagtctcagatgatgatgaattcaagattgaaagttacatcattcatgtcttccatttcttcaatgccctcaacgtatattttttaaaggtttcagtttcctttttaatcatgacattaatttcatctaatttggacatatgactgaacatttagggaagcctkttcattcttgttaatctttcacttgaaaaatacttagttaacaaacaagaacagacaattataaagacaattaaaaatatggaattccaaattgagtatcatggaaaaagatcattgtgataaaatctaattgaattgtgtgcattcatatcaataaatgaaattttttacattcttttttgggttgagattatgtgaggaattttgtctttctgctatctttaataaactgtcattttattaacaatttctgatttggggacattttaaaggaattatctttctgaagaggaaaaaaggcttgtttatacctgaaaattttataagatgacagcattttaataatggcatatttactattttattttatgttgggggcagtaatttttgaaatgaatccacaatgctgggttgtaagaattttaaagctaccttcaataatgcttatgatgtgggaaaaaaagtgaagaatggtaataactctgcctcgtgttaaagatttctgctctggacaaagatgaacagttgttgaaaatatgacagtcagggattttagaaaacaaacttacaagaacttctctgtgttgaagtccctgttacttagaagaccttcagtcccaactttaaataaaagacacttgttatcattatcattgcttaaaatatcactttaatttcacatcttcaaaggcattcttttgccctgaaatataccagtgatttctacaatatctgaagaactatgattcgagaattagaaatttaaattgcacaggcttaatattagagtatttccgttaccctttgcaggttttgaggcagcttattcgaccttacagtctcaccaggaagctaatgggaaagccttgcagcaatcttcacaggaaagtttccaaatgtcaagtgtcatctttccagctgttagatgaatgggtagccaagaggcatttatttgggtgtgcagcccctgtgaaatctgggtgaggcargagaaaaggctataatttggtgtttagtttaccagcatmagtatagttgcaaatctcctagccaggcaaaggatttcattttgtagtttaatgattgacagccagctgcagtgttcttgcacttaaagaataaaaatgcctgaagaaagggcatcatcgatatgtcatactaatttttgaatcctctactgcttcagataaaaacaatcttatcaacagagctgmcttcttcttctctaaacctttccaactgagaagaggtaggcttttgaaatgacaactgtattaaaatcttgagacttactgaaaaagtgtccttcagtttaagatatgttgcaaactcttttattcctgtgttaagagaagattgatataaatcattggccactgtcaggttgaaaaacaatgaatatcaataaaaagacagttttaaatcataatgggtttagtttgagatagtgatagcctccaaaaaataatattgaagtatgtcatggctaaatgctgtttccatgctaagtttttccactgggtcaggatcatactgttgagatgacttcaggtcagtctcattgggaaactgggcctttagacttaactagtaccagaaatgtatgtgatctcacctttatctctcgcaatggcaagtagtaaagtcaaatttgcttacrgtcatagaaaaatgaagtcttcttcagttgcttataaataaacatacattaaaccctatagtactctccacataattttcctctttgatagtacattcaggttaaattgtgatgtgttcttcagctaatatttttaaataattattatgcatcagatacttgacactttttctattaacaattatattcctaataatgtgaaggtttttgtttgtaaakgagaatttattttttgtaacatccatatgttctaaaaggaagtcaaggaaaaaatgagcaatgaggctgtacctaatggagctatcaaaacaaaactgtctagttggtgatagagaaagaaaataccatgactaataagtaattttaatgccttttattgactttgtataggttccaaacttttattaaatggcagtgtttgacctgaaaagtaatttaaaatgaaattgtctccataaagacagaatatttccttacccatatagcaatagattgctacttcaggcagagataattgaagattagaatggcagaaataaaaactaactgaaaaatctgatccaatacgtagggaatctaaccttagttcatgttgatggagtattaaggaaattaaccactgcagtatcaattggtccaaatagagtagaagtrttatgcatcccatgccaaattttcagcgctctaatgcatggggtctgctgggtctaatggcaatgtagcacaataaaacaaaacacccaaaayctttagtttgctgtggagaatttaaatacaaaataacctagttagaaattttgaccagaattgtgttcttctgaattcagtgatttagtaaagttgaatctcaaacaagctgtaaaggatcagatcaaaaaatatccaggatggtataatggcatcctgaaagtcaagcagtctgggttcaagttgtgaactaattgctcagtaattctgccttcagacttttgggaatatcatgttgcctttttggttttctcacttatgtctctgagacagaactttgtcatcatagaggtagaattcccagctcaaggacttaacaacttttaaaatctccaatacgttatcttgaacctcatcattttcattcatggaaggggcagaattataattttatatggttctaaaactcaaataatatatataaaaaattaaaaatctaatttattgaatacccattatggttgattgtttttagaggcttagcattcacattgtgtgcaaaattacctatggattaaccattttcccatttaaaaaaatggagaactatactggatttggttaagatgtagttggccatgagttaggaagctgaggaactggatttaaaagagtaaattcacatagtaagataatttactcagaagaatacaacaataatagaattatctgaaaatgttgtaaaaattgttaaatatcctcaaagagataaagaaaagaataacatccataaaaaataaaagaaaaaaatgtaatgcctttcttaaggtgttaaaactagttaatggcaatgctgggggtagaacccaagtttttctgttctcggttctactgttcttttcaataaccagcttactttttcctcatgatgttcttttctctttttttgagttccagctgagcatgtggaagtcagaacacataagtaagttcctaccagttatcagagaactctgctccagggtggggacaagtattggactttttgtgattcttataaccaatactcaaaattttaccttatttcattttagatcacttcccatatattgaacagtcactgtataccagacaacatcctgtgagaatgtagccttcaaatacatttttaatcagttttgttctctgttgtatccctagaacagtggttaccttattgttggtggttggccartgaaatgcctgccatatgtaggcacttaataaatacaattgaaacaatgggtaggttttggaaatgttttagattatgaggacaccgagtttaggaaatggattttataagttcacatggctcagtggtgatagatactaccttagactactaaaagatctggtgtttgatggtggggtagagttaccatgggaacagaaggatacaaatgagcatgcttggggtttgtagtttttctcattkgatcttcacaaccatccttccctatagatattgttatttctattttgaagtgacctctgggcaactacrctggttttctcttcacactctatcctcaccttagtctatttcagagaattctccttctagaaatataagggttaataggttaacacaagagcaagtattggctgatatgttgttgacttacaattttgaacttcttattccaaggcttaatatttaacatcactgctgtcacctgtcttaaatgtcagcttatttgatttaccttcgtcactctcaccttgatcatactgactcctttatgttacatggatttgctgtcaggcaccaccctgagctggtcaccatgtttttattactttagtcattgacatcttgtcagcagtatcaccacctttgccccggggcctgtcagtatggcaattgttacctttttgattgacacttttgaaaatttgtcaacatgttatttattattttagggggatctctgtctaacttaaagtcatttcttgaagttaatttactgttttattctttgaacagactctttggtttgtatgcagtagaggctataatagtctacatgctattatattaacagataatattataactagtagaatgtgaaagaaaccaacatattactgtagttcagtgatatggtttagatctgtgtctccaccaaatctcatgttgaattgtaatccccagtgctggaggtgcggcatggtggggrgtgattgaatcatgggggcaggattagagtatctctcaggacaaactaaaacaaaaacacaaaataccaaaagactaataaaaaaaaacttaatgcaagaacagtactaagagatgttttatagcagtaaatgtctgcattacaaaagaaagaagatctgaaataaataacctaactttaaacatcgatgaacaataacaacaaaacaacaacaacaacaacaaaaaaaaaacaactaagcccaaagttagcagaaggatggaaataataaagattagagcaggaataaatgataaaatgaataaaaatacaatagaacaaaatcaacaaaattaagaattgtttttcaaaagataaaattgacaatttgttatctgaaccaagaaaaaaaagagtattcaaaaataaaatcggaaatgaaacaggagacattacaactaatgccagagaaataaaaagcaagaccataagggactattatgaacaaatttgacaacctagaagaagtggataaattcctaaaaacatacaacctataaagacagaattaagaagaaatagaaaacctgaaaagaccaataacaaataaggagattgagtcagtaataaaaaaccaacccaaacaggaaagcctacgaccaggtggcttcacaggttaattttactgtacatttaaagaagaattaatatcctttcttcctaaaggcttgtaaaaagtagaagagtaaatacttccatactcattttatgaggccagcatcacactgttaccaaatccagacaaagacaccacaaacaaagaaaatgacaggccaatatccctgatgaatatggatgcaaaaactttcaatgaaatattagcaaaccaaattcaacagtacattaaaaagatcatattctatgacctataaatctctataaagcaagacttattcctaggatgcaaagatggttcaacatacacaaatcaataaatgtgataacaccgcattaacagaatgatgggcaaaaaccatatgccaaaccaaagaaataaaaggcatccatatcagawaacaagaagaaaaattaactatttgcagaggacatgatcttatacatacaaaaccctgaaaactgcacacacacacacaaaaactggagatctaataaacaaattcagtaaagttgcaggattcaaatcaacatacaaaaagcagttgtgtttctgtatgccaacaataaactatccaaaaaattaagaaaaaaatccatttacaataagaccagaaagaataaagtacttaggaatacactgaatcaaggacatgaaatacttttaaaataaaaactctaaaatactgccagaaagtaaagcagacaaaactaaatggaaagacatcttatattcttggattggaaaaactaatgttaaaatatccatttcacctaaagcaatgtacagattcaatgaaatccttatcaaaattccaaatacatttttacagaaatagaaaatgtaatcctaaaatatgtatgaatccacaaaatacccaaataacaaaaacaattttaaataagaataaagctagaaacattatacttcctgatttcaaaataattacaaagcaataatcagagtagtatgctactggcataaaaacaaacatgtagagcattggaacaatagagagcttatatcctacagccatgtcatgtacagtcaactatacaacatatacaatgactttcaatacgaaagtcaagaatgcatagcggggaaaggattgtctcttcaataaatgttacattgggaaaagtggctatgtacatgcaaaataattaaattggaatgttttctttcaccacagacaaaaattaactcacaattaattaaagactaaaatgtaagacctgcaactstaaaactccttagaaggaagcatatgggaaaagcttcatgacattggttttggcaataatttcatggatatgacaccaaaagtgcagtcaacaaaagcaaaaggagattaagtgagattacaacaaactaaaagaacttctgcatagctaaggaaacaatcaacagagtaataaagcagcctttagaatgggaagaaatatttaccattaattaaccagcagttaatttccaaaaaatataagaaacttttaaaattcaatagcaaaatatttaaatagtccaattttaaaaattagcaagggacttgaatagatattttttcaaacaagccatacaaatggccaacaggtacatgaaaaaatgcttatcactgatcatcaggaaaatgaaaatcaaaaccacattgagatattacctcacacttgatacaatgactattatcagaaaaacaaaagtttgacaagtttgtggagaaattgaaacccttatacaactgttggtgcaatgtaaaatggtgaaactgctatagaaaacagtatagatgtttctcaaaaaatttaaaatagaactatcatatgatccaacagtcccacttctgggtatatatctaaaataactgaaatcattatctcaaagagatatctgcacccacatgttcactgcaacattattcacaatagccaagatataacctaaatgtctactgatagataaatggataatggccaggcgcggtggctcacgcctgtaatcccagcactttgggaggccgaggcgggcggatcacgaggtcaggagatcgagaccatcctggctaacatggtgaaaacccgtctctactaaaaatacaaaaaattagcctggcgtggtggtgggcgcctgtagtcccagctgctcgggaggttgaggcaggagaatggcgtgaacctgggaggcagagtttgcagtgagctgagattgtgccgctgcactccagcctgggtgacagagcgagactccgtctcaaaaaaaaaaaaaaaaaaaagaaaaaaaagaaattctgatgtatacatccaagagaatattagtcagacttaaaaaagaaagaaattgtactgtttgtgaaagaatggatagaccgggaagacatgccaaatgaagtggccatcacagaaggacacatactgcatgattccctctatatgaggcatctaaggtagtcaaatgtatagaaatagacaatagaatgatggtttccaggagatgggtgagagggatgctgggtatattggaaagaaagaaggaaagaaaagaaaagtaaagaaggaaagaaagagaaagaaaagaaaagaaggaagggaggaaggagaaagaaggaaagaggaaagaaggaaagggaagacaggagggaagggagagagaagagagagaaaaagaaaaggaaaggaaagaaagaaaaagggaaaaaagaaaaagagaaagaaagaagaaagagaaagaaagaaaggaagggaaagaaggaaagaaaggaaagaaaagaaaggaagaaagaaaaaagaaaggaaagaaagaaaagaaaagagaaagagaaaagaaaaaaaggaagggataaagtaagcaacaataaagggacacaagtaaacttttgaacgtgatggatatgtttgtgacgtggattgtagtgatagtaacatgagtgtatgcatatatccaaagcactgacttttatacattaattatgtttattgtagactgattgtacctcaataaggctgtggaaaaaaaggtgtgtaataatactgctctcagcatattaatatttaaataacaaaacaatgtttagtgaagccgttttttaaccattaataaataaaatagactactttttttaaaaaagaaagaaaagatactctgttaactgttgtgttcctagcacctggacagaatgcctgccgtatagaatgcacttgatagatatagataaattttatatgctaaggaaatattttagatcatgggacaaatggggtttaggaagcatattttacaagttcacttggctcattggtgatactacctcaggttgctaaagagctggtaygtggcagtgggagaagagtttacaaggaaatagaagtatggaaaaagaatacatcagaaagagaaaatagcaagtgtaaatgtccagttaaaggcagagtttggtagaaggcacatgtgactatgatgtgtatatttatagagattggcataaggtaagtttggataggcagacaggaccatatcatgaaagagcttgtaggctatcatgaaaagttgaatattaacaaaatccaatgaaaaactaatgaaaagtttaagcaggtgcataacacaatcaaatttctgttttaaaaaccctactctggtacagagtaaagaacagatttgagtaggaggcaaggagaatgcagaagtcagtaagaaaaagtctcagtaagagataatagtggcaaagagaatggagtcaaaaataattagatttgctgtagaatagaaatgggatttgagagagaagaaatatcaaaaataatacaattaacaggttttaacaagcttgatggatggtagtgtcataaagtaaatgggggaaaactggggaggaatagttattttttgttgaaggaggaggagtttttgcatgttactacattaagttgctaaagagctgataattgggggtagaggtagagtttagatggagaaagatgggacatggatttgaattaatatcatttaattttcagagtccagatatgctgaccattatgccatggagccaattaatattatttaattttctagtcttattttatgctcagattacaagtatagaagaatgtgaacacagtcttttaaagaaatgcgtaaaatggaatcattattttgtagaaacttctgaagcctcaaatcagaaaagattttatatcagaaggaaattttattatgaataataatttctcaaaatggagaatgaaatctgtttttatattataattgtaatcactggagctaggcctttccatcatggaaacagctaatccaaattaatttttaccctgtaagatttttccctcaatagatatttcttcaaagagcgaaggaactgatcttgagttaattattaatgcattaatccagtctgtgaattaatctagccacaagcagctatgcaatgttatttattcttttccttaaaataatttcagaatggatgtttctatagcagctgtactccaagatagggcccgttgtagcatatcacaatgaaatataaacaaaatgactaagtgaaagctgtttgattattttgaattgcatggaacatagtgatggtgatttcttcttcaatcaaatataacaaacactaccactagtattgcttttagtagtgcttttctcttcctttttttttttttttttttccaaatttcattctagcaaagcaaatcaggagaaaatgccactgggatgtatacttaccatgtgagttactttttcccaacaacataatcattacacatccaaatgtctctgctataattccatgaccccacgaggtataacagaggaaaccagtggtaaagagtaataatttaataataaaataatgggttattatagtttgactgtatttttatttctattctttaatggcattatgattgtcttaatgatatttgaatagggtatggtttttatttttgataagatttttcaatgtgtgtgtatatgtactctgtgtgttcaatcaaaccatcatgaataactttttaggttagtttcttgttttgaggacattaataatttagaaaattcatgtttatgtaagatgggggcagcagcygggcatggtggctcacgcctgtaatcccagcactttgggaggccaaggcrggcagatcacgaggtcaggaaatcaagaccatcctggccaacatggtgaaaccctgtctctacaaaaaatacaaaaattagctgggcgtggtggcaggcgcctgtggtcccagctactcgagaggctgagacaggaaaatggcgtgaacccgggaggtagatcttgcagtgagccgagatcacgccactgcactccagcctgggcgacagagcaacacaccgtctcaaaaaaaaagaaaaaaaaaaaaggttgggggcagtttgatataatgtagtttgtgtaaactttcaattcaggtcttgctctaccacttattaatctttggacaagcagtttactttctttgggcctcactttcctcatcttcaataggagaataatgcataccttaaaaatcgtgattaaaaaatacytatcactggatctggtataaatattacttgcaaatggacaactgtcttgttgattttaagaataaaatagaaaaamattttaactgtcctatttttacagtagaccttaacatttggacaatgtgttgatgcttgtcagagctgacactttattagcagatgagaggtccacatgagcaccttttagactatcttccgaacttaaacrgtctgttctcttgaacagacccccagtagccacgtagttgaataaaatagacacctaacacaatattggccaagcctgaatctcttacttgataattaggaactaggaaaagaactcatgttactggagaagtgacctcatccttgaatgctctgtgtaatttcttggagggatttttaaaatatttttaaaaatactattatttgagtccccctccaagggattctgatataattagtaggaaggtacctggcctggacatcataatttttaaaactctctacgtgtttctggtaagtagagtaaaaaattactggtctagacctacacaatattaatcattctggataaagaagtagagaaagccaattggaagagggagaagaataaagtagctgtacatagaaagaaagaggacaaagcacgaaaaatcttcttactttcctcgagaattcccagctcttcctggaggcctggctgcatttctgcatgagtttcatgagatcttcctgtaactcatgataagtatctgaggccaattcattacttcccaccaaaggagttcattctaaattggaagtcagaattccagtagggagaaaaatgctctattttaggcaagaccttggcaaaagtgtgatgttggtgaatctttgtgtcatttaatgtgactgaattatagaaacacacacacacacacacacacacacacacacacacactcttaattacccagggcaattacttactcttcccactagatagctcttggagagactggcctaaaacacacacacacacacacgcgcgcgcgcacacacacacacacgcacactcttaattacccagggcaattacttactcttcccactagatgctcttggagagactggcctaaaacacacacacactctctctctctctctctctctctctctctctctaattacccagggcaattacttactcttcccactagatggctcttggagagactggcctaaaatcagcaatcttccagagcttcaatgccactctaygttagaatcatagaataatgggcttttatagatttggaataaagctaatgattatttcatctaaactgattatcaccttactggaaactaatttgaaaaagacactaagtacccaaggtcactagtctaatacattcagtaaatatgttgagtatctctctgccaagtcttatgctaggtgctgaaattaaatcaagygggagatagcatatatgtaagcaaataagtacagagtacgattaggaagcagctttgcttgtgggaagctgaggaggtttttttttctttctttcttttctgttttcatcagctatactgcaatataatttgtatataataacatttgccaatttccattataccatttgatgagttttgactgatgtatggagtcatgcaaccatcaccacaatcactcaccataaatgttgagtaggaatcatcagcctactgtgattcctgtgctgcgaaagactgagacatgaagcaaagggatgagttaagaggttattgtggtaaattcagtgagagataaccatgcttagaccaggaggtagtagtggagatgagaaacgtaatatatttggaaaaagggacaatagatttttctgacagactggctgtaaggtgtaaaagaaaaggcrcaaatgattgtaaggtttttggccaaaggtattggaaggatacagttgccattcattgaaatgggcaaggctgtagaagaagcaggtttgatggcagaaaatttgcgtcaggggttttcagtttaaaatgcctaataaatattcaagtgtaataagtttaaaatacaaatcagaaatatccaactgattgcaacaatctaatcagaggagaggtctgagttagggatagaaatttgggggtgtaaattatatcctgaataaactgtaatgtgtccatcaagaaggataacatcctaggggtgtttgatgatggatacagactgttttcaaaaaaagaaagaaagaagagatgattagcacacaatgtccagaggtgaggcttcctggatgctcagtaactgaaacatccagaaatattcttgggttatatatcggtaagttatcttggcctcagaactttgtgggaatatatcttagaccatgactagttctgatttttgaataggccttttctgagttcgttgttctacactttaccacaagccccttgtggaaaatgtgcccagccaagacttcagagtttatggcgataataatcacaaagtcatggaattagggcttggaaaatatcctaaagtttatctagctccaacttcacacccatggcatgactaatagataatctgagtcatatccaatggaaatgagctcacatctcccaggacagaccctacccctaatggacaactctatttcaaaattctttcttatgtgaaatacaaacataactcgctgtagttaattttcttttctgcatctaagggaccccaatgactatattcctgcagtttgtgagtttcaacttgaccataagtttcttgggtttctccccgttacagagcctgttacacagtttaggttttaaaacttcaacccttggccttcatgacacctttgcggtatcttctgtcaagaggcttactagactttttttttttagtttaaaataattattcatggttaaattgtgataaaacatacataatataaaatttaccatcttagacatctttaagtgtacagttccagtggcattaagcacatacatcatgtttctccagaacttttttaccttgcaaaactaaaacactatacgcattaaatgatagtttatcatttccccctctgtctcccttttttacacataaggaggatttttagtggagaggacaacaggactgacttttgaaggcttagttggaattttcaaagcattaacaccggcaggaaagaacattctaagcaaaaacaaaaaacgaaaggcaaaatgcaaagatgcattaatgatattgttttatttgagaaattataactagttcaataagtggaagcaaaaaatattttgaaggagggataggagatgagattagaaagggcggggagggagaagggcccagatcacaattgggattatataatgctgaggttctgctttattctgtatgtagtaaagaagcttgaaggaacttgcagatgacaatgaaatgaaaaaaattaagtgtaatgcatatatatttggggctcctgatggtctatacttgtcatggagttaatttttagaaattttattgtaagtgaataaaacctttactcagtctccccccaaaaattctaagggtgaagaaagcaaactttaaaaaaatagtctttaaacatccttgttattttcaatttttcttatgtctaggaaggacttctaaaaaggaaaggttgctctttatctttacactctaaaacttggacatttagcttttccttaatctccatttttaccattctcatctcagttctttaggacttcagcttcttttccttttgtagttttctttagttttcattgagtgtattttgaacaatcaaagaggtcatggtgatgtccaggttataaaatgattcttgctttacaatgggaagggagggagggaaatggcaaaaattcgagttctcatttttaaccttttcaactatgttagcggattcctcaatttcatagcatataggtaaatgagatatctgacaaaggataactagaatactaaaagcattttgtattaaaaataattattaaagataaaaatgtttagcctagagaaaaaaaggagatgtaggaagtatatgttagttctgcaaaatatacttgaggaatgccatgtgaaaaggtgattttatttatatctctacagaggaaagaattgccttcaagaataagtattttatatagatggatttttttttttttttgagacagagtctcacttgttgcccaggctggagagcagtggcgtgatcttggcacaatgcaagatccaccttcygggttcacgccattctcctgcctcagcctcccaagtagctgggactacaggtgcccgccactatgcccagctaattttttgtatttttagtagagacggggtttcaccatagccaggatggtctcgatctmctgacctcatgatccacgcacctcagcctcccaaagtgctgggattacaggtgtgagccaccacgcccgacatacatgcatatttttaattgcaatggagataataatttggttaagatatgtttggtcactgtcctcaaggagcttgtttttgaagagaaaattaacatgtacagccgactatgatgacagctgagtagcagcatattttaaactgtggaatagccacataaatatcttcttttgagaagtgtctgttcatacccttcatctactttttgatggggttgtttgtttgttttcttgtaagtttgtttaagttctttgtagattctggatattagccctttgtcagatggatagactacagaaatcttctcctgttctgtaggttgcctgttcactctgatgatagtttcttttgatgtgcagaagctctttagtttagttagatcccatttgtcaattttggcttttgttgccattgctcttggtgttttagtcatgaagtctgcccatgcctatgtcctgaggtatttgactaggttttcttctagggtttttatggttttaggtcttacatttaagtctttaatccatcttgagttattttttgtataaggtgtaaggaaggggtccagtttcagttttctgcatatggctagccagttttaccaacaccatttattaaatagggaatcctttccccatttcttgtttttgtcaggtttgtcaaagatcagatatttgtagatgtgtgatattatttctgagggttctgttctgttccattggtctatgtctctgttttggtaccagtaccatgctgttttggttactgtagccttgtagtatagtttgaagttagatagagtgatgcctccagctttgttctttttgcttaggattgtgttggttatacaggctcttttttggttccatatgaaatttaaagtacttttttctaattctctgaagaaagtcactggtagcttgattgggatagcattgaatctgtaaattactttaggcagtatggccattttcatgatattgattcttcctatccgtggaaatgtttttccatttgtttgtgtcctctcttatttccttgagcagtggtttgtagttctccttgaagaagtccttcacattccttgtaagttgtatttcttggtattttattctctttgtagcaattgtgaataggagttcactcatgacttggctctctgtttgaagacatttgtgcagccaacaaacatgtgaaaaaaaggtcatcatcactggtcattagagaaatgcaaatcaaaaccacaatgagataccatctcacgccagttagcatggcgataacttaaaagtcaggaaacaacacatgctggagaggatatggagaaataagaacacttttacactgttggtgggagtgtaaattagttcaaccattgtggaagacagtgtggtgattcctcaaggatctagaaccagaaataccatttgacccagcaatcccattactgagtatatacccaaaggattataaatcattctactataaagagatatgcacacacatgtttattgaagcactattcacaattgcaaagacttgaaaccaacccaaatgcccatcagagatagactagataaagaaaatgtggctcatatataccatggaatactacgcagcctccaaaakggattagttcatgtgctttgcagggacatggatgaagctggaaaccaccattctcagcaaactaacacaggaacagagaaccaaacaccacatattatcacttatatgtggtagttgaacaatgagaacacatggacacagggaggggaacatcacacattggggcctgttggggagtggggggttaggggagggatagcattaggagaaatacctaatgtagatgactggttgatgggtgtagcaaaccaccatagcatcctatgtaacaaacctgcacattgtgcacatgtatcccagaactcaaagaataatactaaagtaaaattgtggaatagtaaataaaaaagaggtaactacttcagaaaagtgtataggtggtagtaaggaaatgtcccaasaagtatatgcttgaatgaatcagttgagtttggaaggattatgaagagtttaacgcatgagtaaagtcttagatttatttgtattttaggcaggtaaaatacatgtaacagtgtgatgaactattggtagtttaaattttgtgtttatttggtggtaggtggtagatttatttgtatttttttgcatataaatgtcagagaccttgtctgttttgttcatctttttaaccccaagttcttaacaaatacctgctgaataagtaaatgaatgaaaatagttctatatgaacattaataactgagtctaacaggtatattggcactatgttataaaaaaatcagactatgccatgcaaagaaattttaagttggtttcctgaaaaatatggggaagttaatgcattttaatacttaaacatataaccaaatattttcaatgtaattaattaaaataattatattttttatgatctataagtgtctcagataaaataatttctctgtaatgacaagggaaggactttagaatgggtaattttcagcagatggagaagaaagatggaatgtgaaaagtgcagaggtagggaggcacaaagtattttggagaagcaatgattgaaacattttatttctgaggggtggcttaagaacataagccaacaagacagcaaactatatattttattgtggctttaccagtaactgagcaacttacagatattcatttagcctcctttggcttttgttttctstttgtaaaataaagcttttaaagtagatagtctctttgattgttctagctctacataataatacatagaactgaaaaagttgattcaggacactctatggaggaaactaaagggcaggctctttactttgagcttcacttaatgggttttagagtatcaggatgatatggtttgactgtgtccccactcaaatctcatcttgtattcccatgtgttgtgggagggacccgttgggaggaaattgaatcatggggccaggtctttcctgtgctgttctcctgatagtgaataagtctcacaagatctaatggttttaaaaagaggagttccactgcataagctctccctctttgcctgctgtcatccatgtaagatgtgacttgctcctccttgcctcccaccatgattgtgaggcttccccagccaggtggaactgtaagtccagttaaacctctttcctttgtaaattgcccagttttgagcatgtctttaacagcagtgtaaaaatgaactaacacacatggcttttaaaaattgttttagtttaccttcaaatctatctcaattaacttgtatttattattgaaaatatgaaaattataataagcaaaaatttaaaaattaaaggtcatctaaaaccctgattctgagatgtaattctcctagcatgttgatgtttatcttttgtgattgatggataaacagaaacgtacagcaaaatagatatatrtgtttttccaccaaaaacttggaatttacatataatattataatattaactcacagttttactttgtacataataaaccctctttcatgtcaataaattattttcttctgtatcatttctgatactagcatagcattcctttttacaatatagccattatggaacctatccccattgttcaacacctaggttgtttccttatatctgttatttactaacactactggatgaatggaaaaatagtattktctgaaattgaaaatctaaataacatatttgttaggagggaatatgatgagataaaagagttgaggttaaagtgtaagagcaaagcatctacatccaaaggccttgatgtctcttggaaatctgagtttggakattgcaattgaggtttgggaggaattaaccttgtgatgggagctgaaagtagatatgcttgagttctctgagcaagggtacagagggggaacaggcttttaaaattcagaaaaggaggtgtacattagggcttggatatatgatgaagctgaacagactgagttgctatagcacgacaaagacaaagctaaaaatagccctgtgttgcacagtatgaaaaaagactgcctatgacaagtgaagattttagattatattataaacacatatacatagtagcacttttgtgaataaaagaaaaaatatataagaagctgtatttctcatttgaaagaattgtgtctgtgtgtgtgtgtgtgkattttattattgtttgctttgttgtgtttggtttttgttttgttttgaagcttaaggaaaatcttgcaaaatgtgtccaaatcattttctttctaagtattaaggcagcaatgttcgtaagaatttcaaagcaattacttatttatttaaaactacataaattaagcaatgcaagttgaactacacatatatctgcctccttgggctgttgcctaatgccatatatagctacaattatgaacaaaccaaaattcatctgtaagattgaaaaaaatagatatttcaacacacagccataaaaagagaagaatacttgtaagttcacttatttcaccttgtaaagtacagacacatgggaccatatgtagttatgctattgccatcaaaggcaagttggctcaacattgtttctaagacagagaagttgcttctatacttttactgatattaatcaacctgtagtgtcaggaaattcttctttagtctaaccctaaaacttgcttgattgaatttacattatgattacacaaagctaagaaaataccatcaagcaaggtttcataaattaagtacaaagaggctggttagtgggaccaggagaaaaattctgaaattattcccttttgtgtttgaatttcagtatgttttaaataaagttgtttgtttgtttatttaattgataatactttccatacttcctttgaaatttaaaaaggatgatatcgtatatattcggtttactgctaactgactttttgccagtttttgtcattgttaacatccatgcgtggacagatatacatacacacacctcaaattaacctccaatttcctatattttacattgtagcttttgtatttgctaataatccttttaatagtatagcaatcctgtgtgaggacagaaaaattatgttcacacccagactaaccaatattcagaaatgtgccttgaagcccagaacatccctgggagaaggtgcctgccatagctgaagcctggatcccatcaggcatctctttgcatgtaccagagacacattagtgtttcaattgacaagtttgatgcctttttacatattaagtgaactttgctttgcattgtaagtggtggagggccagaaataatttctatgcaagtcatggaaatctttatctacacaagacacactcctataaaattaaagttctgctcaaataacttttcttttgagtgatgattcacaagagaatggatttctacttttgaattaactagccctgtccattcagtaactgctttggctgagaaaattcatcctttttatattttccaatgttatttgtcttttggagatagagagagagaaggggagggaggaatggagtgagagagacactttacaaacaaaaggcctgatgcaatctttaataacctccccagtcagaaaaagagacaacatttagcaagcacctatgtatgatgtttcagtgtgccatgtgctaagagtaagtgtttttattaaatcattccaataatcctgcaaagaagcattattaccatgatcatttaacaaaggtaaatttacagttttgagtgccagtcgaagattttgacgtaaactatttgggacctatttggtttcagaaaaaagaacaaacccccgtaatgcatgagaacactacccactttccaaattaaatgtctccctgcagcttatgatttcctgaattttccagtcttcctgtgaggtagaaattaggcaagcagcattcctgctgctatactgaaaactatagagaagaaaagacagggacttattagttccctttcctaaaatcgcctaaacagtagtgaaattactggaaattgaatttaggcctcctgacttgccgttgcccatatctctgagcactaaaggtattttcataacttaagtacaaagagactggattggaccagggagaaaaattctaaaattattcccttttgtatttgaatctcagtatgttttaaatacagttgtttgttgatttaattgattttatttctgctartactcttcatactgcctttgaaattaaaaggccatattatatgaattcagttcactgctcactgactttttgccagtttttttcattgtaaacagactgttgtaatctatattaattcggatgctgtgttgaagtgatttttttggtaaaatattatatggacaatttagatgtaatatgaaaccaagtattggtttgtattttgcagtcacaatatggagcttccgtttctgccaagcctgaactacccctcttttacactcctattgatctggtggacattartgtagaaatggccggattgaagtttntaaatccttttggtcttgctagcgcaactccagccaccagcacatcaatgaktcgaagagcttttgaagctggatggggttttgccctcaccaaaactttctctcttgataaggtaagaaaatattattgaagtcatatagaaatgtctatnntatattttaattaaggtataaacattataatggattttttttactaagaaatactacttattaaactatttgacaagacctatcattacacattaatctttagtttctttccttcctttctgtcccatggaagaaggggcaggcatatattgctcatttagtattgtctaggaagcaacaaagatataaatattatgaaagtgactttttcatttaataatctcaaactcttatttttgtattattaattgtttcattatttttggatgcctcagctcaaagatagggacacaattgatttggtttgcacaaaattctggaattcaatttatgttgaaaagaatctcagtgtaacttattggtattggtrataagatagattctttataaatttggaatacagaaacctttctcaaaaacaaataccctgagtttcatttaacattatgactttgtacttaaccagaagtggacatcttatacttagtaggaaataaactacgtattaaagttgagattgagtctttaaagtacacaaagcatataaatgcatgttttcaaagtaagatgctttatacaagaggattgcatccttatatggttttgaattagaaaagaacaacagactttaacatttttagaccatttattgataaattacaaatgctaaacctctcaatgtatttaatactaactggtagttagtaataattaatgtatatgaatgtgtgaatttagtgactaagaaaagagtatcattatttgaatcagctttatccttaggcaaagaaaataatagagaacaaacatgccccattaagcacattctctctttttcctcttactaggatcaatagctggcattattatggctaaaacattaaggctgtcttactctgacagctttacaagatgcaatgtgtaagtgtggtcaggaaaatctagagaattctcaaaagtcagaaaaaaaaacagtgcaggaaaaaaatccttcgtaaagattttttatatttaaagagaagttattttttcaaatagatcaactgaatattttattaaacaaagtgtgaagcgtaacagaatatactagattcagctttagaataccatgaatcaattgtttataaccttgtagaatattgatagtatatttgtctttgtttcaattgattcgttaagaattactgagaagctgtaatcaaatgtttaatctattggagaaaactgagtctcagatagcatatactgactatattagttatgctattaaaaaacatatatgtaaaccgaaataggtggctaattgggcacaggtgaagaattatagctgaaaaawagaggtgtttgctgctttgaatttgatgttttcttcgcttgcaataattgaattctgattaatcagagacatcagtctttacactgttggtgacatgcattgatttgtgatgctgtgtctttcagtaacctaggagcacttgcctttattaggatcaccagcagaaataaatgtggaagctaacttccttctaaacctccaatttgaatttaatctatcaatttagaagtstgtgatgctggttcaaaaggggagttatgaacaaatggaaattaaatttggcacatgaaatgtaaccatgcggggttttttggaaaccctattttacttactttgatggtgggtacaacaaaatattgtgcagactattttaaacatatttctgcaaattgcaatgacaaaaataatgaagccaccttgggcttatgtaatgccattttcaaaaaagattattttccatacgtgattttgcagagtagtccgtttgcctcatagaggtctactttttttgtttccttatctggttcctaattagtgattaaatttgtgaatatataattacatcgtatgtgcttatttcttatttctrtgctttcctattgatgaaatgttggtagtatacaactcagtagtatgaacatacttatttccccacagccttttactaaagacgtctattaaaatattacatgtactatacatttcggtgacattatagtataccaatttagattagccttattataatttattatggcaattgaagaatctatttaaaatgaattaaaattcagaatcttgacatttgaaatttggatgctcttaatatgacaaaggttattctatggggttttgttatcatatgaaatattaatatttcacaatacaattttgatgaagtacaatttgccaagcttgcatatgataaagaaattaaatgcttaccaagggagttcggtgaaaattagagccctgactgaacatctgctagaaattttattatcctgtcctactgacagtgtggctccctcgttgtttttctggattgacagctgaatattgcactgatttctgcagcaaatatgtttgcgtgaactttgtttccctttttttatttttttgggagtttggaacatgcttttgattttcatcctgtatatatatatatattttatactcttgacatttgtagatgccagattgaggtctaatatgctgtagcaccgatagaccattgacttacagtgaaatgccagttgatatctcagtaaacagaaatattattattctttactgtgcagtctatataaaagctgtatgtgctttctttagaaaggcaaatgatcatatttttaatgtcaaatatgaaaagatctgtttgcttttgtgttaaataacatcaaaaatggcttttattaactatattcttcctcttcaaatctgtctttccaagaatgtttcaaaataacaaggttgcttttcttgagattctatttatgttttataaagatagtaaagtcatatttaaaatatagttatgaaatcatttttctatacaaatgtatatcggctccaagtttaaattttgaaaggtgggagagaaatcratctgtcaagcttgattaaagctaaattatcatgacaaaacagagaagtgatctgtttaagagggaatattagaaatggtttggacttcacataaaataaccccttgacctgtgttcacattatattgataggaagtagataaaaacattttgttttcattaattttgtccataaattttgttctcttggagagctacatattatatactgcaaatctgtaacatgaaactgcaagttgcatagctttattactgcacagataaataaactaagaagtatttatttctatcctaaatcaaatctaaacccaagcaacagttcacttcacttgtaagccctttctatacatagattaacttgtgattaactttaattatgaaaatatctcaaatgaatagattttgttttaataagtatcaaattaggtaaataagtatccatgtaataggtctctcttataaaatgctaagaagtaaagactgaaaatatttaagcctctttttttggcatcaaagtatttatgtagctgtttctgtaaaacacaaccttataccccatagcacaaagcttaatgtataggagaggcttgataaatgtttcataaatattcgctggataaatgaatacatagatttttttggcaagagcatatcgagtttatttttttcccagtatatgaacagacagttaacacataaaagaattgaatgttttgagtattgatctcaatcgaaggagaaaaggccaattaaaaaattttcatattctatgttgcttttctatagtgcatctatacgtgtctaaaaatgaaaatgtcagtgaaatttctgaatgtatagattgtggtttaagacttagattgttgtataagcctttaaaatgcagagaatttttgagaaaacagggcaagtatcacacaatattaagaagatacgtaaaaatcggctggcctaacttctaactgcatgtattggtagtcytgagagaagaaatgtaacctgttcttgaatgcttttagtgacaaggaatatactacatctttaaggcaatataacctgtatgactgtagaaagatctgttttagaaatatgttccttttattgaccccatatcacccttctcataaatttcatccatgttttatatatagttctgccctctgatacatcatggaataaataagagtaatattaatataaatgaattatttaaaataaaatgttgttgttgttgttttccacaagtaaataaatacgttagaaaaaaatctaacaaatatggagaagcagtgtagtgtggggaaaggtactttggcctgggaggccctggtcttaatccaaagctgcttctaaatcactgtcttggacatgtgtaatattataggtcattgttatagttgttatcattattcacattattagataccctatattcagtgcttaggatgtatagactaaatgtttttgtaaattatttcatttaatcctcacaatctgtttataagatagatagtattgttttcagatgaaataatagtctgagaaagttaaataaattgtccaggacttaagacaacagttatctatttgactatagtcatgtgggttggcaatttgggctcagcacgcacgatcagttctcctacttcacagggtgtcagctggcctcaatcatgcatttacagttggttgtttggatccctggggatcaagatgttccactaatgtgtctggagcctcatgtggggcatatagcaatcatgtgggattgctataattgcggagatggctgagcttttctctctatctcttcataatctctcttgcctcacaatgtcttatcaaggtggctggtttaggtttgataaggctacttcacaaggctagtagtgttctaggaggacaagagtggaagctgaaagatctcttgacacaaagactccaaagtctacacagtgttacttccgtattttattcaaagcatgttacaaagtcaatgtatgttcatgaagtaggtaaataccatccacttattgataaaaagaagtgcaaaaccacattacaaagggacatgcatagaagtagggaaggattattgcagccatctttgcaaacagtcctaacttgccctctgattagagcaattcacatccctcccaaatgtaaactgcatccactcctttccaagacacccaaaatatcatctaatcatggcattaggctcaaggttcattatcttatgatcttcatcaagtccaaatgcctatgagattatttggttttagtttctttttactgaggattctgtgatatagaaagacatgttttctatcttccatatacccaacacaaaacgatacagtcaagagaaccacagtagataaaatctcctttagaaactggagaaatggaaggcacatagcaatcacttgtccatagcaattttgaaattcagtttggcacatattttcagggcctcttgctccagggatggagaatcagggtccatttatgctccttggtaaggatgtcctaatacatttttcctatctactgttggctctgccttctgggctactgattatctctgggctactgrttttctcctctgagtttttttkttkttgttgttgtttgtttgtttgttttgtaaatggctaatgatggcccctgttgacagctgagtagttttgtcagcctgttcctgcccaaataaagttatagcaccctattcctctctttgttttgaattgtttcttttaatcctaactcatggtgatatcatcataaaactctgttaacataattttgaatctattaaggactaaattgatgcccaaagtcacatccataattctttttaaacagatttcttttatttttggatatgccttgctgttgtggtacaatgtctttaggaatgttagaagccctgagagaatctactaggacctgccttaggtctttctaaagtcttaacaaactgtcttactgcaatattcttgagatgatctttaaggtactttattttgagaaccttttttccatctaggagagaacaaatataaagaatagtttattttctgacccagtgtgtcctaggtcccttggattctgtctgttttgcatggcaaatttaaatatagccttatttagctcttttctctcttttagtaccttatcacacttgggtagaaacactcaactgaacacgttcagtgttctttctagagatgtattatgttcactttctgttttccaaattatcactgctgacattcttgccaattgttctgtcaccacataatacaggccacttttccaaccctccaataacaattttcataccatattttaaacctctacaacagtttgttcaccattcttccagcctttactaagatcttactcttggtttttcaaggctctgcctgcctcacaatgccaaagccagrgccacatgttttatattttgttatgctagcaaacataacctatttcagcatcacgtacctattgctgcatatcagacaaccttaccaaaagcagcaacacgttttctgctcttgtttcgacagtttggcagtatggccaaggctcagctgggttgacttgcctttgcttcacatgatattagttyttctcactcatggatttgcaatcagttgacagactgtttggtggctggctgatggccggtcctggatgatttcattcacatgcctgggtcctcagctgacgtgattaggcctgtatctccgtatggtcttatcttcaaagagactacactggacttgttcacaagttgtcagtgctacaaaaaaggcaggaggagaagttgcaaatcctcttgatgccaaggctcggaagttgcacaatataattttcattgtgttccattctttagggcacatcacaagaccagatcaggttgtaacagcatggaaatggcccctcccatcaaaacactgaaatccaccacgtcaggatttgaaccaaggtctatttgatacaaatccctgcaatttccactatatcatgcttttacataatgtrtcctctctggaccatattactttatgtctaaaatgaaggcagtttgactgcactcatgtcttcagagacttagagttcagcctgagcatttacactgaggactttctacccactgcttcgtatagagtggcacctatgcttgtctttctattgagaaataaaagttgcacagaaattttatatttctatgtgcaatttcagagagaatacaagagagcattttgatttaacagcttctgtgaatctgctgtcatcagaagccaattttttgccagccacactggccccctttctagttctccaacatggcaacttcctccctgtcttaggaccattttgcttggtgtttgayctgcctggaatgctcttctctcagatatttatatgactggctcttttttcttaatcagttctcagatcaaaagttacctcctcagagaagctcttgttaaccattcaaaacccaggctctccatcccacattacattggttgtttttttcttcactgcacttatcaccatatgaaattgccatgctcttggacatctatttctgttttagccacttgaagtaagctctgtaagtagagagatattgtctttcttgctcactrcagcatgcccagtgccaagaacaatgtctggcagatagaaaggacgcaatacatacttgttagatgaatgaataattatagtattctaatttgaaccacaattccacatgacagctcttcagttacttggagacagctctcatgtcctatccataagccttttctttttcctttctaaatagttctgtttttcttttcataataaggtttgcagactttttaccatgtaggttgtctgttctcccatgtggattccaagaaacttgtttcaatccacattatcttaattgagaggaagttgctcctgcgtttgcacaaattgcacaaattgccagcacctatcaacgagatgagaactgaggaataacattgtcagkactgtaaatgctaaagataatatttaaagttgaaaatttcacaaacatgtcatgtaataatattttagagcctgggtaattctctatggattacaatacaraacatcacaatttatttttgaaactcattttggaaaccttgttagaaataaagatctggattttttaaaaagattaaataaaactgatttacttatttattattaagagtttatctattacctcatcatgaaagtctatgaaacaataaattaacaatagtccagtgcattatttttgctgctatagttctagcttccaattttgtatatgattattttctatttattgcatagtattgttttcctgataatatacattaactaggagttataattgtttaaataaattcaatgtaagctttttatctgggagacttttaacatgctgaaaactgagatgacttctgtatactaatagtttatcacctagctaggttcttataacttagacgtattttattgaaattcataaaatcaactcatcctccaattataaagaattagtttattaaatggctacagttyacatatagtactcctatgggacatttcatccaagtgttcacttcaagactatttagcaagctcttctatgacgtaaccctcatttcttcatcaacaaaagaacctgtatgtgtgcttgcacactcgtgtgtacacattcaatattgaagctaaatcttgcaagttagaatctaatgaatacaccactgtctatccttaaagttttaaatcagtctctgttcgcaatcataccatgtttgccagacttagtctgttaagtaaaaaatatagattaagatgctttcaaacacaatttaatgcatgtatttcgaatattaagtaaaaatcttttaattatagccaaagtaatatttttaaccatgaagcagactaatcaattttccaatataattacatcttcaccactttcccatttcaggctgtgatttcacacctgttaattagttaatcattttggtagagtggacaaagtgaaactcaaatagactttttaataatataaattgacgtgtacaattttgatctgggttagctggtagatgaatctaacttgtaatggaaagtacctcttattcagtttccttttttaaaaaaagcaagtggtgtcaaggttaatggaaaattctcataattatggttaatggaaatttccttaaagtacagtcctgctgtttgagaaactgattttacccttattctgtctcacataattcttctgtgaattttaaatttaaccagttaaaaatctccatattttgggtatgtttagatgatacaatctttggttgaaattagttggattgaattccataatattctccttgcctttgtattttctttattgctttttaataagattctagtaactactatgtaatgatattctttatactcattttaaatactttataccatgattaccttactgtcagatttttattaaaggcatacctacattggctattttgttacaagactgactctgttttagtaaaattacagttcgctgtatgctcctttttcctaaaggactagcaatgtgcttaatgttcaagtaccactatttctgaaatgaggtgtcatgagaaataaagtgtcactaactcaaggaagttactggtgtgttagttaaatattcactcaaactgccctatcacacaccaattaccttttcttaccccactgcctcatctgcttctttcacttcagctaagcccattgcccttttcatcctgccctgctttcytcatttgcatgtttttctacaatatctcatgtgtctgaaacagtttctcacttctatcctgccaaatttaccctctatttatgtgaaaaattagcttaaaatgtcattaaagaaagtaccatttttaggtatctgggcaagatttgatgtattttgagagctcttataatgtccttttatatatactrtttttcgagtgtgtgtttgtgtgtgtgtatatgtgtrtaatgtatggtattcactttagacaacttaaactgtagttcagaaaatatatacaccaaaagatgtaagatgacttaaggccacaggaattcttagactaaaatgttacttaatactaaaatgttacttaatatgcaatattttattttttwaattattttataattttaattttttaataattttttattttcaatattttatttttttattttcttcacatttgaactgtctttattctagggagaagggatagcacacggatagtcacggtcatgagagaaccgagcatatgtaagatgcagcataatgtctcatgaaatgttataagtagctgtagagatagtgagaaaggcctgtggggttaggaatttaaatgttgttgtataaacagggaacctgttgttaagaggtttaagcaaagaaattacataattcaatttggaagagactgttaatcataatacaactactgtttatcatttcaacaataactttcacttctctcctcatacaaactctcttttctgacaaaactggttttatcaccaggtttatgtttgcatcgtctataccttaattttaccattctttatyggtaaggagacatttattgttcttcaaatattaaaaggccaatgaccacccaagtcccctggagctacattaatcaatggttatcttctctccattgtctgagctcttatagaattttactcaatggacacaagagggaatggattccttttaaactccaccccaccccccggcccctttcctgaatggaagcctttggagatcagatctcgtgaccaccaggccctgcaaagggaacctgctgactgactacctccctcctcttatcaaccagttttattttgcaatgtaatacattgttcagcaatataatgaattttaaattgataaatattattacctcttgaagagtattttcactttcatggctaaatataattttgtacagctataatattcctctttaggagacatacttttgtttagactaacgtttatctaatgggtacctccaagcattcttcaaaaatacttcccatcacttgggaactcttccctatggtgcttttgaatctttggtcatagcttgctctctaggaaactcctaggaagctattgagtaacttagcttttctctgctgcaacacatttgcctttccaagggaccatattgaacagagcttaaggtgacttcacattacttatttaaatatgggtcccttaattggtccacaggaaaatcttacatttcctttcccctgacaaattctaggaatataggctagttgctgtacagttgcatctcttttagctcatcttttagcaacagacaactcasaccttttcgatatatcaagcagagtgggacactgtatacggtgcaccaacctccaaaaaagaaaataaaactgcggggaacacatataaagtgctctgaagggtcccttttaaaagctgtctctcaggatttgggatgacagtgggactcatataatcccagaagcatgctccaaagaaaccatgtcataatctccaacatccatccctaactttttgttaacattttgtttccatattggagtgaagggtgtaagagttccctaagcagatttttgttatctacttgaacatttctgtaagggaaaaatttatttttgtgatttatctcaatgccccttaaggtctcagccaaaatgtatattttaatattctgttgcattaataatatccatattgaattttacttatggacatttagtatatgaaaatgcattatttaaaaacccttacatttcatacaactatttgcatatagagatttttttttctggattttgtcagtaacatttaatttttttaatatggcagcaggttttagtycagatcttccaagaaaccgttgccaagatgtgattaaacatgcatggatttgattaggtgaaataattgtgggagacaatatggagggtgttgaggaggactgggagagccataagacagcaatagaagtcaagccatacattggggagagaagaaagaaaggttgagtaggagcatcatagagtgccttgcagactgagaaagcttcgacaaagccatctagagtcttcatgtctctcaggaaggggcctgcttagtatctctgccctgctcagtcattggctaagccacaggaagcatggctgcagtgaaaatccaggagtggattcattcacagcacagcagctggggtccttgctcagttatactcctgatagttggagttacgtgagattgccacaaagatatttggatcttttacaatactcagcataaggtaggcagccacttagtatatggcttttaaatggggggaataaacaaacattggtgtgatttttggacatctcctgttgatcaatataaagagaaatattgtatagacaacagagatccacaggtaaataaaatgtatacaaatattatcttattaagtattataatatgaaaagagaaaaacaagcttgcatgcagaaggctagagaggcacaatatactcttaagttttaaattatggttttcayagtgaatcatactagttattattgaaacgttacagttgtctccctttgttttgagaaaagtgttgagggttacctcttctgtaagtaatttgactgttaataaattagttaacttatctaaacttccacatgttsaattacaaaatagaccataatacctgctctgcctttttacagtattctagtgaggcttagattgaattttttttaaataaatatattaaaatgattcgtaacatgtaaaataccctgtcaataaaagttataattcttattaccataatctgtatgccagactaaaacattaatagttatgtgatcagttattaaagggtagaaagtcacttcccatctccactggtaccacccacatcacagcccccatcatttctcacagaatagtataccagcttcctaaaagagtcttgctgcttctactcttatcctaaattccggcctccacaccaccgtcagagtggactttgacatcttaaatcagatcgtggctgtttgcttaaaacatttcaatggcttctcttagcccttaaaataaaatccagaatctttgtacaaatcatgtcagcaaacagctcctgcctgtctctcggtcctcatctcattctactttacctggtaccaataaggccacaatggacttctctagattcctccaacctgtggcctttcaataactgttcttgctggtaattttcaggcccttacattcaaaaagaagaaaaagaaaattgctgctaatggcaaagtttagataatgcagaaataattatgttgtcatagtggttttatacttatggaagtttatcaggtgttagaaaatgtatgtggcagttaaccaattaaactatgaaggagtggtcacaaattctttcctcctgttctttttggttaacagaagatcttatgacttttaaatcattcaataaaatttatcctcttctgtaatatttctgaaagaaaagcgataaaggatcattctttgttacagttgttgggatctcattagttacaagtcatgaaatctcgagataatggaaaatattttatataggtcagaaattgcattacaaagagcagtgggtattatatgacatatacatgacctcagaggaatacatttgtaaacatgcttttctatgtaaaattaatgtgttaatttaaatgttaaaatcatgtaactcatgtaaagtgttaatgtaaacattaaaatgctgaggtgtgatttcttcgtagctgactcaaagaaaactaaaaaacgcttccctaccccagagcactttttatcagtgtttgtaggatttgtgtctacaactgctattaacatgagtaagatttctttttttgagacagggtctcatactgtcatccaggctggagtgtagattcactgtatccttgaactcctgagctcaagtgatcctcctgtctcagcctcccaagtagctaggactataggcgtgcactaccacacctggctaatgtgtttctgtttggttttgtttttaaagacagggtgttgttatgttgcccaggctggtctcaaacttctgggctcaagtgatcctcctgtgctggccttccaaagttctgggattataggtgtgcgtcactgcaccaggccacattaattggatttaattgagtagatctctgatacactgattgaaaatttactcaagttactataggcagagccaatcgggggtataattcatagtaaatttaaagtgttttacattaaaacatgaaatagaacatattaagaagttggctctataaccattttgaagcagatattaaagtagttttaatgttagacttctggtattaaataaaagacaagtttataaacagttcagtaattggacaggctccatattgattttttcctttgttatataatattacccacttctccgtccagaactatgtcgtacagggtttcagagtgctagaaacatggtcgctgttgtgtattggaatgttggaatgtgcaaagactgaaaggctgtcacagcagtcaataagatctgagaggtgttgactaattgcctgctaattacacagtaaattgtctaattaagctgatggttaattagggtacgcttgcacagcagtcttgtggaatttgtgtctgatgtctgggaagcagcttgtataattggcaaactggtaaggactggcagagaacatgactggaaaactccctgccagtggatgacagaatacggatttagtggaaacaaaagggttgtcatttttgtactgaaggttttgtttcagttctgcagctattctgcagtgagcaattgagaaatgcatctgaagcctaaattacgtgagtaaaagaaggcttaaaatgtgtgtcagaatgtaaaatatgctgcttgcatggcatgtatcacctctgatacactatctcacattatattaatctacgccttgtatgattctacagttcctccttttaacatatatatttggcaaaaaataaaaaacgataatcccatgcatctaaaacaatgcctcttttatgaaaatataagataacaaaatgactgattagaagacatttgaaataagagctttgaattcattatttaattattaatttatatatcactgtgaatcataaaaatattagacatgatacaaatataagtttggatgatattttaactgagtaaaaattgtatttgtaatgagagcattttcattttactgtttatgcagttttgtcatgcaactggattttgcctgtagtttaatttgtaagaaaaaatatttcaatacataattaaatgtatttgatttctgtgtggatgtgagtggtgtttgatgaattacctgtaaaatttgagtgcctttaaaactaaaagttctagaagtttgctttgttgtttttattgttctttgtagctgaggaagtttaacttttcatttcaataagtcacctatggctgaaatactaacataaaaattcaccctgcaaataaattaaatgaatccattggagaatataggtcctttacagatgatgttaggtacatacacattgcctcttcataagagacctgaatgtaaatgattgcctctattaccatttgccacccagattcatcatattttgaggattttgcaataagactttgaatagaacattaggttgcagttgtaacaaagaaccacaagttcacagtgacccttggattgacttacactattgtgtaaataaaacttgaaaaacttttcagtatttccaaactagattactaaataaaaattgtatttgtaatgagataagaaggcctaaattaaattatagtatcaaaaattgttgtgactttcttattaaataaaataaatttccctttgttttgagaaaagtgttgagggtcacctcttttgtaagtaatttttgtaagtaagtctgtatgtgattagatagatatggatgtttttttgttcccgctgttctccaaggagaatttgaagttgtatatatactatatatgtttttagatagagagaaatacacatcatgcagtctctgaaatgtctttgccttagcattaatcttggagatatatgcatagtaaatgaaaatatttactgttttaacacaaaaggtgtttttcaatgttctaaaatactagttctcagacataaaaatggatgtaaaataaaaatatttatttcaagaatgtagaaaaattatattcattccatttgaagcataggttacaaagtcttggaagacttcataaacaaattattcaagatagcagaaaaatgaatttaccaaatttaccaaaggaatacaaggctaaacaaacagaaatttgttttatttaaagatatattctgttttaaataaacagaaattgtttatttaaagatatatctcctgagggagaaaaatcagatagaggtcagtgctgtaactccaacccatctatattttgatccactcaacttttcatcttagtcctcatgaaaataacttttaaagttatttattataagttataaaggtttacataaaagaaataccaagtagatctatcagtgaaattaaggtcttagagaagaactctttataaatcataacttttaagaaaaaatatttctttatgtttacaaataaatttcaatgttgttttctattaaattttaatctatttcaatacattgtatgttcattatcactaagaataaatttctaatgttctaatcacaaaaaatgttaaatatttgaggtgatggatatgtttgaggtgatatgttaaatggtttaatttaatctttccacattgtattcaaaagtcatgacaccactttgtataccataaatatatgcaactataatttgtcaatatataaaaaatgtaaaataatttttaaaatgtagctggcttccattaatatatagccatcacaagagtgaattctgtatatcatgattttatgcaatyatctgttgagaacttcatgtaatactttactttggcttttaaataagtacacacacacacacacacacacacagagaaagagagagagaggcaaagtactgtgtgtgtatatttagtgtaaagacagtttctcttttaaccacttggaaagctttatccctgtaatttaaaaaattcagaatacgaaaatataatatttartgttcttaaccrtcaacttcatctccagaattatttgtttttataatttacgtataaaatccattctttaaagtgtaacttttcatggtttttagtatattcacaaatgtgtatccatcatcactatctaatttcaaaacatttctatcaccctaagaaagaaactccatacccattagcagttactccccattccccacatcccgcagcctctggaatccagtaatgtattttctatctctatggatttacctattgagtacatttgatataaacaaaatcatataatatatgactttaatgtctggtttcttttatgtatttagtataatatttcagggtttacctgtgttgtagcatttatcaatgtaatgcttcatttctttctgtggatataccactcttgtttatccattcattagttcataacccttcatggggtatttttctacttttacctattataaatatttcttcattcatatgtaagttttgaggggagatacatatatattcaattccctttggaatatagttaggagtggagtttctgggtaatatggtaactctatttttaactttttgggaattgctaaactgttttccaaagcagctaccccaatttacattctcaccagcaatgtatgatatttccagtttcttcacatactcgccaacattgttgtttgttgttcatcttttttgttataaacttcatagtgggtatgaagttgtttcccattatgatattgactcctagtgttattgataagtagaaaaagtaaaaatatgaaggcctaataatttccttaatattcttattaacaatcattktggcaactggttaatataattgacagttaaagtagcttccactttccatmtttttttccscttattcagaaagtgtggtcatcaggggcaatttgacccagttctrttagaaacatggtgtaatagcaaatctaaaaatagagttttggagttacaggcaacttccaaagaatagctagttatataggttctttgccgttggaagaaagtgttacaggatcatctatattcaatgagtagtctcttactgtttatatatagttcaaagaaatgaataaatattcctagctaaattttgagcaaaacatacagaattagaagccaaaaggaaagcatttaatatactgtagatagcaaggagaaagatcattactctaggagtctgaatcaattgtcgttccctgctcacttctgccctgcttggtaattttatcattctagatataatagcacagactgtgagtgttaaaaaaagacttgcctgagatctagcttgagtctaagagctttcatttacagataatgaaaattattctttaatcaaaagatttgttcaaattcatttggatggcaatagagtgctcttaaaccacatacttggcccccttagcattgtatttttatagtattttatactctgtgtaatttgtttgttcatttttatagatcatgtattgtataacaataagatacaatcctggttctcagagaacctaaaatctagatgtgatgtgcgtgagaaaacatgctatgagagaattagaaacgaagagctataaaactacagaggaagcaccaaaccaagctagagcaaggaatgccattggaaaaaagatgataccaaacagttgccctgcatagtgcctgtccaaagaatagagaatacattatagatgaatatcatgagcaaagtcagagagaaaaagaaagccccgtaaaaatgggtgtttactttcactggaaggatgatgtagtgagaataagaattagaatggaaccacataataaaggcccttgtttgatcatcaaagagagtttgaactttakcttaaaggataatgaactatatgcaaagaaggataagacaggcttggatgtgcattttagagaggattatctgataatagtgtagaaaatagtcacaagagtgagagcagatgaacatgttcattgacaaattatttctaggcaatgtgcttggatgttgaggatagagtggagaggaatataaggccctaaattcatggagcttacagtgtaatacagtaaggaagaaaagatattggctcaaggttgtatctagagcaaagtgaacgtatttgacatgtataaaagagagtaaagtagcagtcctggtgactgattgcatgaggctagatatgggaagagagaagttaggaaaaactctggtatctctgacttgccagctgtttattgttgttttgcaaaggaagtgaacataagatgagaaaaacatggttactatgttctgtgcagttactgaagcaggacctttcaatatcaaaagaaaactgtcaataggtacttttattctccaactataatgatgtcaaatatttggaaagaaaaggtcaacctaataaaggacctgcagttattaaaattgatctgaaaatgttaataatttttcagatgtgatataggtactaatgcagagttctaaatttcaaattctatttaattattctaaaattagatctaaaactaacatagaaaggggaaaagttaaataacagaacaggatgttaaatcaatatgattaattaacttgatataaataacttgagtattgctatgtttatctgtaaatcatttatcatgataccagctgtaaaagaaaatcttaataataatgataatgatgtgtgtcatcctcccacccagcagaggtgtcatgacaaattgttaacaaactgtcttacagcacttcacagattcaaatgctaatgtaataataatataatcaataataataaaatcaacaatataacaaaccattttgatgtggcttgggaagagaaatttattaaaacattgagttcacatgaataaagttgaaaaacagaatgatttacccttttaagtctgtatttacattttgacttttaactttcaatgaagggaagagggagcacaaagaaaggacactgcctgaaactcttaaaatctgatttctgtattctttctggacattacagaaattaatctacatattttcatccaactgtatctccccaaagtatgttttgacatctctctctctcctgcttatctgcaggagaaaggccataaatcttagcatgcctacaatgccctctctcatcttaactttctcttagtcttaattcctcccaccaacctcttcccataaaggagacacaataacagaagccttaacatgtttaaaatatttgtccctttggaacctgataaaatttctcagacttcacatgatgtttttgttattcaatccacaaactatgattgtgcacatggatgcgcaggccgctcattactcaaggtaaaactgcctgagggtgccatgcacagtctctgaagatggcttgtgcttttctgccccagcacttgtgcatgcattgtgctcgtatctgaagagctctgcccagtattttgacttttgagaatacaattcatcctcaggagccggcttagatgtgacccmccctggaagctttcttttatcttaaaattatgtgtgtgtgtgcgtatgtgtgtgtgtgtgtgtgtgtgtgtkttttcttttttgagacaaactttcactctgtcatccaggctggagtgcagttgcatgattacagctcactgtagcctgatctcctgggctcaagagatccacccgcctcagcctcctgagcagctgggactacaggagtgtgacactatgcctggctaatttttgtatttttcatagatttggggtcttgccatgttgcccaggcttaaagttgtgttcttataaactgtaggagtcctagaaccgcctgtgttaagaggaaaaagacagaaattgcaatgaaattgcaaatctgccactaacacactatgaagccttttaaaatgagataggtgaaccagctatcagctcttttcagttctatcatgctaaatttaaattcttttttttaagctgagcatggtggcacatgcctgtagtcccagctaattagcaggctaagatggaaagatcacttgagcccaggagtttgaggatgcagtgagctatgctcgcacctctgcactccaacctgggcaacagcaagaccttatctttaaaacaaacaaacaaaaattaaaacattttaaatttttttagagttatctgtataccaggtccattttcctctgtgaaactagcattgggtagttattgtgtatatattatttgtcaagcatttcgaaagccatataatttacattttctcttttactactagcaactcactgtggtagatgtcataatctccactgcatggataaactgagctttaataatttcgaattcctctcttctgtctgtccctacagtcatatctcagttccttgaacacagcagatactcarcaaagactgagttgccctcttctatcttgttagagttttttgcttccagatggaaatgatgtgatttatcacattatagaaatcgatcaataatatttgtgtgctatcattttgctgcgggtagaatttaggtttctgtaggtttttaagaaagaaatgagaaacttgttaaaaggtttgctgtgggcctctttttaattccattattttagggcaccagctttctcccttttgagtcccatagctcatgggaccatgtttggctattcattgacaatcattgttttgttttctccacctccctagtcttccctccagtaagatgttttacatcccatgaatcataattcccagttcttggatgaaaattgctccacctgacattaaccaagtttactagcaagatcctgtattaggtagagcaaattcaaagccaggagccctatggagaaggcaatgaccctgatctcacacctttacttcttaaatctttaaagacaaaaataaatttcaaaggcaatgaaaaagttttttctgatttgaactcctctgggctctggatttccatggcttccttcatggcttgtgttttagtacagtggtatgaatatgaaaaccgttagtacgaggggattatcctctctccagtgctctctgcaatattttaaaggtgtcccaacattataggttgcactgaaataagacagcctacttggtattacattctgtattcatatttactataaaatgtcttgctagagcatattccttaacttcctgtagagaaggatgtaatgtacaacagagaagtgcattttttagaaacactgaaatgaaagttgttgattttaaaagacatcttgtcacagatgagtgagggagaaagagatcaaaccagcaagtctagccaatccaacgtttcattcatgcatctcttcggcttagtgctttccccttcggtatcattagcattttcatttcgaaaaatgacagtctgcagtggaagcagtaaaaatgttcaacctgtggtttaaattattgattttttagaatattgaagcagtatttcaaatggattttgttagagatacttctgggtggggggtttcaaaggtaatttgatacccaaaagcctgtatatttcaaagagtttccatttttttgaatttctttagactctggatgattggataaaaatgtttattatcttcaggattgtaagtagcagatcattgctgcttgaacttgaaacatatatttgcagactgtgctcttcatgatttattgtgcatgctcattctgtgatcaactggcaaaataaatcttcatttagaaacaaaagcattttaaaataatggaaaagatactatgatytgcatacgtggaacgtcaatagtccaattgatagctagtttactgtaataaagcatgcaagggtggttctataagaatggattttaatgaagttcctcaaattgtgttatgtgaatagggagtagagtgtgaccacagagattttccttaaagtcattttaagtctctcaccacagtcaatacttacatatgaacagaaaatattttgacaaggaccaggattactgactgctgtgtgtatgctgtgcaggtagtttgctattcgcagcatgtttctccttatggaaaaaaagctacttaaaaaattacattatatcaaaatgccttgatctgcaatcattccacaagtccaagccctattgaagtcaatgagggcttggagtacaaatttatgactatatcgagcttaatatgtggagatttgcactatattttgtaatgtcaaatatcacatagcaatgagatgacacaaatttgaaataaaacctgatatccccctttgacaagtggaaatgaattaaaaatacagtatcagaagagatctttttgaggcattgaaacataaaagggaaacctgccgcagaatacatgagatgtatccataataagccctgtaacatttaaaccaacttgtaaatgcctttccaaaggcagtgctaccccggaagttggttggagaattgctgaatttgctactattggggaaaaacatgtttaatatgatggtgcaaaaccgtaagatcaaatctttttgtatagcaacccccttttcatctaaaaactttatataatagacaatatgattaaaatagctttaacagcctttagagatagaagttttaaatattttcatattgtttatattgttatttgttgaaattttagttaataaaactgaggcccagagaattaagtgtactattcagcatcattcagctgttaaataaggaagccagcattcttccttggtttgtataattgcagagccagtgcttttctgctacacaactctgtttcattaaagatgtcactgaaaattggcctcaaaatcagcttaaaaaaggaaatgaagacacagaaaagcagtgagccctcatggttacgtagtatatacaaaaattagttatttttcagtttcaagggtgaagccactcctatctgcccccttcctcattccattaggtgcttccctcatttaaaactattcctgtgcacttatatcccaggcaccatgaaggaattaactcactgaacctctgcaacaaatctatgcaatatatattctattcatattattattatatcttatattattagtggtatataatatacaaatatataataatatactaattatattatatataatatactacgaataatatatattttattatgtagtatctatattatgaaataatatatcattaggttaatatattatatattaacaaatttttacatatttatatattataaatatttttaagtcattagatcattttatgagagatggaaatacaattgcaaattttaatcttagaagtatatgcagaattttatatgcaatgtatatattcactatttagttacatcttttaaatactaagaaaaatagcaaatcagttgcttactgcagaagagcaaatgtagtaaaataagtatttagtgaaaggtgtagccatcttctaagcttgaaaatcagttttttggttttttttttttagcattacatttcagggcaatagtattacaaagtctgaatcttaatttattcagagaagaaattaagttgaggaattccacctgattgcagatattaaccagttgttggcagtagacttgtccactcatgttatgcttcttgaaactgtacacctaagttcaccttctggtgggggcccagatgtaccaatttgtgtttctattttttcttttctttctcttttattctagagattaaacatccaacattccctgagatgcatcctctttttgccttctctctgcagcctctaaatatgaataatacatattatattattaatataattattagtaattataacacttacaatatactattatagtatataattagtacgttatataatacttatacaattattagtgtgttatactaatatataattgtaatatatgtaatatatatgttaataatatatatgataatataatatactatgtaatatataatatattatcagtatattctatattatattagtagtagtataataataaaggatgaaggtatgagacagaatggttgttcttgataaaactgttagtaagcggtatagcagatgagatttctactataaggaattgtcaatatgcagtgagttgatgatgacaatgacagcttatggtgcatttattatgtggcaggcagtattttaagcatctttcatataccatttcgtgtaagttttcacaatagcactatggagtagaggtagtataattattaacactttacaggaaggaagctgagtcacaaaagggttagtgacttgcgcaaccaggaacacattgttgtttatttggtgtaatgatgaaagtactaaatacatttcttagcctctagtgagtcctcaaaaaatattataggtattaatgttaaaggctatttctagagcattaataaagtattaatacttgttgaatgaataactaatgaataatcccacctctgcaatttattagctatgggactttgtgccagttttatttaaaatgctaagtttgttttcttatttgtaaaattattataatgaaataggaatattgtaatttactgagttcatgcatgtgtyaagtactcttgtagcatgtaacagaagtaaaactttagcaagtactcagggcatagtaagtactcaacaaaggctatcattgttaatgtagtttttcatccttattttaataggacaggagtaaccaggacaataaccayaggtcaaggctgtggtgtgtcctggtgtaagtgtaccatgtgtattgtctaccacaaatattgatgttgataaaatttgccaatcttatgaaaattttccagtattacttttattcctttgtatgtgtgtgtatttaggtctagacagttttatcacatgtagtaataataaggatggaaccctctgggagtattgtgtatagatgagcatggctggtcaacattttcctacctttattgtgctaaattcatccattctttagatttgagctttttgccttaacttcaaggtaggaacatgagctcaggtgttaaacctggtgcgcttgcttaatgtagcacataccaaaaattctgtggttccgtgaaaatatatttttcctcacaatgattactcctaaaaacaggattcctgatatcagtgagtgtaaatagtttaacaaagctatgggttgtctcttcaactacattttttgtactcaaatagtggtgatgatgcaggtcaggcaagcccccaaattggggctcagcccgggagggttcytggctttgcctaggaatgaattcaagggcaagccagaggtgttagcaacttttactgaagcggcagcatacacagcagcagaggtacagctcgttgtggagcagggctaccccatagagagtgtgcccagagcagcagctgagaggcagttctgcagtcatatttatacccacttttgattacatscaaattaagtggcagattatgccgaaatttccaagaaaagggtggtaactcctggattgttgggttgttgccatggaaaggggcggtaacctttggctgttactatggcaatggtaaactgacatggcacactggtggacatgtcttgtcttgtggaaagctgcttctgccctggccctgttttagctaggtctcaattgggtctggtgtctgaaccctgcctccasagttgagtcctgcctcctacctcagtgttacctagttataggcatgattcttctgacttagcacttgtaggttcacagtaatttgaggtaagcttatgaagtacagattaaacttacaagagcacaaatattggattaatataatttgccaatcttatgaagatttccctgttttacttttattcctttgtgtatgtgtgtgtatatataattatatgcagttttatcacgtgtaggttcatgtatttaccaccacagccaagataaagaacagttctatcatcacaagcaaccctcacataaccttttgtagtcacacttacttctgtcccctcactctctgcattcctaacgcctggaaaccataatctgtcctctatctctaaaattttctaatttcaaaaatattgtataaatagatttatacaagtgtaatcttttgaaattggcttttawaaaaaataagcatcatacccttgagatgcatccaagattttgcctatgtcaatagctagttccttttttttttgctgatttgtattccatgctatgtatataaccacaatttgcttagccattcacctgttgaaggatatctgggttattttcagatttttgttactacaaataaagttgctatgaaaatttgtgtactccttttgtttggacataagttgtcatttctctatgataaatacaagggagtgcaattgatgggtcatatggtaactatatgtttaatttgattaaaaagtgccaaactgtttttcagaatggctgtaacattttatattcccacaagcaatgtataagtgatctagtttttccacattcttgccagtacttaatatggtcacttgtcactatttttaaaaattattttagcagttctcttatgcatgttatgatatctcattgttttttcttgtttgtttgttttgttttttgagacagagtcgcgctctgtcgcccaggctggagtgcagtggtgcaatctcagctcactgcaagctccgcctcccaggttcacgccattctcctgcctcagcctcccgagtagctgggactacaggtgcccgccaccacacccggctaattttttgtatttttagtagagatggggtttcaccgtgttagccaggatggtgtcgatctcctgacctcgtgatccgcccgccttggcctcccaaagtgctgggattacagatgtgagccaccgcgcctggcctcattgtcattttaatatgaatttctctaatgtgcaatgacattgaacgtcttttcacatgcttatttgccatttatatatcctccttagtaaaattcctctttctccatattttttttaatttaaataaatatcctggaggtcactcattaatagaatataaagatatttctttgtctttgtttccactggtgtataattctccattgtgtggatataccaaaatactataatcaattatgtatgaaattggtcatctttaatttcaaatgggtcaataaataaatatccatgtttaagaaaattaatcgttttagcattttatttcttaaaaagtatgtgaaatatgacctaagagtacagataaaatgattcaaagatgactaatctccaaaacatcttatttttaatatttgcatggctatttctgatttatctttttttactcattaattaatgcttgctattttaataatgctatttagtgactttgaaaaataaacaagttgataacttatggagagaaattctgtatttatrtttagaaatagcttatataaaaaagaaaactttactcaattctaggatttttcagtagcctagtgttttaaaaactgagttataaacccatataataaataagaacaaaactaaaggtattaatgaaaatatcccaatgcctttggagttttagaaattctgaattaatcataaatttgtataaaatttgatttggatagcactaacagtgatataccttcccattatttacagaatcattaaagttgaaggattctaaattaaagtgatctatctgagtaatggatatgaaatgagtaacagtctcttaaaacaccaacatcttatactgatttatgtgatataaattctatactctctacccataatctccatggcttaagttctgtattatttttccagtcattagaaccatgaaacttatgaacgatctgtcatwaagttttggaggccccaactttcaacaacaacaaaaatgtgcgtctgttatttcatacgtaatggagtatagtacaaatgaaaaattgagtgttctcttcagcccttaaaaactgcaaaatggaaggccaaaataatttattaatgtactcaaatagattctatccttacatattttacaagtaaatcacaactgaactgttatccatgaactttataaatttcaaaaacaagcatttaaaaagattatactttaattagtcactggatagacaataacaatgttatgatgtgcctctttaaaattatgaattgtcacataatctgggtatttggggttgtgcattagtagtaaaatcctttaactaatacattgtattaacttcctgttaaacatagtagttttatcatacttcatacttattctcccaatctctattccatgtcaatattgcaatatcattcatttaaatattgcaatatcaattttttaaaactacagtatatatgcaaactcacaatgacaaacatatcaggagattgaacatagtaaaggataccaacaaaatattagaagacagaaagtgagtgtactaattgtaagttacttagccaactgcagatatctgaaactatctgggggcagccttgtagttgcttcaagtcaatattagctgaagaattttgcagaggatcggcaattatattcctgaaaatgaaactgaaaaatgaccacatgtattttaaaatgaaccaaataaatctagaaatcaaaattaataaaaaaattcaatgaattgattaaatagctgaagagaaaaatagtgatctgaagaaaggagatagaaaatatgaataaaatattaaatgacatggaaaatacaatgagaagttctaaaaaagagtatgtcaggctgggcacagtggctcacacctgtaatcccagcactttgggaggctaaggtgggtggatcacctgagctcaggagttcgagaccagcctggccaacatggcaaaacctcatctctactaaamatagaaaaattaaccaggcatcgtggtgcactcctgtagtcccagctactctggaggctgaggcatgaaaattgcttgaacccgggaggtggaggttgcagtgagccaagattgattgttccactgcactccagcctgagagacagagcgagactctgtctaaataaataaaaacaaacgagagtatgtcagagttctagtaaataaacaaaatagggaagatccaatacaaagaagttagctgagactgtccagaaatgttgaaagacctaatgtatacattgaggaagctcaatgaatctcaaacagaataaatgaacagaaactcctcattacactcatcatagtgaaataacagaaaatcggagacaaagaaaagcccttaaaagtagtcagaaagaaaagagatggcttaaggaaattccttgacataaagacagagaccacaatagtctaacataagagatgaattcatagttacctgagtgaatacagtgagcggaaaaataatcagtgcagagaaacagtacaatatactaactccatgaataaaaatataatgctattacaattgacaaatcaaagaagaaatattggaagttaaaactgtgacagtacaaagtaaatatgtattttaagagttggaagggaaagttgtgaacatctttcagaaagaagaacaaaatgacagaactgaaaacaggaaagaaaagacaggaaaaatagagactgtgactaatagctccatacctttaaaacagttgtgctacatggagaagtcagagcgaataaagaggagggaatttccaacaatataaaatgagaagatgtccccagaaatgaagaacatggtggccacaaaggcacaatgaaataagaaagacccgcaccaatatttaycatcttcagatttctaaacatggatttaggaagatcctagaaaattctagagtgaaaataagcaagccatctataaagaaagcaaaaacccaaaaaagcaacactggaagttagaacacaatacttctgaaaacctaggggaatttttttgtttttgtttttgtttttgtttttgagatggagtcttgctctgtcacccagactggaatgcagtggtgctatctccgctcactgcaacctccacctcccggcttcaaacgattctcctacttagcctcctgagtagctgggattactggcacaagccgccacacccagctaatttttgtatttttagtagagacggggttttgccatgttggccaggctggtctcaaactcctgacctcaggtgatctgcccacctcgtcctcccaaagtgctgtgattacagacgtgagccatgggacccagttggaaattatttttagttttgaattctataccaaccaaaatatcagtcagatgtcatgtcttagttcattcactttgtgcttctacaacagaatatctgagactgggtaatgtataaagaagataattttttttttttcacagttctggtagctaggaattccaaaatcaaggaatcaccatccgctctggtgagggccttcttgctgtgtccttatatggcagaagagagaagggcaggcaagctagctagcccaatgctgcttgaagcctctttcagccttttttataagagccttaatcccattcacgggtaaggagccctcctggcctaatcacctcttaaaagccacatctctttttttaaatttttttttaggtccagaatatatgtgcaggatgtccaggtttgttacataggtaaacgtgtgccatggtggtttgctgcacctaacaacccatcacttaggtattaagcccagcatgcgttaactatcttccctaatgttctccccaccagccccaacaggaccgagtcagtgtcgttcgcctccctgtgtccatgtgttctcattgttcagcttccacttataagtaatactatgacattggcaacacctgaattttggaaaggacccattcaaaccatagcaagggcagataaatacatttaccttccatgagccctttctcaggaagcaactggagagcgtgctcatctgaaacgagtaaataaatgaagaaagtgaacactggactgcaccaaaaagaaattctgataggactgcaaaggaaatttgaggctaagaggtatgcagtataccttcagggcagtctgggatcaggtaaccaagagctagaaggaatttctccggaaacagagcaaactgctcagttatctgatagctttgactttgtggaaagtcagattatgagccattttatgaagttaccatggtatgtgggaagacagcctgtgattcgggaaaagtcaagtaaatgaaagaacatttaagttggggtgagagtgaaatgagagagcggtacaagaaatgagattacagactgctatttggttctgttgtgaccaatatttatatagctacaaacataaaatataatgagtttagatttaactgaaaatgtgttaaatattttaggaagttggaggagaataaatttgcttgagaggttatataaaagagctgaaatcttagcttccatcataggaagttaggggcaaaggcagaggtggggtgaggtggggtgggagtgctttctctgtacaaaagtaactggcctattctcagtatccacaatcaacacagaaatgctaactgttctctttaatggctactcgtattacaaaaactaaatttgctgtctttgattcccaatataataataaaagtgcttccttattatcactaatgaaactggcctggatgtatcattttatccaaacaagttctttagccatgtgtacctgaatctgattcagcccttacttgaagaaaaaaggtagaatttaagtatacattttctgtgttagcactcacatggaaacggtatctttccttcaagttcttcattcttaataatctaatgatgtcagtcaatacttatagaattgtagcaatcttaaactctagtggaaaaagaaaaatacaggtgtttatgatgtgacattgattttarcagttcatccttagtggaaaatgtaattgaatatgtgttcagatggataacaccactttaaaggaggaataagacagtttaatgcaatgggaagaactggatacatccacatattaaataactgtatagttcactgattgacagtaagtctttatatctaggatttgttatatataccccttagactcctctttcaataccagcactacgcttgttcaattgttgtcaagttgacatataatatactttgttataacttttaatgtaatagacctttcttctccactcccataggagaagataatgcatctactttagtaaaagtaatctaaaaaaagatactttcaatgcaacgatggtttataatctactatcagtgcattatatccttctctagaaatgtttgtatgtgtgtgtctaaatatgtgtgtgtgtgaatgaacacacatatacagagagagagagagagtagagattataattttctgaagaactggtaatttaaaatatttatgttaggcaaaaatccatgccaatgcagctatcaattatgaaacattataaccaaaggaatcatgacttttaaggaatagcttgaattttgtcatttttagtattccaatttaaaagttgtattaatatatttggttttatttttctgtttattatctcataatagaatgtaaaacagataaaggaaaacsctttggtattattaactcactttttcaatagctgtgtaattctcagagtatggattatatacagtattatttgcttaaccattacttttttgatgaacacttgggttttacaatttttgtcactgtgaaatgttcatattttgtttcctatactataatttctctagaatagactcctataagtggaattactcatttaaaagtatatatattttcaatgttgatagaaactgaagataaatttccaaaagtatctcaacaacagttcacacactaaataatataagatagcatccctccctgcctctacctccgatctctagcactggatgttatcagtcttttaaaatttttgtcatattggccaaataatatgtgcaaaaaaaaatggcatctcatggttcgttcacatgtgcatttttctattagtaaggttgagcgtcctctcaaatcattacttacatttttctttcttcttctatgaaactgtgcacatcctttgactacatttctattgaattatttgcctttatcattttaaggagtacttttatacatagaagatagtaatctttaacaaatcagtttttcatattacattgtctttcagctttttataattttttttctttttgttttttgagatggagttttactcttgtcgccccagactggagtgcagtggcatgatctcggctcactgcaacctccgcctcctgggttcaagcaattctcctacctcagcttctcaagcagctgggattacaggtgcatgccaccatgctcggctaattttgtattattagtagagacggggtttcaccatgttggccaggctggtcttgaactcctgacctcaggtgatctgcatgcctcggcctcccaaagtgctgggattacaggcgtgagccaccgtgcccagcctttttataatattttaaaactaaaaacttcacttctagaaaagtaaaatgtacacaaggttaaacattaaataatgccaaaaatattttgatgaaattcagcaattccctgcctcgtcttttcacattcttcttccttgatcttgttaagctatacttgcaattactatgtttagatttgtaaattcatgcttccgaagagtatgactacactmcacttttttccaatttaaacattttctattgacttcctgttatacataactatcattagttttttctatattttacctgatttgttatgagtgtatatgttttttacacataattccaaagattctgtcagtttccatcggtcatctggagacaagtctttcgtattccagaagtgtacttcatttctgagtactcaaattactttatgccactctccatgtggcatatttcttttttttctcagtttgatattttattttcctaaaaccagtcatccagagattgttcaaaagggatgtatagtaggtatatttttagtatccttatagatttaaaatttctagagtaaaaaaaaattatttttcttaaaaagtttcaacacattacaccttgctttctagcatttaatgctgctactgagaaatatatttttcaggcagaaagaaatagaagaaaagcaggaagatacaagttctatattagggaaaaaaagtttcccagaaattctcagattatttctcactagccagatgtaagtcaaatggtctctcccagctgcaagggaatttaaagcaagttttaaattggacacattgccccctaaataatatcaggatcccattagtaagaacaaatataggaatggatgttggataggcaatgaaaagtaactgttgaatttggtttcaccataatttatatgactaataccttattccaaacatacctcacaaacataccttgtttyattgtgctttgctttgttgcacttcacatgtattttttcttcttttacaaattgaaggtttgtggcaacctttcttcgagcaagtctgttgatgtcattctttttaatagcatgtgctcactttctgtctctgtgccacattttgataattcttgcaatgtttcaaacttttttagtactattatgtctgttagggtcatctgttacaccaatgatctttgatgttattgtaattgctttggagcaccacaaaccatgcccatataagacagcaaacttaaccaatacgtgttgtgtgtcttctggttgctctaccaaccggctgttcctctgtctgtctccctctccaagggcctccttattccctgagacataacaacatagaaattagaccaattaataatacaacagtgttctctaagtgttcaagtgagaggaagactaactcatctcactttaaatcaaaagctagaaatgattaagcttagtggaggtggcatttcgaaaaccgatatgggctgaaatctaggcctcttgcaccaaacagttagccaagttgttaatacaaaggaaatgttcttgaaggaaattaaaagtgccactcctctgaacacataaatgataagacatcaaaacagcctgattgctgctatagggaaagttttagttgtctggatagaccaaatcagcacaacactctcttaagtcaaaggctgatctggaacaaggccttgacgtgctccaattctgtaaaggctgagaggtaagggagctgcagaagagaagtttgaagccaacagaagttggcttatgaaatttaaggaaagaagagatctccataacataaaattacaaggcgaagcagcaagtgctgatgtagaagctgcagtgagctatcccgatccagctaagagaactgatgaaggtaactacattagataacagattttygatgtagacaaaacagccttatattggaagaagatgccatctaggacttttacagctaaacaagaggagtgaatgaatgacttcaaaagacatgctaactctcgtgtaatgggcaaattgcagctgatgactctaagttgaagccaatgctcatgtaccatttggaaggtcctagggcccttaagaattatgctaaattggctgagcgtggtggctcatgcctgtaatctcattactttgggaggccaaggcaggtgcatcacgaggtcaagagatcgagaccatcctggccaacatggtgaaaacccgtctctactaaaaatacaaaaaatagctgggcatggtgatgcatggctatagtcccagctacttgggaggctgaggcaggagaattgcttgaacccaggaggtggaggttgcagtgagctaaggtcatgccactgcactccagcctggcaacagagtaagactccatctcaaagaaaaaaaagaaaaggaaagaaaagaattacgctaaatctactctacctgtactctttaactggaagaatgaagtttggatgacagcacatctatttacagcatggtttactgaacattttaagcctaaggttgagacctactgactccttcttgacaatcaacctggttattcaactctgaaggagatgtacaaggagattaatgtggtgatgtcttctaacacatatccattctgcacccaatggatcatggagtaattttgactttcaagtcttattatttaagaaatgcattaaggctataactgctatagtgatacctctaatgaatctgagcatagtcagttgaaaacatttagtggtgaatgggaagtatttaccattctaggtttcattaagaacagtcatgaatcccagcactttgggaggccgaggcgggtggatcacgaggtcaggagatcgagaccatcctggctaacaaggtgaaaccccgtctctactaaaaatacaaaaaattagccgggcgcggtggcgggcgcctgtagtcccagctactcgggaggctgaggcaggagaatggcgtgaacccgggaagcagagcttgcagtgagccgagattgcgccactgcagtccgcagtccggcctgggcgacagagcgagactccgtcttaaaaaaaaaaaaaaaagaagaacagtcatggaaggaggtcagaatcttcatattaacaggagtttcaaagaatttgattccaataatcattgatgactttgaaattaggccaattaataaccctacagtagcctctaagtattcaagggaaaggcagagttgcatatctctcactgagttcaagtgaagttcaaaactttggtggagggagtaactgaagatatgttagaaatagcaagataactagaattagaagtgaagcctaaagatgtgacttaattcctgcaatctcatgataaaacatggatggatgaggaattgcttcttatggatgagcaaagaaagtagtttattgagatagaatcagctcctagtgaagatgctgtgaacattgttgaaatgttgactccaatattgactgaagttctactgtgggtaaaatgctatccaaatagcattgcatgttacacagaaatcttttgtgaaataaagagccaagtgatacagcaaatttcattgttgtcttgtttacagaaattgccaggcaccctaaccttcagcaaccaccatcctgatcagtaagcagccagcaacatcaaagccagactttccaccagcagaaaggttttgactctcagaaggctcagatgatcattagcagtttttagcaataaagaatgtttaaattaaagaatgtacattttttagacctaatgctattacacacttaatacagcatagtgtatatattttatacactgggaaacaaaaaataattgtgtgattcactttattgcaatattcacttgattgtgatggtctggaactgaacctgcagcatctcctaggtgtgcctgtagttgacatataagctgttttttttttagtatttttgttgcgataatgctaaacatggtatctgtgtgcacatatctttatacgttctatgacttatttatgaaataaattcctagaactgggattgtagttcaaaaagtacattttgtggtacttcctattgcctaattactttcaagttttccagtgtaaattctactaacagttcacaaagattcttatttctttatgctgctaccagtgcatagttttatcattaaattctgacttgataagtataaaattggatcattttatctctgattactaacaaggtaaaaacatttttcattgctttgttttttcatataaatttatactttgtgaattgttcatattttttatcattttctactaaaggggtcatctttttctcattggttttgaacacattttataatcacacatatattttactcttcccagcagcagttatttttggattttgattgatagtccaacccagaaatgtagcatcaagtttatttgtctttaaaaaggatctgagatgaatctgttacagcaggtacagtattaataaagtgaaagtgatgtggctctggcaccactttcagtgtccccagatgattctgcaccatagacttccatggtcactaggaaagggactgattgatgtagtctgtcagtttagggaaaccatcggctctgggatctatttactctttgttaccttgctagcccatgactcccctcagggttaggaatctagctttaattttctgatgtaactgtatctccttagttatagattacttaataatcaaactcaacaatgtataggtatccagtgagtagagtgtaacctcagcaggactctgatttatcttggatcaggtattaactttttgagttattgttgcaaggaggattaggccaaggaggattaggccaaaagtcaagtctttcacatctctgaggctagagcaggggtcagcaaaccaaggtgcacaggccaaatttggccaccagcctagttttgaaaataaagccttactggaacatagccatacccattggtttatattgtctatggcagatttcatgttacagttgcagagtagatgtgacagacagatccacaaagagtaagtatttgctaaatggctctttacaaataaaatttggctaccccagggctagaggaaaggccacaactcagccgttaatccttttctcccaatatatcaagaacattaatccatgctagctctattttgaatttttatttagtctatttttcttttactcattaatttgttcctttacttatttattaagtcatttatttattcatttattgtcactgtttttatacttaaaagttttccaacatttaaagttgaggcatgtgttaacatatgttttcttctacttcttctgttttatctatatgtttttaatatatctagagtttattttggtatatagcaaatcatcatgatttaactttgtttttcactaaattatcaattatcctatgtcaattgatgaataactcatatttccccattaatttaatattatagcctaactatatatcagattcaaacatgaatgaatgcccacaaaaatgatgccgcaatcattgccctgctgttttgctccattggtcttacagtttcttcttgtaacataaccatactgtttaaattactgatttttattacgtgtgctaatacatattattaacctttattacattttctcatatattattgacctgtgttcttctttttacattttcttaacttttctagcaactttcatagatataagatataatttttatagataaaagttggaattattttttcataattccaaaagtcaatgataggagtttatgtctgaattgcattttattaattatagaattctatataaaagttagatcaaacatttgctataattataayatatatctcattcagattaaataaaattgggaagaatattcaaaatgccaaaattaaatatctacatgcattttctacattatatgccaccacaagtttgttcttaaatagraataacacatagcttctgtgtttatcatttattttttgtttctttattaatcttaaactgkgacagaaaaactgaaccttaagttgttattaaatgaattattaataagtatattcagaacatctaatatataattactaggagtaatattaatctgtaagtctgtattaagttgatttaatacctaaactctcttttcaaaggattttaaatatttaaacattattaaagacattccccagaaattttaaatgtgaaatatgtctgacagaacacctgatctgtatctaattgtaaatatatctttggtatgttttcatatgtttagttagacactcagagtatgtataatgggctatattggcatttacatttcattgtgttaatatttatatttacatttagaatacaaattaattgcatttctggtaaacaacattgttcatcgttagaatattttattgtagactttgtgtcattttgattaccttgcataagtatttaacttcttttttaaattcagtaaatgatttcattctcttttgatatacacccagaaataaaattgctggatcatacggtaacctatttttaattttttgagaaacttttatactgtgttttctttttcattttctttcctttttttttttttttttaaagacagtttctcactctgttgcccaggcaggagtgcagtgagtggcatgatcatggctcgctgaagcctcaacttcctgggctcaagtgatcctcccacctcagcctcccaagtagctgggactacaggcatattccaccatgcccagctaagtttttttctatgttttttgtagagatggggttttgccatgttgcccaggctggtctcaaactactgggctcaagcaatccgcccaccctggcctctcaaattgttgggattacaagtgtgagccactgtgcctggcacatactgttttcaataatagctataccagtttatattactgccaatagtgtatgaggattcccttttctccacaccttcaccaatacttgttgtcccttgactttttgatactagccatccaaattggtgtggggtgatagctcattgtgactttgattgcattcccctggtgattggaactattgagcacctcttcatatactttttggctctttgtgaatcttctttggaagaatctctattcgagtcatttgaccatttttaaagagatacctgcactcccatgttgactgcagtattattcacaatagccaatatagaaaaacaacctaagtgtccattgatgaatgaataaaaaaagaaaatgtggtatgtatgcctacacatggaatattattctgccataaaagaaggaaatcctgacatttggggcaacatggatgaacctagaagacattatgctaagtgaaataagccagacatagaaagacaagtactactgtattgtatgatctgacttctttgtggaatttaaaagaattgaacttgtagaagcagagagtaagatggtagttgccaggagattttgggaagcaggttggaaattggaagatgttgattaaagggtacacacttacaattttaagatgaatatgttctggggatctaatatacaggatggtgactataatggcatatattgtatttttgaaatttgtaaaaggagtagatcataaatattctcaccacaaaaaaacaaaggcaactatgtgaggtgatggctgtgtcagttaggttgattatagtaatcatttcacaatgtttgatatatgaagtcatcacattgcatatcttaaatatatacaagttttgccagttattcctcaataaagctggaaaatcaattaaaaattcagtaaataattaggggaacattttatcctatatttttctctcattatggctatttaggttaatataatttgagaaaaggttatggttttataatcaaattcccaaagcttgtccttaaagatagatgtttactaaaagtgagtagtcacacaaatacaaagtatcagttggaagtgaacttacaggcttactggccatcatctgcttactgtattccccaatttgctgtcaattagtgccctggctaatatgtatataagttttgttttggttgcacaactgaaatccaagtgaaaaatatacggaggtgtccctcacatccaaataacagtaaagcaacttgcctaaggaagaaagtgtactaaaaattggaaccatgtatggactctttctcaggttgttgcctctgaacctatcaaaagtgatgtgcataggggagatgaaggtgtgacagaggctgcaaccaggtgggtgaaggagagaacaggcaattctcagaaaaggagtgctgggtagttaatccagtaggtgtctactacactatcctcaaaccctttagttaagaggaactcttcagagactggcaattgcctctttaaatagctttggatgtttgaaagtacaattgaaatgctttcgagtagtttctaattattgtgcacattatcccatcttaaggtgattcagaaaaatttaaactccctctctatgactgttcttcagataagtaaaaatagattttttgtatgactcttttccttatccaagctaaatatgcttgtttcttttaactgtttctcatatgacctgtctttaagtctctaaacctgtctctttttttacattttccacttaaagttttctagtttgccaaaaactgaaggcactacttcaaacatctctgaaaaagagggggacgggatgggcgtggtggctcacgcctgtaatcccagcactttgggaggccgaggtgtgcagatcacctgagcccaggagtttgagaccagggtggccaacatggtgaaacccagtccctactaaaaatacaaaaattagctgggcatggtggtgggcgcctgtaatcccagctacctcgggaggctgtggcaggagaatcgcttggacccggcaggctgaggttacagtgagccaagattgtgccactgctctccagcctgggcgacagagcaaaactgtctcaaaaaaaaaaaaaaggaaagtgggacgatcacatcccatactaatttactgtgaaaatactcatttctgtcttgactatattgaaatataagctccatggtgttttattaatgttttcagctgataaactctactgtctctatcttgtagttgtgtggttgcagttttagaccccaagttacatgttaatttgttaaagtaagtccattgctctggtccatcacaacatctttttggatcttgattctgtatccaagatatttggtctccttccckgactctttgtttttgtttttcgggttttttttattccctgtcctgggacccccatctttgtttttataatttccctattgacccctttaaaacatattgaagttaaagacaatgaaatatgaaacttagagggaaacttgtttgatctcattatacataatggcatcagtgaagtaggcatataaggctctgttcttacattacgttttcagaaaagatgtatggcctagacctgttctgcattgttgttctgcattctgcactcacaatctccagctcaaatcctttcccattaccagatcaagcagtgtggataactaattcagaaacctttttttttttgagatgaagtcttgctcttgttgcccaggctggagtgcagtgatgcgatctcagctcactacaatctccgcctcctgggttcaagctattctcctgcctcagccccctgagtagctgggattacaggttcccaccaccacgccctgctaatttttgtacttgatggggtttcgctatgttggccaagctggtctcgaactcctgacctcaggtgatctgcctgtcttggcctcccaaagtgttgggattataggcatgagccactgtgcctggccctagttcagaaatcttataattcttttgtaggtctaactgtatcactaacatgggcagcttcagcaagttagcatttggaagccctcctaaagatcaaagttctcccagtatcctcgtgcagttatactgcttacagctatatacaacctctgaaacacccagcatccattcaccaaagataaagtatacatcagtattatattgcacatattacttccatagagagggtaaaaatgttaattcatggaagaccacgaaatcataataatcatttgtattgtgccacacattattttaagcactttaaacatcctttattttaccttatccaaactaaatacacttttttattttaccttatttaatggctgtgtcaattaatttttgagatgttatctctgactatcttcattttactaatgaggaaagtgaaatagaaagaggctgtttacttgtctgggtggcacagatagtaaaataaaagaatcagtatgtgaaacagctaatttgacttcattctcttttaaacaatacaccatactgccccatcatatcaaaaaaatgattcgaaaaatgcagggggaatgtatgaagtttatgagaatcaatatatacctgtatctcttaatctggtccctcagtccattggagcacctcctaattcctctcaataacatcaacacatttagcaaatatgatctgcttatgtctatattcaagtctatttagctatccatttgttatttgcaagaacgatgaaaatgacctggctgagggcttttatatattaggaacacttttccatgtgaatacacaatcatttaagtatttttctctagcctgtatcctccatgttatctaagtaaacaatcagatactttgcttccagttgttcagatacctggaatctttcacatttctctgtatattagatttgtagcaatttaaaaaaataagattactttgaaattacttccattacaaaattgatccaagacatcgtaacccaattataagatcataatatggtgttatggttagtatctacattctaagttgtgaacctttagtatagtttaattttatcagagaagcagaaacttatcaatatgctaatgaatgaatttcaacatactcttctgtatagctaatatgaaacagtgatgcttatacctattgttctattttcactaccagaaaattcagtaatattagaactgttttttaaaaaatcaactacaaccaaaaaggtttctgaggaaatactggcattttatttatttgtcttttttttttttttttttttttttgcaattttagcttcccttagagctattttagctaacaagttggaattctggaaggctgcagtgtatataaatcactcattctttagcctttggttatcagagccatgaggttttattgcacttagatttatcagataaaaggcttctggagacctatgatgtttgtgtaaccctcacctaaatttgaaaataattatatctagtgctatcaaacattacagatattaggactatatttgttcctaatgagctggatatattaaatggctgttcctttcataccatttttgcagaaataattcctgctgataaacattagtggtgactatctacagagggccattaggatcacagagccagctctgataattttggagtttcctaaaaacttgtcaaaagtgcaatcatgttttaaataatgttttgaactctttcaaggaaactaatttttttggaatccattattatgcattggctagctgctgatttcttactgctacttattataaataaattcaagacttatgccctcctaaccttaagaaactgaatcattcatccttcatccttaaaacttagcaggaaaatcaaaacggtgtttcagctcaccctctgtagtcatctttggtcttcctctttaatctactccttcattcttaggacaaggagtctgcaaatgatagccccgtgggtcaaatccagcctcccacctgtttctgtactgcctatgagttaagaatgatttttacatttgtaaattgccttagtccatttgggctgctataacaaaatgtcatagatgggttagattctaaacaacagatttgtttctcacagttctggaggttgagaagtctaagtttaacgcactggcaaatttggtgtctggtgaaggcacactttctgttaacatagatgatgccctctacctgtgtcctcacatgatggaaaggacaaggggtctctctaggggtctcttctataagggcactaatctgatccatgaggaccccaccctcatgacctaattacctctaaaatgcccaccttctaaaactatcacattgataattaaattttaaaatatgaattttgaagggacaaaaacattcagaccatagtataaatggctggaaataaattagaagatttgttacatttgaaaatagtatgaaattaatgtaagtagcagtaagaaagcaacaactgattaatacatatatacatatggaagtcaaattttagtgtccataaataattttttattggaacatagacacactcactcagtaatgttgtctatgactaccttcctgtgacaatagcagagctgaatagttgtgacagagattatagtgcctgtaaactctaaaatatttatcatctgactctttaccataggagtttgtcaacccctgctctggacagtcttctcttgtcagggcagatttttatgaggttgcaccaaactaaatagcttcttttctagatctgttcccttcttttgcactccagaaaaatcttgttcagtgcccattgtgggttcagatatccctaaagcattgggatatggcaagaaagtttgaaaatatttatattatttgtctcttttattctgatttctatttttctaaatgttctattggagatgcaggtcaaaagtttgctttgttgatggagtacatgatcaaataattttagagaccattgacctacgtaaatacatcagaagcctgctyacctggctcagcaaggacaaacactgacaacctgatagcagcgagagagagtgaagcatttattgcagggcaccaagcaaagaagatcaggcaactcacatttaaatcctgacctccctgatggcttacagatgaggattttttaaagcaggggtaaatttcaggaaagcagaagttacaggcaaaattgtaaatcaatacatggaggtttcacattggttttggcctaaaagggcaggatatcatgaagcagggggcttacagttcataggtagattcagatgttttctgatttgcaatcagttaaggaagagaagctttgttttgaaatttgtggtgagcaaaaagaatgttagctctggctctygggtttgactttctctaggtacctcagaaagaaatgcagaacaaagaactttggtcaaagttcagcccttagttctcccttatctgaggcctgcttgcaggcagatccattcggtggaggtacagatttccgaaaaacaacttagagacatattttatcgttagtttctatgagagaacgaaacatcctgtgattatagcttccttggctattgttttaagctactgttaccttcttgcttatcaatttgcttatttacttctcaaggctagctaggtgcctggaatttttcttgtaggatctcaagtttttcctttatttccatgcttgggctcccaccctccaccccccactgcaggcccctaaagggggttctttctctatctcaataacctgttttctgtaaaatgttagagttctttggtatatttatgggtaatatatgaaaaacttttagaatccaaaaggtttgaaagataatggattatagaaaattaggcaggtaggtttagtactggatgcctgatggcctttaatatgcttagatgccttgtgaatcaccagaaggaggtctctttggtgtttccccaaratagcgtggtcacataacttcccatttagccccaaatatttcaaagaacatttttgaaaaaggttctctcatttcataggatgtttcagaatgttaaattttattgcatgtttaaaagcacaaatgataattatagagcactataaaaatatcagctatcatttggagatgcttttatcaatcttgacaccgagacaggcatctaagtgactgactcgattgttacttaaaatgtatttgttgtcgttgttactgttgctacttaattaattttgaatatacacgtgaagtcagactgtgattacagccgaaaagaaaactgccaccatgatgatgttccttataaccatctaatgatttgcaaagctacttcagcaagctagtgatagggtctcaatcagtattttaaccaaagtgataggaagattttgattgtagaaccttctgcaggaatcaatttatttttaggtcaacaaataagaatattttgcgtatatatccagattttctatttgccaactttttttgttataattttgattacactgtaaaccagagtgtatgtgagacatgtctcaatcaatttatgtatttatttaaaaacagggtctctccatgtcatccaggctggagtgcagtggtgcaatcatagcttactgcagcctcttcctcccaggctcaagccatcctgccacctcagccgcccaagtagctgggactgcaggcatgtatcaccatgctcagctaatttttgtagagacaaggtttccccacattgtccaggctggtcttgaactcctgagctcaatgaatttagaagtttattttggtgaggttaagagcctgcccatgacacagcctcagtagggcttgacgacttgtgcccaagataatcgagctacagcttggttttacacatgtattagtccatttttatgctgctaataaagacatacccgggactaggccatttacaaaagaaagaagtttaatggacttacaattccatatatctggggaggcttcacaatcatagcagaaggcaaggaggagcaagtcacgtcttacttacgtggatgacagcaggcaaagaaagagagagcttgtgcagaaaaactccttttataaaaccatcagatctcatgagatttattcactgtcatgagaacaccacaggaaagacttacccccgtgattcatttacctcccacagggtccctcccacaacacatgggaattcaagatgagatttgggtggagacacagccaaaccatatcattccagcccttgcccctcccaaatttcatgtcctcacatttcaaaaccaatcataccttcccaacagtcccccagaatcttaactcatttcagcattaactcaaacttccacagtccaaagtctcatccaatacaaggcaagttacttccacctatgaggctgtaaaatcaaaagaaagttagttacttcctagataaaatgagggtagagacactgggtaaatacagccattccaaatggaagaaattgaccaaaacaaagggactacagactccaagcaagtctgaaatccagcagggcagtcaaatcttaaaaagttccaaaatgatctcctttgactgcatgtccgacatccaggtcatgctgatgcaagaggtgggctttcatggccttcaccagctccatcctgtggctttgcagggtatagccctcctcctggctgtgttcatggtctggtgttgagtgtctgcagcttttccaggtgcatggtgcaagctgtcggaggatctaccattctggggtctggaggatggtggccctcttctcacagctccactaggcagtgccctagtagggactctagggcactgatgtcacatttcccttctgcactgccctagtagaggttctccatgagggtcccgtccctgcagcaaacttttgctgccctgggcatccaagcatttccatacatcctctgaaatctaggcaaagtttcccaaacctcgatttttgatttctgtgcacctgcaggctcaacattatgtggaagctgccaaggcctgaggcttccacgctctgaagcaacagcctgagctgttccttggcccattttagtcatggctggggttgctggggcacaggacacgacaccaagtccctagactgcacacagcagagggaccctggacctggcccatgaaaccattttttcctcctaaacctctgagcctgtgataggagaggctgccacataggtctctgacatgccctggaggcattttttcagttgtctttgggattagcatttggctcctcgttacttatgcaaatttctgcagtcagcttgaatttctcctcagaaaacgggattttcttttttatctcattgccaggttgaaaattttcttttctttattttattttattttattttattttattttattttattttattttgagacagagtcttgctctgttgcccaggctggagtgcagtggtgcaatctcagctcactgcaacctccgcctcccaggttcaagtgattctcctgcctcagcctcctgagtagctgtgattacaggcacctaccactacatccagctattttttgtatttttagtagagacagggtgtcaccatgttgaccaggctggtcttgaactcctgacctcaagtgatctgcccaccacagcctcccaaagtgctggtgttacaggcatgagccaccatgcccagctaggttgaaaattttctaagcttttatgctctgtttttcttttaaaactgagtgcytttaacaccacccaagtcacctcttgaatgctttgctgcttagaamtttcttctgccagataccctaaatcatctctctcaagttcagagttccacagatctctagggcaggggcaaaatgctgccagtctctttgctaaaacaacaaaagtcacctttcctgtagttcccaacaagttcctcatctccatctgagaccatctcagcctgaatttcattgcccttatcattatcagcatttttgtcaaagctattcaacaagtcactagggagttccaaactttcctacattttcctttttctgagctctccaaactgttccagcctctgcctgctatccagtttcatagtcacttccacatttttaggtgtcttttcagcagcaccccactctactggtaccaatttactgtattagtccattacatgctgctaataaatacacacccaagactgggcaatttacaaaataatgaggtttmatgtacttacagtttcacatggctagrgaggcctcacaatcatggcagaaggcaaggaggacaaagtcacatcttacatggatggcagcaggcaaagagagagtgcagggaaactcctctttataaaaccatcagatctcttgagacttattcactatcatgagaacatcacaggaaagacttgccccatgattctgttatctcccaccgggtccctccctcaacattcgagaattcaagatgagatttgggtgaagacacagccaaattatatcaacacattttagggagacataagacatcaatcattacatgcaagatatacattggtttggtccagaaaggcaggacaacttgaagcaggggagggttccaagtcatagattcagagattttccaattggaagttggttgaaagagtttatctgaagacttggaatcaatagaagggagtttctgggttaagataagggattatggagaccaagattcttattatgcagatgaagcctccaggtagcaggctacagagagaatagattgtaaatgttccttgtcagacttaaaaatatgccagactcttagttaattctctcctagatcagggaaaagacctggaaaaggaaggggattctctacagaaagtagattttccccacaagagacaactttgcaggaccatttcaaaatatgttaaagaaatatagtttagggtaaaatacttcaattcctttcagagcctgttatgtgatgctgtactagagtgaggctggaatttggtgtcttattgcacaaaaagtttgtttcatcagtcttaagatctctgttttaatgttaatacctacagttatgcctgaatttcaaaaggaggagggtagaatgaggcatgtccagccccaccttcccatcatggtctgaactagtttttcaggttaactttgcaatgcccttgactgagaggagggggcctattcatatgattggggggcttagaattttatttttagtttacaacaccttttacagaaggagaagctactctgattaatttgttaagtaatttaaatgatgaaattctacatatcatattgtcttctgaaggatgaactgagaagtgtattatctcagaattctgggtttgaactaactaacaaatccatttgctttcaggtccctcctccgtgaatcaaatttattcatttttttctgtagtaatggctgaaaagtagtgctgataattagagtgctattatgaataacacattgtgaaatctagaattctcagggtttctttgtttacttggttaattatttttgtttggttttgattttaacttctgaaaccttaccctgtgagggccatatggatcacctttcaggtataacatgattgtctcctatgaaacaaacaaaaaaaaaattgagaggacacagacaggaagtttttcaaatgtccttcagtttacttgttttcagttcctcaaaacagactggtgcaaagcagtttggagtttagaatagctttgaaagcatttattgttccaaggctaattttaaccttgtgataaagattgctttttgtattcagttgaatgtgagatccagtaattgtttgttaaggctaagtgctgtaggacataatacattttttaatggtgttttgtaattataatacaagcatctttatggcctaatatatgaaagaatgctattgagtagaatgatgagaaaacagacttcaaattttattattttaattattatatcgcatagctgcttatcttatatttagggtagtttgactttgtatgtatgctcaaataaatgatttttcattagctgaatagtttcatagattcttggcagaaacaaactttttatcctcctcatttttttctttccattttagtcagtaggatattggtgaggaaggttccctaaggtagccaaaacagaggtgtgtgttgcccgaaatgactttaatatgagtttgaaattacctctatagggaagttttatgctttccctctgttttccaaagtttttatgattggaatctctagaataaagttgaaagtagacagatttaacaggagaaagggcatacaaatttatcaacttcatatatacggaagtyccacaaaatatgagactctaaggagtgccaaattgtggaagcataaataatattttgagctacagaatgaagtaggggattggggcttctgaggggaggtggcagcacaagcaatagaagggtgaaagaaggaactgaactgaaaacaaaggttgccttatatgcagataaagtgtcccaggtagtagccttaagaataggtgaaaagtgtaagtgtgatcgcttctttctttttttttttttttcagatggagtttcacttttgttgcccaggctagagtgcaatggcgcgatcttagctcactgcaacctccaccccccgggttcaagtgattctcctgcctcagcctcccgagtagctgggattacaggggcctgccaccatgcctggctgattttgtactttagtagagacagggtttctccctgttggtcaggctggtcttgaactcccgacctcgggtgatccgcccaccttggtctcccaaagtgctgggattacaggcatgagccaccgtgcctggccgtgtctcttcttttgcaaggagttaatcttgactggttaatgtagattccagggaaggagttcaggacaatgacatttcttcaggaagaatttcctttagtcagataaaagaaacttctgagaaggcctctccctgcacttcaggaaagaaagaacaagagatgggggctgggagaaggccagagagaccttggttctgaggctattcctttagttcaaagtactcagcatatcaacgcaccatacttcagggtgtcgtttttttgagccccaatgcctctaaatcataaatttgtgccaagggtttcagatagcagtatctccaatctgaaatgttcccatgttgtatgttttgtagttgtatagataaatgactgaaatcctcatcagtggtagattagggatccaccaagggatctgtaatcccaaaggatcatgtaatacaagctcaagctcatcattttgttagtggaatgactagaatcaatattctttctaaaacatcattcagaaccatatgacaacagaggcagtaatactgaggcaaaacatacaatcttagagttatcaaacactgttatcttcagatttgcacctgctttttttctgcttaataagtttgttttcattttttactataaaaattgcatactacaaaaattatatagtttaagatatagtaaaaatgaatacctttttctcatttcacagaagaagagaacataagatattcctgtacctttgattctgtttgtgcctcctcaattatattcctttctcctccctcgaaaggtgactattttagattttatgataatcattttcttgcttttgcgtatgtttttcacataatgtatttctaaacagtgtactatttagttttgtttatttttttgcctcatataaacataatcacacctttatatttttacacagcttgcttttttcttgttattgttcaatattttgttttttcacatcaatcctagttgcagaattagcattagttcattaattttctctaccatatactatttgctcacaattccttttgttggaaatgtcttcattttttctttatccttgagttataagtctacaaggtatgcaattctcagttaacatttcttattcatataaaatattctaatctcttctggctttcattggtactgccaagaagtgagctctcaatctgctttttatttttgtgagtagtctttttttcctctggttattttttaattcttccctttcttrtatactacaatgtatctagatatcaattctttaaaaaacgtattttcctcagtttgttgttgtctggaatctaagaattggtgtccttcatcaattctattaaacccctgacaatatctttggaaatggtgcctctcctagttctctccatttgcttcttgtgaactgcaatttgatttttcctttaccttgttaagctattctccatgtctcttaacctctagatcatgttttgcatcacatttgtttgctttcaggtaacttgcccagatatatcatcatatcatccccaaaccattaggttttaattttccatattattttttttatttctagaaattctatttgctcatatgttatatcttcatgataaactttgagtttctcattatttatacattcaagtctctcgtatttttaagcatattaatttttttatattttacatctgataatcccattatatacattttttggtagatctgattttgtagctttttctttgcactggctcccacctatgatatcttttttctcatgtcattagtgattttcttctcttgtgggctcacattccttgaaaatgtatttatgggaatttataaatatttgaggtaaagtaaattctttcagagagggtctgagattgcttttactagttatctaaggacaccatgactaggaaccacttttaaaccaaatttttaacctcgcagtttaaattttggggctcacacaggttaagattcttagaagagacttacctccttgattgctaaagctgaaactgacgcatgacccgccattgctctctagttattttctagtgagagcatcactctttcttggtcctatatttatgtggcgatttctactctacctaacaacgtgctcagtcccagactttgtctgctgtctcagatgtttgtaactcagtttataggccaccagggatgggcgaaaaccttgagggtaaacaccacccaatagttagtttgcccttgtgaatctctgcttcgtgcttatttctgatctctcagaaatttccttattttgataccagtacagctatgcatcttttagaaaaaatcatatcctgtccagtaggtttatatgtgttatattgcaagggattcctttcaatatcttgttaaccatgttgtagaaatggaaaactcctctcttgactcttttagatactcctttaaatagtagtcatttcatttgcagtcgactgtagagtagagccagagatttacacaagttttcttaaaagtaaagattttaaaaaatatttatcacttccaatgaaaattctgctctaatacttgaagataattaataattgttaaaactgactcatgcttacaccttcacagctgctattctgggccttaaaagatttcttcaaagcatatcacatgatcatcttataagcaggccagcagaaatttctaagttaattaccgtttggcagagtgtatccaaaacctcttatctgaacagtgaacccaataatttaatcagtctgtctgttgattaatcacgttctawtccatctgatatcagcactaaaaaagcccttcatctgtttcttgtaaaacttatctccgtgaatgcacagctgctgtgagctattggtattaataacttgaataggagacagaacacaatggattctcaaagcctgcagaaaaagtttgaactccttaaaacagtcattcaggactctgcaatctgacccaactctatttaatcctcccatcctcatttccggtttatttcccagctttagccgtgaactagttaaagccagtcacctgaactcccacaacttttgttttgactgtttctgaagcctagtgagttggtgaatgaataaacatttatttatcaaataccacatgccagtcatgtgctgtattgcttcatttactatcctacaacttctctgtgacagagtgatggttatccggatcggcagatgagaaggtcaaaaaacaaaacaaaccacttttagtgtctagtttacaaaatcataagctctttgaaaaagggcaagaggaaaaacaaaaggctacatgattatgtgagccagtatttttatcagtcagacataaataaaattcagaaaattaatctccatatttctgtggtataagacaccacatgctttatatatgtgacacactatccaagaggtgaggaacatttggtgttgggtgagcactggagaatatgtgagtaaaactccttccttggcatatagcagacattcrgtctggtcagttttcatttattattcccgtcttttaagcctaatcaggtcgtacattttttcttattcattttagaacaatgtgctcttctttgttcttccttacctacttcttccactgtcttccctgcttacgtagagtatctatccattccatcagttcagcctaggccaagactgagattaagtacacaccgtgccatgttgtgttgacagtcttcaacacactaacacatgataatgagagagtcccagtgtagtctaaaacactggagaatgtcaaagcattcttagaattttgatcttgcaaggttttgggccacaggaataggaaatggaccatcatgtttgattcaagactatggagagtttttatttcactaaatgataattattttgcctgtcttaccccattttcctagataattatcctttatcatgcctgtatattttcttctaaagtttctaaggtgaatttaaatctactggtcctggtgtcacagattcctataatactagttgcccagctctcaattacgccatcattgtttacctgagcatctgtgtgaatcctaattaattttatcctgccagacatagttcattaaacaagggatgactaactaatgcagcttaagcccgttagggcctctgtcaccaggggttaaaatctggcctaagagattacargtttggaggagtgtctttccctacaacttgtagacttgggacttgtcagagagctatattctatcatatgaactgagacagagaaagccctctgtggagagacagaaagaaaaatgaagagataagccaacagaagcagagaggagacacagaatgattcctagctgaggtatagttgcatatttgtgtgtgttatgtgaaatactccttttccttaaaataaatagacaacaccccattttttaaaaatttaacttattcaagttgatttgtttttcttgcaactgaaatgagttctaattattattacatatattaaatgttaagaggtcactaacaacattattattatccatatcacataagcacacctgagttctagtctcatctcgaatgcttactagatatgcaaccatggatataggtcatgataatttgaaaagactgatatatgtgacagatttgtgctatacatatctaaaatattattatttctacaatgtcagtgctacaacttctctgataatttatcttttatttstaggataatagtgctatttttgcttattgtgttttccatgtagataggtctgaagttcctgatgacaaaagggcaaattctgtcactaattcagatattgagtactgtctttatataagctactacaagagaaaaatatgatttattgggaacaaatacttatcttgcccactttgcacctccaagaaaaccaagtagagattattctgaccattataaagtttattttgtggaggaatcaaatattaatatacttagttcatgaagaaaataaaatgttagtgagttctttcatagtagcgcaattgttctagaaactgggccactcttgaattttatttcacttttagctattcacagggtatcagtatgttagatttataatgatggaatctgactctgtaacaagatatttgttgttagacttgtttgtagagtgattttcctcttttgtgaaataatgtatggttatgttgtacttatctcagtaggattttattaggaaagtgatatattttaggaaacagttggtcatgaagtacatttaatttttgaactcctagtttataaaaccaaataattaaaacrtttttgacaaaatatttacagcagaatcttggaagttaagaaaacaaaacaaatgtttcttcgatttcagttacaggttttcaagtaaactgataaaaccttatcaacaactcatagcgatatacactatactactgcataactcattgaacagatttctcattctgccacatttctgcagttcaagagtaaagcttctttataattatrtatcactagtactttcagaaagccctccttgctctaccatttccaatttctcctccagcatctacctactccaagaggtaacttctatcttgaattatttttagttgttaccttacttatatttatagttttatcctgtcagtatgtttcactaaataatatattgctttgtgttgtgtgtcatattctatatatttttctagaacttgcccttttcattcaacaagatgtttataaaattcatccactatggtatatgtagccatgattcactttgcaaattttatttcttgttttcatccaactttgtttgaccccattctttttctagcctcttactcagacatttctgcaaagttttctttttgtgttcattgtggccattgtgactgttttaattcagtagtaaccatagaaacatcataagtttttataataagagaggtcaagtaaatgaacctaaacaaatataatcagtccgcttaccatttaaatctcttttctgatagagaaaaaatcattatcatcacttcaaatgttaaaaggtcactaatacttgatgttataatggtagttataatattacataaagcaaagatattacctaacacttccttttctataaacatctgtttttaaaatatctgaatatcgttaatgcactgaagatgagagctatggcagtttgtcttttttattatagagaatgaactcttctctactctaactattcttgaatatgtttattttgttatattaactcctttaagcaatgctaataagacttagccattaaatattaaagcaaaatattctcttatgaaatcatgctcaaattctagtcttcccaggtcaaaagctttagtaagttattgtccaattatttaaactctaactctagttatataaccaaagataattggttatatatgtgttttcattcatctttcacttaatttaaaaattctaaaagtctcaattcagtggagaatgtttttggcaaaacaatagcaaacatgacaatttgggaaagaaaatctagaataaaatttttattaccgatttattactggatgaatacattggaattttgcactttagttgaatttggaaaatgttgaatttytatgatgctaacaaattyctttcagatagttaacccattctacaacagtaggcatytgtaatttgagaagttataaaggaccttttatctttggttgaattaaggaatgagaaaattgacctgtttaaataaacattctctattataaatcaacacaaaggaataagcattctctatcataaagcaaataaattttcctttgatttggtttgtacttcctgttcattatcttgattaaggagatcattcataactttcctatgctatatttacagtttaacaccacatcgtagaagagaaaaataaaccagctccaacattaacaagaaacttaactcataatacacaaagaaaaaattcttaaaggtagaattgtaggctttgaggtattactgatgagggaaatgcttaagaaagaagcattttcttgacagtcttccaattaaatattgtcagcttattgatccttttggctaatgtgagatgttggctttgtggttattagtaggttactgtaaatagcatatagcatatagcttagaattcctgaaccatgaagatttttttccttattagttataggtgaaatttccattctgtgtcttttatattctatgatattttaaaaattcctatgtatactgttaagatgtgttcttagcatacaggacaaacataaaagacaactgtagttggacaggctcattagctaggaaataccctaggtggtcatggatcaggttaagaatacacatccacatgaaccaaaaaagactggtagttgtattgtatctgaatgggggcattctatttaaatcctagagatcagcgatacccagcagttaagaactagcaaccaggaaggtcttagaagctgcagtgagatgaagttcaagcatgctttctgtcagggagtcatcacagtaggctgcgtgagaaggcctatagcagtgggtgctttgtatcacagcatttggttcagggatctatccaagggagggggtgtactgagttctagaaaaaggggtccctgaaggatcagaagaagcaagcaagaacccaattctagacaaatggactagcaggaaaagatctaagcatagtaataaatcctgaactttgaataaaggcccgtttttgctataaagacatacctgagcctgggaaatttatgaagaaaaataagtttaattggcttatggttctgcaggctctataggaagcatagcagcatctgctaatgtggaggcctcagaaagcttccaatcaaggcagaaggggaagggggagcagtcacatcatatgacaaatcangagcaagagaaagaggggagagatgctacacacttttaaagggccacatcttacaagaactcactcattatcatgaggacagtaccaagaggatgatactaaaccatttatgagaaattctcccccatgatgcaatcaatcatttccaccaggccccacctccaacacwgaggattacatttcaacatgagatttgggtggggtatacatccaaactatatcaaagcccaaaccactggtctgttcagcagcagaatgcagccagcaataaatgtctttggttctcatacctcaggacaagacttattctagtgcctatggttttagtctagactcattgaagatacagtactttattttagcaccactaaaggccaggctggaagctgggcatgtaatagtaaacaaaatatagtttctttctttacaagtcttatgctgtagtggaaggtacagtcaggaatatagacaaccacaataaatggtagtaagaatgccaattgaggaaggtatatattgttatggtggcatgagtcagagcatgttactaagactcaatggagttggagagaaaagaaaaacttctcaaaggaactgaagtctaagtgaagatatggagaatgggcgggagtagggatgctgctaacgtgaatcagttttgttgaataagcaggaagcacctgtttccagaccaatgaattaaaaaatggtcatcaaaaccagatgccccattatttgctcaccaacacagtaccagggcacttgacttggtgaactaaatacagacttcactcctccttggctaagaaatcctgtgtagagaacaacttgtggcctaggttggacttacttaggtgaagagcatttagagtagggagtaaagcagaggaaaggaggatctcaaggtttaaagggtatggctcttgaaaattggaacacagaagaaaaccagcctcatctgagtgaaatatttcaagaattgccttctcagaccatgaaaacaccggagtacccactggatgagcttcacagagccacctgtagggacgtagaacatacatttaagcgtttgccaagatggaaattgacccacaaggcttgagcttcgtggagtaactctatttgtcattttacccattaggattgtgaaacatggtttcacaatagcaaatcaaagcaaggctggtgatgttgcacacaattacaatagaaatggaatggcttaattagtaaaaaattaactggcatgattcctataagttaaaatgtacatatttaaggaggcttattgtaacatttataccatttattttataatatactaattcgcatgtaaaagtgaatgtaaattaccagaaattaacatgcaatgtgaagaaaagtccttttatcctctgcaactgtagcatttggcagattcaggaataaataatcttttgtggcaagggtatgccttatcaaacatatgcagatcagcactaattaatgctaattaaggtttcctgtctatctagttggaaaaacgtccaaatgttatgaaatccagttagtatgcctattacgctaattgttttatatggggtggttcttaattaaaatatgtaaattgaccttaattgctatatactaatgggggttcatgttatcttactaaaagtgacaagatggtgaggaggggtacttaaatgactaattctgataaatccttaactaaatgacctttcctcaaaattaattttaattggaagttggcaaaagaaacattttccttctttgtttctttttagttttaagtaatggaagaatgttattcttcttcgttaatacagctttagaagcagttgtggattgttaattacacttaacaagcaagttaattttactgtttactgtttataggtatcaggaagttattgatatactcatttcagtcttggagaaagtgactttcttctcatttaaagtgaatatatagttataatcctataagtaatttgacataaccagtttattagaatgtgtgttaatggttgatgagccagtaatactaatattattccttcactgatttacatcggagttacttttttcagaaaaaaaaaatataaactttttactaacattaattcttattggagttaaactatgattggagatacctagattaaatagacagaaatgataaacttttgcattttacctatcatatttttattatttaattgcaaacaaattaaaatgagtatgccctaaatgagtgttaatgaatataaatatttttatttttgcgctattctaaacctagaattacaagaagtaatttagctaaagctaacaaatactttattttacctttttatttgcaagtagtttatgttcaattctaatttaatgtatattaaaaattcctctgcaaaaatgtgagaagggacctcataaaatattgtcatatggaaatgagcagataataaagattatagcttttctttgtcaaaaggagactcaatatctttactctttcatcaggacattgtgacaaatgtttcccccagaatcatccggggaaccacctctggccccatgtatggccctggacaaagctcctttctgaatattgagctcatcagtgagaaaacggctgcatattggtgtcaaagtgtcactgaactaaaggctgacttyccagacaacgtaagtgtgatttaacatctaaaacaagagaattggcataagttggtgaatgtttatttaaacatccaattcataggcttataaatattaatgtgtatattttattaaagaatctgccagttgctttgctgatgcatagaaagataaaaaagaaagaaaagctcaagaactcataaaaacccacacaatgtgaagctttgttataaatgggtgccatgtaagatggaagaagtatctacataagcagaaggaagagaaatgaaatactcattttattgagttggttttcactgtatgtggctggtatttatgaaggtgatgaccttaggaagaaattgtaaactataaatcattttaaatataaacctgaggcagaagcagcatatcttcctatgaagtctrtattttttcagtgggaaataatttattaaataattttaacactcctatactaaattagtcaactatcttttataaaatcttttttttctcttaaagaaccatgcctaaatattgcagtaaaatcaggcttgaatataatagataatattttctcttcaatagtctgattagggtgatccttaatgtcattcatttattgtccctatccctcccacctccctctcccacttcctatttttttcctactccttcttcctctttctctctctcatccttcctctcttttcccctccctcctcctcaattctctgtctctttcaaatatacacaacttatttctctttctttcattctttctttcaatgaattgttagtgaatggaggttgaggtttgaggcaatgtgtgtgtttatgtcatcgaaaatatttttttacctacatatgtctttcaaagacaaaagacaacacttaaatatactaatgataaatatttttaaatctattgaaattggtggatgtttgtctacaaactgataaattgcaaattcttacaaaggaatatagaaatcacatgattgccttgcccatcaagttttttttctgttttagacagctctaattatttcaaaattatctcttgataattttgaaataaaatacatgcacatagaaataaaataaacttgaaataaaatacatgcacatagaacttgacataaaatacatgcatttgaaataaaatacgtgaaataaaataaaatactaacttgaaataaaatacatgcacataggacaaatataatttatcttcctcaagatagtcgtttggatgtgaagggaactatcgtgacccgtctaaaatctatagtttctgcttattagaaatttttctcttcctgagcttgatgtgaaaattatccctgttttcatattatataattaactctatatgagaattatgctgagctatttgtttattaaaggacccacatcttttgggaagcctttctcagaatgataaggactaaaaaaaaaaaaaagatcaactataaaaagaaataatatgtttgtaaacctgatctacagtattaaatactctgccaggtactgaacatgcaacataataataatggttataatatattatgagcactgatataacactcactctgtgctaggcacagttacaaaagttttatttattttaagctcatttgatctttttgaacaactttataagataggtagtattattttctctatttaactgatgaggaaactgaggcacacagcgattaaataccatatcaatcgttacacacctaatatatggtgaagctagaatttgaacttgaaatttgcttttaccatccatgcttctgttctgatccagtgcatttgcctatgttgtccttaaatattcagtattacatttttttttaactagagatgggtccccccgcccaggccagagtacattggcgccatcatggctcgctgcagcctccagcttctaggttcaagtgatcctcctgcctaagcctcctaaggcctacaggtgcatgccaccatgcccggctaattgtttaattttttgtagagatgatgtctcgctatgttgcccaggctggtcttgaactcctgaactcaagcagtcctcctacctcagcctcccaaagtgctgggattacaggtgtaagccactgttctagtattacattttaatgcaacatgagaatggtatgaaatataawttcccaaatactgattcaatagtatctagataagctaatgtgtctgaaaaaaaaaattttcctggaaaataactcctaccaatggattgtcttaacttcatgtgacactttttctcttttttgggtaggagtaagttgttgtaataatgaccaccaagaaatgacagtaagtggacaagaaagctgagatgaaacccttgccttgtgattctacagttgagtagaaagaagagacatagttaatattcttttcagtttccctggagataattttcttctcttagaatgctttttcttgagaaaaaaatgcatacttttcttgtttctgattctttccctatttagattatacacatcattctttttctgtattcctagaactaatttctaacatttttactcctcatatcgaagataacgttttaaataccattaaaatggcattcccatttgaacccatagaaataatgtgtgtgcacctcgatattgccatgctgagagtagacagtcccccgctgttttggaattattctgatgggtttgcccaatgagctgaatgaaagaaggtgacccttcattttccaagtttaattatcactcttgctggagttttttcacatcattctcgagtgcatggctgccacctttaatgacagggactggacaattcaacccactgtggcagcttctaagcaaaagctaacttttctgataaaaagaattgtgctgggtgtggacataggtcagctaatatcagtagctaatgtctctgtttccagagagggtgagcaccagttgaccatgaaccagaggagatggctgatgaacttcttgaatgtaaaggcagagagacctctgaaatatattgtgagggctcatctctgaattgtcacagttataccaaagcctacattcacactagacttctgcttggctttcaaggtttccttttatttatctgtgaattaaatttggcacattgatcattgtagtgacaatttattactgactaagagctttttgttcctaagctgagattttgtaatgcttattattaaatgtgcagaataactagggcttgcagaagtcagtttaaagtgaatccttttattctcaatgcaaacgccttatgaatcatgtattttgggccggggaaaattttttttaacaaaaaatacatgctgcactttgaatgcactgaattaggaagcaaagactgaaattttttatcatttgtggcagttaaagtaggaagcagaaggtagggcttcagcagtgaatcaggtagtgaagatagaaaaggaaatgatggctttgttagagaaattaataaggaagaacaattgatatgtaaatatacatctattacaatacacctcatttctgtaaaaaacacttcctcrgttaattactgagagatcagcattgtacacattgggttcaaagtgattccaaagaagttgatctacatcagcactcctgaaggtgctttactgacaaatagcctctaaatattgagttcttaacattttatgtgtaccagggactccttaggcactctggcgaagcttgggagcctctttccagaatatttttgaaggcataaaacaaaattcatagggttacaaaggattctcactatctcacttaaaatatacgatatagtaatgtattttttttattaaggcactaagtaacaatctagtgatgggtctaataactactcaaattttgatgtcgtggtgagtataagtacttcagatttctgcagcaactctactgtgattttctgtgatttcttttggtccaaagtgacagatatcaatagtgccactatggtttattgcatttgtcatcttaaaaacatcagacaattggctgggtgtggtggctcatgcctgtaatcccagcactttgggaggccaaagcaggcagatcacttgaggtcaggagtttgtgaccagcctgaccaacatggtgaaaccccgtctctactaaaaatacaaaaaattagtcaggcatggtggcaggtgcctgtaatcccagctactcaagaggctgaggcaggagaactgcttgaacccaggaggcagaggttgcagtgagccgagattatgccactgcactccagcctgggccacaggagtgaaactcaatctccaaaaaaaaaaaaaaaatcagacaatttatacatttagaaaggagtaatacttagaaaatattactacctgtgggctaggaagcaggtttctggccaaaaccagagacagaaacttcaagggaagaaaggtgagacaggaatttatggtgaaggggttggctaagtatacatactaggttataggagaagctatgaatattcatgaagggaccttaacatctaagttacatattaggttatgggagaagctatgaatattcatgaaggggccttaacatttaagttacatattaggttataggagaagctatgaatatgcatgaaggggtcttaatgcatgtgtgctgaacaaacatgcatgttatatacatgcaatgttcactttgcagtggagacttaacatttgaatgtattacagttgggctgtgtacatcaaaaggtgaagcagagacatgaaggcactcagtgcacagcctctgtaaactgggcagaaccagtcgatggtttgtagtcccttattaggagaaagttgctaaaatccatctcttgtccaatcaaatctgtagttatgactgtggaagaggggaagtcggtcagcatctggtgatcagtgagctataattgtttttatattgcttatcttgaggccagtgcttgtttaactgccagagaaaaagaaaaaaggatccttgtggcactgagaacagtttattcaagtgcagaggtgcttgtttttacctttgcctggcatgccgttaggtctcctttataatttggtatcttattgaacacaaagagtccattctgtctcacctggggaccaagggcccttatttttaatttatacattcatgattgaaaaatgccaaagtttggaagattggtaaaaataaaagtctaaatgttttctcacccaagtttatggatttctgtattctataaagagtttctggaccgccggttaagaacctatgtccagtagctctctattctgtttggatattggaatctccttataagaagctttaaaaaagatacttatggttaggccctattctgttcaatcatttcagaaatctcctgtggatacaatgaatatatatgtatgtttgtgtgtgtatatatgtatatatatgtatatgtgtatatacatatgtgtgtgtattttttgtaaagttcatcaattgattctactacatacacagccagtgttatttatggctcttgacctatattattaaatatttttaaaactcctatatcagaacagtttattaagagcatttcatatgtttcaggcactgtgctaagggctttatgtatctgtgaagcagagattttttttcccattttaacatatgatgaaactgacatttagagatattgcattgactgtcttgggtaacacagctagtgagtgaaagcactaggccaggaaggctttccattacaccttgaagaaatatttcatttggccctaagtagcctgagaaattaagaatatgtgttattccaactctcttaagtgggcaatcttaaatataaattttcaaaaaagaaaacaaatgatctgacaaggaaagaagatatgttatcagccaagcattgttttgctgttaatcccagctaaggatattttatgcccagctcttaatgctttgcaaggatgtagctgtctattgaaaatagtgtcagtgggactccatttggacttggatttgagctgttacctggcctcatctgaaattctgtattccaaaatggcggaatcagggaactgagtcaaatttaggtgtcctgcaagcgaggaggatgcttattgcttacttgatgggcgtacgttagtccagagcccttgtacagtcttcttgccatctccacgaagactacctctgcaaaagtaggcttctatttctttgaagtttttataattaagtttcacttattagaaatagggggatttttgtcactcagacaactcgtttaaaaaaataaaattttgtaacaggtgaaactatatctgttgtcaggccagcaatggctagtacaagataattacttttgttacttatcaaagaacgtcgagagcatgaacatcaccttagttcttttgccttgtaccccaaagaggatattcacaaagagaaatgtaagtctctgtactgaagggacttctcctttgttccctctgaaattttttgagcttgtcaagtccttgtttctgttgatttctacacagtcccatgctgatttattttaaataaattaggaaactgctgaagcaactattgaagggaagactagtgtatccccaggaaaccgttcagtttttttgtgctagagcttacgtagtgattttctgatattcatgaattctagagtcaatatatacttacatcccatcctcctttctttgccamaattcgggacaaattttaactcagattatctagtgacattattttgtggacatttaaaaatattcttctaatttacaaaaaaagagaatatatcataatagtagtggaaatttaaaatatgagtggttaagagtaaaaacatccatgcccacttatcctaacaaaattctgtttttctagagttgtagtctaggagctaaaggcagagggcttagagtcagaacagatttgaatctcaacatctcctctgacttgctttttatgacactctcagcctcaattcctcatctgtgtgaccctcagagatagtttaaacattttgaaagattacatataacattttgacacacggtaattattcactaccataaattagattgcatagaatatttatgcatttggtttttatccctacttttaaaataatatttttgtatgttgtgaaagggagatttggcaagtcaaaggtaacagcatgtgtatagcttttaaagtatattgcccaattgattttcaaaacttggtgaactagtggttttatacaaaatacttcatttcagaaatagttaccaatttaaaaattaaacactaactcactaaatatgtttttcagtgattccttcaatttgagttsattatatgtcctatatcatgtaagtttttggactccttgtttaatgttttatttattatactcccctgctttaatatcattcattcattttacttcacagcttctcattaaaacacttaaatagtgagttcttttcttggtatcagcatagaagcaaagaaaaaaataaaatatatttaatttcacaaaacaagggtagcaaaaaatgaatcagaatatgtaatatggctcacagttctgtgattagtttacggctccatgtagccaagtattttcttgacataggacattcgtagttctttaaaataaaatgttagtgcatcctagatggaaatggagactggatttamcctcccaatggaaacaacaacaaaaatcttagaatatacatgaaacaacagcttttaagacctggaacatcaggcaataaaggagagtggtcactgagagatagaaaacaaaggacttgccccaggccctgagttgaggaggctagaattcacaagataaagtacagaaagcagagagctacataaagagaattccagagacctgcaggtgttctcttgagtatgcagcactgagtacagatcagctcatgcatgtgagtaaacaaagagactggaaaaaaggaggaatgacatggactactccttggttcttacatatatctgggaatagtgactgttcttgccagccaaactggaaaactctatgaccacaagcattgaatagaatataaataagactcttaattaagtattgggaaataattagccccaggctgagcactgctttggtcatgcccagcaaatgttaaaggtgagatctgaaaggatcaacgtgtttccatataacttaactgcaacccagatcaaagctgaagaatatttataggaatacaaaaatacctagcaccaaaaaaggtaggattcacaatatccagcattcaataaaaaattacctgttatgtaaataagtagaaaaacataagccattataggaggaaaatttatagattaaaaccatcctagaagtgacaagattagcattagcagacaagtacaataaagctgttataattatattccttatgttcaaaaagctaagacatggaagatagataaaagagctaaataaaacttccagaaattaaaactacaatgaataagatgaaaggtaactggaagctatgaacagcactttaggcattgcataagaaatgattagtaaccttaaaaatataacaataaaagctatccaaaatgaaacgcacacacacacgcaaacagagaaagagagagaagtaaacataccatcagggagctggtgacaataagtggcctaatatatgtgtaattagagtccccgaaggaagttgtggaaatacagaaaaaaatttcaagaaataatagtgcaaagcttccagttttgcctaaaactacaaacctcccaaaacacccctccccaaaaaaacccccaagaaacttcatcaactccaagcataagaaacattaagaaaactataccaggcagtaatgtaatcagattaatcaaaccagtgataaagagaaaaatcttaaaagcagccagagaataaagacatgttctgtacagaaaaacacatgtaacagttactagtgtgattaattgtcagaaacaatctaagctatgagacagaggggcaacatcttaaaagtactgaaagaaaaggacgaatattaacctagatttcaaaatccagccacataccttttaaaaatataagtgaaataaataatttttcaagcacaataaaaggaggtctacactgcgtaatgttaaactgttttaggcagatggaatatgatgccaggtcaaactgtggttctacacaatggaataaagaccaccagaattgtaactacatgggtaaatatatgatgttttcccattaattaactcattttagaagaaaataggttgtttaaacaaaaaataagataatatgggggttatagcatacataaagctaaatgtacaactatagtacgaaagttgggaggaaagagatggaagtatactgctctagggttctaacaccttttgtaaatttttctattacttggaggtaggcttttataattcaaagatgctctaagagtaccttaaagatactctaaaacaatcactaaaataaagcctcaaagagttatagccaaaaaaccaacaatcaatatataatggaataataaaaagtacttaatccaaaagaaagaagaagaaagaggagtaaaaaagagatgagacaaatagaatccatatagtatatagatgataagagttaaacctaaccattaaataatctcatgaaaaatgtaaatggtctaagcaccgcaattaaagggcagagattttcacattggatttttttttttttttttgagagggagttttgcttttgttgcccagactggagtgcaatggtgtgatattggctcaccacaacttttgcctcccggttcaaggcctcagcctcccgagtagttgggattacaggcatgcgtcaccatgcctggctaattttgtagttttagtatagacagggtttctccatgttggtcaggctggtctcgaactcccgacctcaggtgatccccccgcctcggcctcccaaagtgctgggattacaggcgtgagccaccgcgcccggccgaaaatagacttctaaataacccttggatcaaagaaaaaatcataaagaaattagaaagtaccttgaactgaatggaaatgaaaatacagaatgtcaatatttgtggtgtgccataaaacattattcatggggaaatttatagtaccaaatgcatgtatcaaaatgaaaaaaagtctcaagttaatgacctacatttttacctttaaaaactaaaaaaagagcagattgaacccaaagtaaataaaataaatgatataataaagatcagagtggaaaagaaatgaaattrgaaaaagaaaaaaaatagagaacatcaatgaaggtaaagctggttccttgcggagacgaaaaaaattgaccaaactttagccagactgatcaggaaacaaaaagaagaaacacagattaccaatatagaaaaggagagagataacatcactgcagattctacagatattaaaaggaaaatgacatcatattatgaacaacattatgtaaatgaattaatcaacttaagtgaactggacaatttccttgaaggacacaaactataaaagcttattcaagagacaatagataacattagagaaaataaaacttcaggcccagattgcttcacaagtagattcgctaaactacttagaaaagaatagtgccagttctatacatacctttcagaaatgtaaaatagagggaatacttctcaacacattctatggggccaacaccctgataccacaattagagaaagagtacaaggaactccagrtaggaactccagatagggttaatatttgaaagtagcatagttcatatgttataaactaaatagtgataatcacacaaaatatattatctcaataaacccaatagaaaaaaaaatttgaagaaattaaaaatctatttctagttaaaatgggaaaaatctcagcaaattaatagtaggaaaattccttaacttgatgaagggtatgtacaacaaagcctacaactaatatcatactaaatagtgaaagactgtatgctttcctcctaagtgaaataaggatatctgctttcaccaacttccattccacattatgctagagattctgccctgtccaattagaagaaaaaaataaaagactgcaaaggaagaagtaaaactgtctttatatacaatttgattatctgtgtagaaaatccatggaatataccaaagaaacaaccaaccaaaaaaatcacttaatttacaggaacagtcagatagcccacaggctgttgtttttagattgtattttttttttaattacagtaaaacaccttctcttcattactgagacttttgccattcccttaatttttgcagctgagataaatacctaacttgcctatcctagatttggccctgtcagaatactttaggtaatcagtgagtttgacaaggttgaaggatataagattggcttgtaaaaattaattgtatttttatatgcaagcaataaacaactggaaattaaaataaatatatcatttacagtagcagcaaatcatgaaatacagataaatctgacaaaagatgtgaaagataagaacactgaaaacaacaatccatttctgagagaaattaaagacaacctaataaatggaagaatatactgtattcatagatcagaggagccactattgttaagatgccaagtcttcccatttttatctatggataaagtgcaatcccaatcaaaatattagcaaaccttttttgtggagtttgacaagctgatcttgaaattcatatggaagtgcaaaggacttacaaaacaattgataaagaacaaagttggaagtctaaaactttctgataccgagctatgttaaaattacagtaatgagatagtctggtgttggcataaagataggcaaatagattaatgtggcagaatagtaagtcctacaaacaacccacaaattatttatatgaacaacygatttttgacaaagatgcaaaaaggcaattcagtggacaaaatatagtctttcagcaaatatgctggaaaaattgggtgttcttatgcaacaagaaagtaagccttgattcagatctcacatgatatatagaagttaacttaaaatactcatagacctaaatgagaaacctaaaactataaaactttttgaagaaaacttttgacctttgttaggtaaatatttgtcagatacctaccaaaattactgcctttgaaagagagaaaaaggatatatgtgatttgatacaaattaaaaacatttcctcttcaaactcgtttataaagaaatatgaaaatacagatgacagactgaaagaaaatagttgcaaatcatatatctgatacagtactttggtgggtttattttagaaatttaaacatatacccatcatatgacccagatattttacttttagatatctacccaagagraaacaaaacatatatctatacaaagacttgtacgggaatgttcatagaagttttatttgtaacaacaacaacaacaaaaaacctgggactaactcatattttcatcaacaactgaaaagataaacaaattgtggtatattcatactatgaaatatcacttagcaataaaaagaatgaactattatacacacaacaaaatggattaatctcaaaataattatttcaagtgaaggaatccagattcaaaaaaaaaaacacctcacaaaagtacatatattattatgtcatcctaaaactagaaaatgtgaactgatctgtagagacacaaagtaaatcaatggttgtcttatggacagaggggttatgagtgggagagaggagttataaagagtcacatggaaactttttggcaaaatagatatgttcattatcttgattgtgataatggtcttaaagtattacatatgtcaaaatttataaaattgtatactttaagtatgtataatttattgtatactttcataaattattattttattctttatataacatatatagaagtatacttccataaatctgtttaaaaaattggtttaacttaaaattattatagcccttttcctggaatgcatcttgggaattacttttaggttgagttgaatcgctaacacccggctacctagctcttcagtccctacccaactcttcaagttaccagtcaattaacaccctctagcattttgatcattctcactttgatactgagtcatgggaattaacatgaagttaaaaatgaccttagatagtattaagaaatgaaagaaatattggttggattgttaagctttggctttgctgaagattaaaatgctggtggttcatgtcattcagtaaaagaagaatcttgagaaaatccatcaaaccttttaaaagagtcattttacaagcattactggctacaacatactctttctcaaataccccttcattttgtaatttgtcaggctgcctttggggtgagaatattgtctttccacattggaagtatagcatctaacacactgaaccatgtgaaagagaccctggggatggcaatgatgcagtgaatgtggagtctttcatggtataaactagctcatgagagaggcaatggaaacaatttataaattgcttatgtttgtcacatacccagttcatgtcaaaaaatgaaaataaaattcatattcaaagagctgaaaagctttgttcagtaggctcgcttacataatatcaatttagtaatatttcataacaattcgtgttgcgatctcaactccaatgtaatcttacttagtatcaatttggtactatttcataacaatcagtgttgagaactcaactctaatgcaatcttctcttaaagggctggggaaagaaggagaaagaaaggataatgtgaaaactgtaacaattgttttcctcctacttatcccctcaagcctttaaaatgtgcaaagggcccatttaatctgctaatttgtaagcaattttagaaaaatgcacaactgttttatgagaggcttaaatgtaggaggcaatataaagtttttatttagcagaatatgctacaagtatatgtgtttcattagctctgttacaaactattcatttcattttactcttttttgggcttattgataactatatattttttttctcccccagcttccttttttgccagtagctagtttattcttttacattgtaccctacagggaatactctttagatatttatttttcacaaagaactaatttcacattttccccctgaggtcttctaagatatttacttgaaagcatcctctttattgtttaaaatagcttataaaaaacaatacttaacacattattttttaagggtttatatactgtattttaatgactgcttttcttttttaattgttatttttgattagataattgattcagtttaaactatatctgtgatccacaaatatgatccaattaattgtaaatcaattaaaaagagactgttcatgagagacacaggactactagcttaatcaccaggcaaaccagacatccttaaaataagacaaatgaagtatactttgatataacagttaaatgtgtataatgaattctttaatttactgaaaattttactatgtgggatatgtcttcattttaataaccaaaatttataaaagtacaaattagaatgagggccattttggtaagaatatatactaatacaggtaactagtagttatccattttaataggaggcagggaagaatcagtcaatgaaatttgttggtaaagatgtaaccatatttctaccagtttcttcaacctttctaccagtgtatttcataaccatgttagagagaaaaggtacaattttttaaaaaggagcaaggaagaagaaaaaaagagatatactttggcaatgagccttttccccaaaacaaactgattcttaaggaaagtagaagaaacaagaattgacaaaggggttttacaaattgaaaacataacagtttcttagttttgwatagccatttataggatacagatgtgtatttctctgaatcgatttcacaataacctcacaaaaaagatatgaatatcatcctgattgcatgataagactgatatctggatgaaggtaaggactttcctatggatagtttttaaatagtaagtgatagaatttcaaattgaacacagaacatctgaccacacagtccccactgttctgctaagaaactgyattttcttaaataaaactatgcatatatacttacgcacaataaaaagattgttttttaaagccaaacatcagattatttagaattatctatgaatgatttacttttccttttcacctggattttcatttcctttggtggaggtgctaatgagcagagaaatgggaaaggtaatcagccagagggaagagaagaatcaaagacctagataattcacaaactggaaaatgagctcctaactaatcaagactggattgtaaataggatagaaagaatttatgcatccctggtattagcctgaatagcatttgtacccaatccaaggaaagtatttgtgaatttcacagttggctattttttctccctctgagattcttttcctgaactaattatccattgtgtacatgaagcaaagaaataacttatcattaaagtcatttttgaggtagatatttcactttgcatttgttaaaatgcctagagcattaataaggaatgagttaactttattaatacatcttctttggggagtttctgatctatatactgatcagccaaaaggaaattttctgtaatattttagtcatgcaaaatttagggaagtaaccagattgactaatctttccataataaataatttaatttaactttgtgctgctttttgcattttaattttttcataatgtgtcctttaaaaccttcaatattaaaatgatcagtgactgttttgtgcctgatttagtttaaattgtaaatttagttatggctcttgggttacaaagtatgggtggggagatgtcttaatataggaaatgaacacaattaaaggctggaatggctacgtgtacaataagtttttaaatgaattactggaaactgtgtagcaatcaatatgagaaatgacatataacaccatataacagtaattattattgttacctcgactataattattcctcaaatgctttacatttcatatattttcatacatactattcaactgcagagttgtatgaaatgttttatgactcacagttgttgcctaatctctgcttaaaaccttccaaggcctttccaattcaaactcagactgctaggataatagataccatatggttagcttatgactttgaaattcaggcaggacttctgcttctagtaaggatgtagaaagctataagagattattactcctaccctaataaccataacaaaagatataagccacaaaattagacttttaaaaaacttacctaaaatctgaaaatgcaaataaacttaaatgaactaaatttcagaaagtgacaaggagagcagaaactcatgactgctttgctccctggagaaatggtgaaaggaagatgtcactgtagagacaccagttaaaattgtaaagaacttttaatgaatgtttttagagttgtgtgatgtgtgagaaccccaagaagcccaggcacggaccatctctgcactcatcaaccaaccgtctcatgggacttcactgaattgtcaaccaaatgtaaagccaaggcagccaagctgagagatatcccccctaaggcaagcagggcctcctccagttaaaagaggtctgctgaaggctaaggcagggaaaaagccttgagagaaatccccccagtgcattctaggccttcactagttgtactgcagtggctctttggaagactagaggaagggaagatcagtagaaagatatcctgaagcacaaaaaaccatggtgaaactagagagcagagagaactcccgagcaaccgaaaaacctaggagctggcctgtaaagcagcaagagatatcccttggttcagaaagttggttactggattaacaataagtaaagagattctagagtctttctgggactcaagtcccaagtcctgctgaagagaaggttctgctctcracacatttgaaggcaatgaagaaccgaatctaactaaagcagcggcacaacccagactctgcttaactgtagacttaatccactcagtctcctaattagcagcctaataagagaagtggtgtgcccttttctggggatgactattatttctgtaaatttctactgctcttttacagaaaccatctggcactcaataaaaaattataagacatgagggaaaaaaagtgtggcccaagatcaacagaatattcttgagagtggtccatagaagcagacccacacatagaattggaattatcagatagagacgtaaaataaccatgataaatgtggaaaaaaaaaatctagtgggagaggtggaaaaacagtcatgaaaagatgtggaattttattagagagttgtaaaataaatattttaacagatccaaagagaaataaaagaagtgaagaatacattatgagaaatgaagaattcattgaccaggcttaagggagactagacaagatggaggaaggaatcagtgaagttgaagacatagtaaattagcataggcactatggaaagcagtatgggtgtgggagagggctctaaaaaagctaaaaatagaactaccgtatgacccagcagtcctgctgctgggaatatatccaaaagaaatcactatatcaaagagatatctgcaccctcatgttttttgcagcactattcacaatagccaatatatggattcaacctaagtgtccatcaatggatgaatggactaaaaaaagtggtatagatacacaatggaatatttttcagccgtagaaagaatgaaattctatcatttgcaacaacatagatggaaccggagaacattgtgtcaagtgaaataagctaggcacagaaagacaaacatttcatgttctcacttacatatgagagataaaaaactgatctcatggagatagagtgtagaatggcgattaccagaggctgggaagtgtagtgggaggggaaggggaagggtaaagagagattggttaatggttacaaaaatatagttagatagaaggaataagaactagtgttcagtaatataatagggctaatatagttaacaataattaattgcatatttcaaaataactgaggagtggaattggaatgtttctaatacaaagaaatgataaatgtttgaggtgatggatatcctaattaccctgatttgatcattacacattgtatgcttgtatcaaaatatcataggtactccataaaaatgtacaattattatataaccataaaaattattgaaagaaattccccaaactgacaaatcaaagagaaaaaatatgccacagtgtccaatacctgtggaacaatatcagaagttctaacattcatataattgaatgttataaagagataagatagagattggagcagaaatcatcaactcgcttggtaccatctcccagtggccttccttggccatcattttaaaagcaggcccctatgccagactccagtcattctcaatcacattgctaggttttagtgcctcaataatattcatttctgtataaattgttcattttttttctttttattctaccaatatttattgaatgtatgctaaatgccagacattattttagaacctagtattgaacaagacagatggagtctgttttctcacaaaacattttttctctatgtgtaagaatcttttttctttgttttctcatttacccctgaatctgtacctccttgaagaatggctggtgcataaggggagcgcaataaatatttcttaagaaaaaataaattaattaattgtcctgcaggtcaattctaaaaccctattttttaatttcctcctccaggattgtctggaaaaaactgctaagcctgttctgctatctgttattttttttttccctctgaactcaggctccacttctactaaattctcagtaggattggttcacatataggcaatgtttacaaattgatatagatagatataaaaagtatatagatgtaaaattgtatttcagtaagaggaatcagatgttggggaaggataatcatacttctattaatgcatgaatccatgcatcttgtaattatgtgcatataagactctgcttmctaaccagacagcagtctcgcagtgttcctagggccaagccccatgcttagcacagttcaactgcttctcttttatgtgcatcatagtattttattaaaattcacgtgaaagaggacattttttttttttcccaagactgagtttcactctgctgcccaggctggagtgcagtgacgcgatttcagctcactgccacctccacctcctgggttcaagcatgctaaataatctataaaaatcagtcttataaataaaggacatatgccataaaatgtttctgtttttttaaaggcaactgtcaaaatactttttagaaattattcttctcatttagaatccatgtcccgtaggccttgttaggcggaatctgagaaaccaatgagcaaatctgtcagtctttcagtgactggattactaagtatatttcaagtcacacactagaattctccaagggtacgacttcattctcatagttgtaactaaggaactactacacatctcctgcgattttctgrtttatgttcagatttactcccagccatcactggaacaggacagtcttaatgatagtaggaaaaatgtgagttgccattatttagcattctcaataaacgtaactgaattattaatcatagagacactgaatgccagagaaactttgaataattaattatcaagcattatatgacttagtctgtttgtttaccaagggaaaaactaagggttaaagagattggttccaaacttgtgcaaactagtgttcagtttgtccacatttattaagcatatcatacttcttttcttaaatatgattttgattattgattacccccccttctccacaaccctcttctccacatccctattcctcttaaatccagagaaaacacaagagtatagcattaaatttcagatgcacatcttttagaattatgtgttgccaatattgattagtcagggtatcataattaatgatgactaaattcgttagtagaagctacttgtttttgtgccagttactagactgagtagtagacatactttatcactaattctcagcacaattttagacaggaggtatcattatccttactttacaaatgtggaaactaatcataaaaaataagaagtatcttactcaagataaaaagactagaaagtggcaaacccaggaattgaacctcagagttttcaatctctcctatatacacaacggttaaatgtaccatatacctaatcatatttcctgacctccaaaaaaagaataaagagaaaataagatacttctttctgtttatgattaaggcagatgaatgtatgctgaagttatttcttaagtaaaaatttatttacagatacactattgatttaaatttaagaagcataccacttttttaggtaaaatagaaaatcaaattttgcaaaataaaacaacttagaaagcataccaatatttctactcctacatatggtacaattatattatcctatttagtaaaacaaatgataattcttcattaactcagatttaccaagatgtatatcaggttaccctggttaatagtttgagatgaatgtttaacattatctctgtatgattattaagactacataataatttgtgttgtaatttataatactccccaaatacaaattcrtgtctaatgttcatttctaaaaatgcccacactattttactacttaagctcttaaattttcctgaactgatattttgattttatttgaatccttataaaactttttaaatgatttaaaaaatttaataccctatttacctaataatctattaacaaaaagcccactttctcaggctaaattaacactacagtttaatcataatcatattcacattttgaaatctttcttactgtcactcacatgagcaaacataaaaacacctacacatgctcaaaaaaaaaaagaaaacttaaggacttgctgaattttggacaacatgttcattttcaatttatctgaatcacttgtgtctgtaagagatgttatgaagtttaatttttaaaaatctgaagtagattttgttgttgttattttgcttttagtggttgttgtttcttggctggctgattgaatttcttagtcttagctgcctactagcataggatctcccggttacttctaaataatgagctcaaactctgaaacttccaggaacaaaacctactgctttcctgcctctattgcttccatcttactaatttgtcctatagtatctgattcattgtattcatttacataagtactcactgggcactaaattttttaaaaattctttttcatgttcagaatttgaagaactgcctttctttccaaaaatagatttaaaaaactgacttatgtattaggaaatctgtaatttgtgggattgttgatgttatgggggaaaatcatggagcacattaaaataaatggttaaatactgtaccatgatcttgaagaactagagmctttcatggctgtgtcaccaactatatgaacttgggcaagtcatagctcatctataaacaaagaggttgggcaaggtcactctcctagagatactacacttctgacaatgatttgattaaatggacctctcactgaggctcagaaatcactttcgtaatgtataacttttattgtattgttacagtgtgtattgaatagtagaagaaaaagcttttatattttaactgaaccataaatacttagccattttttaggcatctttgaattgcacataagagaaaccagtgggatctcatgcttggaaaatatatgagatcattccagaggtgaatacatactattttctattccctactccattttagtcatatgtaatgaaatggtttgatgggagcaacatagaaaattactgagaatttttatattctgaggttctttgactgttggctgagtgggcaaaggggcaggattaatatctatttctggaaaaaatgtttgagacggaggtgcattttcagggagagatttttttttttttcttgcttcattgggcaagaaagctttatcttgttctgtgaggttaactatgggaacagaccactgctgggagctggggaacacaagaccgaaagaggaagggagagaatgctctgttagtttcctggctagacaggtcacattgcacttggggcatgaagattagggtaagagttttaaatcacctgtgaaattattttggtacctagtatagagtgaaggattggggttatgttttcttagtaatttcctacaacagacacacaggagttttatattatcgcctgtatgtgctgaaggtatagatctttaggtaaacacaaatgtcagtcatttggccaggcagaaataagagtaggtttatgttggctcttgagataacaatcagaaaaaaaraagtgaaggtcatttttgtctgatctttaagacttccaatatcagaaaacttaccttttgatggatagtaccaacaaatatttaacttcataaacagataattaatctcaaaaacaaacaataaaagataaatctttggatatatagccctccttttgggtcatagtatcccgaggtagtagttgtagatatgaattttcttaaaggacttatttgaagattaactaagaaatactataggttcataacaacttaattcacatattatatactgcataaaaataaagtccttcttctaccaactctgaatcttaaatctcttatgccatagaaatttgcagagacatcagataaaatgaaattctagtttggcctaaaaagttaaagacattataaaaatcatgcatcattgcttaaggttaatattctctaatcagttaccacccaacaagaattaactctcctcttttctagagcacctcccttttgactctgctctttgaaacatatcctcttaacatctcttgataacctaaatttttttctagatcctagtatctacctctttgcctttactaaaatatctattaaccctgaaaaagaggagtattccttaaaaatctctcaaatagaagtcactagtttccattgtctctgcctacccttcatcccaccccactatagagccactcctctatttttaagccaatagttgcatccagtactcttcctgcttcgcagtgccatttggagagaggttgagtcagcattctatgtcaccaaaccatattctattagactaagccacactctttctatccttcagcctcatgggtccttgctctgcatttctttctcttcttcctccttacccccaaatattcatgagacctttggtatattacttttaatctttgtctgctgtcagcatttatggtctttgctaccacgtatcatcctctagttacttttgccatcatgtcactgactttcttccatagacagctcctgcccttcttttcccaaagaattttgccacctctgcagttttgaaagctgtgttcctgtcatctgaaccgaagtccttatctctatatctcccaccacgtgtacttttaacaatttcatgacctcttgcctcgtacctcctttctgctctaattctaagccaatttctgattctgctaccctccttttccagcctatatttaatgaacactaatgtcaactaatgcctttcttttaattttgaaaaaatgaaaaataatgaaattattttcatagaataataatgtaataacacctttgcatagaaccactcagaactgacaaatgttgttttttttttttaatgtttgctttactttcttctttgattatagttttaaagagttaagatgcagactttttttttggtaaactgaagctgaaatgtataatatgtatgaaattgtacagctaaaatgcaaacaagtgaaatttctgaaaaaggcattaatgaaaagaatgctgtcagggttcaaatgtgaacttgtttacaatcctatgcaggggaattgaccagagttgggggatttaggtgaagccatagcatgattggacaaagtctgtttgcaaaatgtcagatgtacttttctggctattgaagttcaactatagatgtaggatcccaaccatatatgaatcattatagatgmcttcgtagacatctgtttctataaaagaccttttctaaatttccctctggagtaatgaagtgctgggtcagtaaaggagactaacattttgaaaagttatagtcataacaggaaagccgaaatctctaagtttcccttctttcttcatttttacagttttagtaacaatattcttggttaatatttaataggataataattgtttggtctactttgatggtttttgcctttataatgttatgctgaaatatctcgatttgcttaattgttttctaccgaaagattctaaataggcaaatcattggagatcactttcataatctgttatattatattgttgtaagagggagacctatggcagatattttttatttgtttttctttagttgaaatgtggtaacatctatttatactgctgattttcttataggcttaaaaaatagtattgatgcagaagcacacatatttatcatctggagatttcaaattaattaatcctttctaaaaaaagtttatcagtattttataatgcgataccctaagcatagtcatcatataccctaggttttctagggcagagtctgtgaaatttatatgaaattgatgtgatattattgttataacttcatatatttttaacacaaaaaaattttcagatctgaaaaactgaattgattaagtctgtgcttaactaattcagaacatactaaaataaaggtaatgtgagaagctgacaatggtcagtttaagaacttttaattgcttgggtttatatgttgtggaaaactctgagaaaaaattaaccttcaataaracagcattcagaaaaggatttttttcagttcactgtgggcagaagaatccaaaatataatatttaaagggttcatactagctcagatgctagtatcggtttctggagaaacatcgatcttacgaaggtgacaaaaggtatcctataagaattagtgagcccaaactatataatgagtgttatagagaaattcactatgaatatttgcataagaaatgataaagacacatagcaactataatcagtgttcattttctccttactgtgattctggtgacattctttaacctatgggagtaaaggatgcttctttcatattctagcaggtcttgttttcacactgtgcttctgtgtcttgcctgaacagtgtgtctatgtttcctttcccagtagtattctgaccaccactctcagttgtcttttctattcaggaggtgaaagagaaatttctaccctgtttccatcctgcagcattatggttatttctgcataaactatcctatcaaaagttctagagcctcaccatgtaaccacgaaacacccattactataggtgtaatgggttttcacatatcctttccacatatcctttgatctgaagaatattaagagctttcaagataatcatttttattaaacttatgaacagcttttaatgtagtttgtttaattgtctggctttagatgttattggaattgtctcttgttatcattagtagataaaaataaataccattatatactaagaaagttctacataaaaagacaaacagatgtgtcatagtgtcggtgtgttaaagaggtgcaaatctgagaatcaggaggactaggtctatttttggctgcatatttggttttatagtgggtttattggaaagattttgcactcacaggctagtggaaagatgaatgacaatattaatttcttattttgtaatcagtgtcagagaagcttttcagtgcaaaatgtccaaagagagaagaggactagaaagtaaagggtacattaagctggaacctgaagtgacagtgctgtgttacattgcagagattctgcagtatgtcagggggttggtgattcaattgtctgaatgcatgatttggtgggccagtttagacgagagcaaactggtcctgtcactgaaatcacaatgggtaaaaatggacctattcaatctgcctctcaatgccccaaattcttcctggttgtaaattagagctttaggacaatgcattaactcattcgggtcaccagggtactatgtcagctcagtgctcacaattgcccatgaccaattctgcactctccccagcaggagggaagcaatgtcattttgtactctcttctttaggataatatcaggtctgaaagggaaggaacaaaggaagttgctgctttccttccacctaccccacttagccataatcacacccctctttccacttggccagactatgaaccagacagaaaatgagcttagaggttgtgtggttactcaaagacttgaataaaatcaagaattcagtgctgttcagctccatcttcaagtcaaagaaaatgggcatatgggcagcataggagagctggagcattttctacctcatccctagtaaaatcattacaatatgatttctcttgctaggaccaacatttttatgtggctactgtctgcttccatgacagcatttcactccattccctgctcagtcattaacatccagcaatactggctttttctgtgtgtttaaacatgcctagttctcggtgcatgtggaccttgatgtatgatattccccttacttgaattgagtcattgttcacccaaaacagattccagctcatctgtgaaatttccattttcatgtcacttctacatggagacattgcctgaaagggtgaactgtattacaggccacttatttatttactcattcatttattttggatagcatcttgtttgtagcacttaccacattttgtaatgtataccattgtgttaatgttccttgaatgtttctcttctccactggatcacaagcttgaagtatgcaagtgtcatatatgttttcttgaatactgtattctcagaatctagtccaattcctggtccatagtaggtgctcagggaatgaactcccagaatccaccaccctgtcatgtgctcagggtccttgttgtgacctgtacaatgtgaagtaatactagtgacccagtagcccgtggaggtaggaaatgagacatctgaaatccagaccagaaaaatacattctaaaaaaggttactctactttacctctcctttgtttggtacattcttggtcttctcctaggtcagtctactacaatctctagttagcagcaaacatgttatcagagtaagtctgtaaatgtgaccttagctttctaattcaaagtcatttgtcctctgaaggcttctccagtcatttccatggtcccttgttaaagactaaacaattaaattgtgcaagctgtcttccctttaattgtaaaactctcgctaataagtgcattattttatttgaaatgcacattttctaaaacgtaaataattccatattcaaatattgctacctatattaatattttaatataataatgttaaaaatacttcccaaaaccaatgctgataactaaaagattgttaggtctttgcttttttaaaaaagttaattcctaatatcactttcaactattggtgagaacaattccatatctcttgctttcctgaggtaaaacacaaggtgtaggaataaacaacaatttcaggggtattgtaatacagaactccaatccccactgcccctattctgtatttctgtgctcccatcctcaggggctagcgctttatatgcctgactatttcactcgtaccatttcagaaactcacctctgccagaaaatccccccatatcrgtttttggaaacattcttcctaatgctcttgccatggagtctttgaagctgagaattttccaccagagataatagtctttaagatgctcagagtgttgctttactctttgaatggtgtgtttccacctccctgaggagttgcagtaatatccccctgacatggagacagggtgcctgtgtctcaccttgggccacagtactgatccatattgataagcagctgtgtcccaaactaaagcacatacaatacattcttccaacaaatatttattgtcacctrttatgggataggcactcttgtattctctggattaggcaataaataaaaactgaccaaaaacccatccttacgtttctcaaacacccaaagtttctaggcaatcacttttgttgwtgttgttgttgttttgttttgttttttgctcagaaattttaagcttgataacctcacgagtcttagtgtgaggccccaaaacttttcacgtttctcttgggaaatctaatggtttttcatgcaaatagttaatctctggaagtaagatccttggtgatttgatacaatacataaagatttaacatttcttgaccacttgtgtgccagacatactgccaagagcttaactaaaattaactcttaaggttgttgtgagagttaaaagagttaatatttgccagacccttagcactaatattgcatccattttatagctaggaaacttggagaaattaaggggctttaccaagtacacatggcaagttagtgaagatactaagataatatataggccgtaagacatcagagtctgtgctaaatactgaagagagaaatgaataaagtgaacaaggaacaaacccctgctgtcacagtgctcacaatctcaagggggaaggcagcaactaaatagtttcagaaaactatgtgcagatgagaaacacacaatgtcacatagtagttcagagtattaattacctaactctaccacaagagcaagttgattaggaccttccagagaaagtgactcttgattggcatcttgaagaatgactagaagttcagcgtgtgggcagagaaggcactggcattaccagcagagtgatgcagtacctttgaagtttgagaaaatatttcacaaccgggaactacaaatggctctgtactgcctgagtgctgaatacrgatgggagaatagcagacatgatggttggaaagagatccctagaccgcaggagcccagttacgaarggccgtttatgcttgcctaggagtttcagctttaccctggagaggtggagaactagtgagagattttatgcagagaaattatatgatcctgcttgcattttggaaagatccttgagtggctctgcagaaacttgatggaagggaaagcaaggatagagacaacaaaaccagttagccaaggaaaaaataagagttcagaaatgaacatggcaaggtaaaaaaatctacaagttttcacattaaacacagactctttcatcttcaaccccagaaaattacgaagtgttctcaatgtcttcaatttgctgctcagatccactcgcctcccttcgacgcagtatctgcatctggaagacggacctacttcagttggccaccttgccctctaggttccagctggactcagtcaggacagatcagagagactgaggagggggaggcctcctgcagggtcactgtgaagtacctgtggatgccactgaaatctcagctcatgtctggtggccctttttgccaggctctggtcttaagatggtcctgggtccttactgccactcccagtgtcctctactgtcccttgtggttttcctgcacaaggctatatctttgtaagtggttacataacatttattcattttatccacaattgactgtcctttctatttcctgctaggattctgaagactatgcgagaataaaggaaaataggcattgtcagaatctgttagtaggattataaatttgtacattctttctacagaacaatttgaacatagcaataaaatttttgaatacatgcactctttgacctagaaatttctcaattaaaatttcactcagtggataaaattgccaacataggtataaacccatgtttactgtggtattttttaatgtagtccaagttgcagaactgtatgcwtaatattatctttttggtataaaaaatatatttttataaagatacacarcattaatagtgttcacatatgtggaaaaggcctggaggcagagggtggggttataggtagattttgtctcatcgtattcaattcttctaaactgtttcaattaacttttaacaaaaattgtttttaattttcaaagatgtcattaaaattggaatatcggtgcctattttacagcgttgttgtgaataacaaaaatcataatgtattataatagtgattacgtaccaggtctagaggacctggtaataagtggggataaccggaactacagcagactaatggaagtggaagaggtgatgagtttttgagtggtataggagttggaattaccagagatggtgattattcaagtagcaagagtagggcatatattgcatatgaagaagaaagtattatacagtgattttcagttatcacttaagcaactgtatgttggatggctccattcactaaaggtaaaatgcaccaggaggtagagatttgggaagggagatgaagaatttggttttgcataatggagtttctggtgcctgtgggatatccattgggttgtctaggaagcacttagataagaaaaagtcaaatgatctcatggcaagtaggccctctctaccctgaaacatcattgtctgggagtaagaattcaaaatcagttagaggttataagagccttttcttagaatccctgctgccaccttggatttcttttccttttttcagtatacttatttttcctttttcagtctttagggtaagtgtcattgcttctaggctttggctgaaacctgtgtccattaatgcaatttagtctactctggcaaactaagatataccaacacattttggtaactaacaatgcaattcaacttgtttcttggttcttgcttgttctgtaatacagtgtatttttgcactgagaaggttttcattatgttctactgttgtatatttcattgatatatttatgttgataatttttactttttcttgtcatattttctcatgggaaaacgtgtgatacttttaatataagaaatcatcttargctgggtgcagtgactcacgcctttaatcccagcagtttgggagtctgaggagggtggatcacctgaggtcaggagttcgaaaccagtctgactaacatggtgaaaccccgtctctactaaaatacaaaaattagctgggtgtggtggcaggcacctgtaatcctagttactcgggaggctgacgcaggagaatcacttgaacctgagaggtagaggttgcagtgagccaaggtcgcaccattgcactccagcctgggtgacagagactccatctcaaaaaaaaaaaaaaaatcatcttatatctatctcaattagaactagaggcaattttaatgcaaaacaacaaaagtaagctgtgttttgaagaaagcttgccaaagcaagtagtggaaataaatacattatatgtatttcccacatctctatgtagttattaatactttattaatttaaaacctcaggaacatgtttacatgtaagttatgctaaagcacaaaaaggaagtagatgaaaatttgttaacttatttactaaatccttccacaaaatacttttttaaaataaagggattatagatcagtaatgtcaagatattctgcatagcttgtctttatcaaaataagggatctttttattaaggcaacccagaaagggtggatttatggattgaagggagtatgtttaatatgtctgtatccatctagattgacagttctcacagacatgaatttccccagagagacagtgttactggtgtcagtggatggcatcatttacttcaatgttccattattaaactgataacaagataattcctctgcttcccagagacatgacagggtttacaatggttaacactcttattgtatgggactcaatgttctaggtagtttttaataagaagctcatttgtatttcaatattgaaaaaaattaaagtgaaaacaacatcgtaaaataaattcaaaatcaaatatatcaggcaacacaatatggctatttaaagaatttttgcttactatgtgtagctttgttgaaaagaaatgaacatttccttcaatctttcagctcaattttactaaacagtaaaaagcatatattagagtatgttatttgttgaaattgaaatttacatatttggttgattatttgaatgcaagacatatataataattttagataattacaggggcagaggaagtagctaatattggttgagtgyttttaagttttcactttaaaatacagatataaaagaagcaatggagatagagatagcaatagagacagagatataaatagacaartaaacaaatagaaatgctttaaaaaccaactcaacaattcactaagacaactcttattaacctcatgttacagctgaagagactgagggtcacagaggttacttaacttatccaagacattatgaagcttacccaagatccacagctagtaaatgtgaaagcccatgctcttttactagattatatggcctctcttgtagggtttagggaaatatgttcatttttaaataawtaataatgtgccttaattagtaataattttaaaaaggaacatatttctccagctagcaagcaggggaaatagtagtcagacttcactatatctggctccagatctttccagacactcttttgaaaattgaaattgtttaattaatatttgtgtggctatattttatttgagggtaaatgctgacaactaatccttaaggctgcacatgaagcgaaggtctacctaaaagggggttcgatgagcacctctgggttaaggatatctcaggaggatattaattaatcctgccattccagtgatgagtggagcaagacttttgcatttgtttaaaattgtgttgtgtttgcaaagagctttataggtcatggatccctaatgatttccagacagaattcttttctgtttcaccaagaataatgtgaagctttctaccacaggcaatgccaactgctgactaccacagaaatacttcaagagaagtgatatatcagtggcttcaaagtattctaggatccatttctgatggaagcatgtcactgtataccttggaactaaaacagaatagcattttcaaagttaaaaatgagagaagtccaaacatttgatatctaatggataaagaaaatcagagagtaaaacattttctcagtcattgattctggaaggatatagcaccatacacagtcactggatacatttcctttacctatcccaaattatagctccacatgaactattgacaagactataaatttctgtactacattacatgaatgagagattaatttatgtgaatttattccttgttggcaaatggaatgacacagtttgaagtcctttccgagctataaggaattagattgccctttttataaaggattctatattatgacatgttttttccagattcttgacaaaaagcaatttaatatcaaattctgacaaatgagaactgaaacatcaatggttcttaagcattaatattatwggatttctcttgctagatatgtcatctccttcatcttttttattgtaagacaggtattattgaatagttaccttatctactaatcaggagtacgactcataaatgtataagacattatatacgagaaaataaaacttataagaaagagaccccaccatcaaaggagtataaacttcttgggaagacaggacaaacacatagaaattaacaattaattttaaaatgatattacttcctaaaagccataccctgtacaagctgcacatgctataggagtaaacatacctgttagtgtaccacaatctttatcacagagaatggatgatgcagcagaaatgtccaaaaaatttatcagtaataaagcatggaaaatgccacattcctcataagtatctcattcaaatatggacaactcaggaagcatagtattttttaataattgtaaatgaaggccaggcatggtggctcacgcctgtagtcccagcactttgggagaccaaggtgagcagatcacttggggtcaggagtttgagaccaacctggccaacatgtgaaaccccacctctacccaaaaatacaaaaactagctgggcacggtggcctgtaatcccagctactcgggaggcagaggcaggaaaatcgcttgagccctggtggcggaggctgcagtgagccgagactgcaccactgcactccagcctgggtgacagtgtgagtctctaataataataatataattgtagaygaagtgttatttcattgaggctggagattgtgaaaaagatcctgattcatttagataggatcaatgactgtgctacaacagttgcttaaattaagaaagtctgaaaactatgtgtgttgatagtaattttcccagcttttcattctaccaatgtcctagagttttgtttgcctttattctggttttgtagagttttgtttgcttttgttctggttttgtttgtttgtttttcccgtaatgaaagttttctccttcttcttttatagctttaggaagggtagcttcataggaagtaaaaacagccatgctacttacacagaaactcatttgataaagaaaatattagctaaaagtgaaataagttaatgagttttttaaaaaaagaatgagatagtctaatgaagattatttgcagttgcctaaaaaaaagatttgctgacaatgttatttaggatgaatagatggaagaagctggccctgccagccaaactaaaagccaaacacaatgccaggcaatattattgcttcagtactgcttactgctaggacgcctagtaagatataggctgtgaccctatttcgcacctagaaagacttaactaagacattttctagctacagcatattcagtgaagaatacaatctcttctacaaataaataagagtccagtaagaaatgaagtgggacagagtaattctatataagaataaacactgttaaggcaagagtgtatttagaaggtgagcttcctacatttatagttaaaaacccaaatgaattttctattctgagccccctctgatgcacatcagaaaaatggcaccatgaaaccactgcttgaccgaaactgtacaagtcctataatacatgaaatgtagccactaattaattttgaattatttttatgagatttcttcaagaccataagatagggataatatcccatattactgagcttcacagcatctactgtatatttgccttaaatagtattttgatacagtgagtccttgaatggaaattgtctactcaaccaaggctgataaccaactgatagactaattgtaataaattataatttgaaaagaaggcattttcctagactagacaaaaatttgccatcaaatgtgtatattggtatgtctccttccaagttgtagaatttttaatatgtgtgtgtgtgttttttgtttttttactgttcttttagtttttttgttttgttttatttctttttgttgagtagttttgtctcataggtggctatttctgagtgaagtcactggggcagttggttgaaggaaaagtgcatatgtacttgtatatattataatctacatataacttctatgtatacatatgtatgtattatttatatataatttggtgtgagtatgttgtgcacttaagaaatgcataaatctctctggcttggctgatagttacctaatgagaaataatactccaagtcatgaaaatatgttgaaaaaaaaagaggataggaaattgcttagcctgatctaggggtataattacgagtagcttgagggagaaattgaaagacaaaaactagcttgtaatcccagcactttgggaggctgaggtgggaggattgyttgagctcgagttcaagaccagcctgggcaacgtggtgaaaccctgtctctacaaaaacaacacaaaaaattaggcaggtgtggtggcatgggcctgtagtgtccrtagtcccagctacttgggaggctgaagtgggaggatcccttgagccagggaggcagaagttgcagtgagccgagatcaagccactgcactccagcctgggtgacagagccagaaccagtccacaaacaaacaaacaaaaaaacaacgaaaaactcttgacagtaactacctctactatattgtgaattcctcctaaatagatagcaaaaatccgcattactcttaaagcatactgatggaaacatttaatgctataatgtagtgaatagttctttagtagggagaagatggattgggtgacacatgaggttgactacatttgtatctccatttttttctatctgtccctcactgagcagagaaaacgcagcatggtctcaagaaagaacatcatggtgccaaaagaagtttccactcagcctttacagtctgcattcattcttttatttagtaaaaatgtaagaggtttttgttttgctttcatactttttgttccaaatatggggccagggaccatttactctttgttcttggtagttgaaaagtgtagcatatgataaaccctttcattgaataggcattcatgatcatggatgtgaaaatgcattagaagaatttatgagacatgtggggacataggctgcatctgagactaaaatcctcatcacaggcttttatggcattctactatgatgactcgtttagggtggtgtgggggaaggacacctttctgttctttcattaaatgatagaccaagtggagttggttgtaaataattcagaaggttctgaaccagaatttgtcttttaaatcaagtgattctagaggctgttcttgctttattctaattaatgaaaacaatcagtgctatagattttataatgctctttgaaaatacatagcaactctcaaaacaggatgcatttaatgacccaaaactgtagtcgtacacttttttcctaaaacttaattgtccatactttcatataataatttctaagacaaaggtatgcttatacatttatattttaaacagacttccaaattgacaaatttttatggtataaaaaatgcataatctgctcttagargactataaccccataaagttacttcattttgaaaggatacgtttctcctattcgttttgtaagtttcaaagatcatgtgattatgtgtgggagaagggagaaaaaagattgcaaaacaaaccccttattgtagtttcttagaaacagcattgatatcaacatttgggcatttgtgagcaagctggaaagtatgaacaatgagaaaaaggcacatttaagggagtaaatagtttgttttcaagccttcagtgtattatcttcaaaatgcgtcaagttttagactatgagaacgtccttcagagtttgctttggactacaactgcaaatgcattgattatagttaaatgtgactttagttcagcacttgaaatagctaacattcacattagaaaaaaattatgaaatgactagttgaattgaagaaattggggaattttcctcccggtatgcttaatgaggtgtataccctttgcatgcattgtaaatattagtgcatgtgtattatcatagaagtatataaatatggcttgaataccatttcttgattttaattagatcacattgccttttgaatatccttatttaaacaggtaatatgaatttaacaggaacttgttgtacactctgttttatttttatagtatgcaaataagaaacaaatgccaacacattcattatgctgtttaacgtctataccagaaaggttccaatcactttgaaaaaggtcctttcactacttctactctmaatcactttgtcatgcttctgagaagaaacattttgaactgaaatttgtaatgaagattaaaccctatgatgttttaaaaatgtgggaaacatttttggttgatccctaagcatcaactgcatattaaggcaaaggaatgatttatgagtattcaatgataaatgaatattttattattttagtatcattaatcattatcctaagtagtgagacatgttagaggttgtttttacttttttttttctattgttgtttactggggtgctcattgytagcaggattgacagctcaaaatggaggtggaagctcgtgaattcaaacgtggaaataccttcttgtacagaaagatcttatagagatgagggaaattgtagtgaggatggaatatgataaagtgggaggaaggagagcagaaaaaaagtgaagttgacttgatttgtgcaggaatagtacacaggatcattagcttattcattcactatttacactgagcttcattattgtgccagctcagagatgggcattgaagatgcagtactgaaggagatgatctcacggggaaaaagaggatgagtattattgaagtgcataggagacagataagtgcaatgaaaatctttatgtctcatgtagagcctggattggaaaagaatcatccagctgcgtgatcagaatgcatgccctttagaccattcaggtaaagaacatgattcctagttttgaccccaccgtccattctttcctcacccaacattgtagccattcccagctcactattctatctttgacgtagtatstgtttgcaatagtggccctctatgggtccttcaratcagagaggcacacatgtctggggctcacagttctaggaactttttctgtgtaagtaggacaaaaatttttaatatcaattctgctcaagcaatgtaaactaggaaacataatttrctaaaaagtgatgttacatattggtgaattttctagcattttggttaaatctaaaaataattttaaaatatttataaaatataaatctatctataaactttggttctatagctctacttcttttttaaactgcattaattcacaaatataatatgctcacaatgtgacactacagaaagatcaaaggagcatataaagatgatgctttttaccctttccgatggcatattttttaaagtcttatctccggatgtttaaaaccaaagtattctgctatttcaaaatgtcattgtttgcactctagctaaattgtagaaaaaaggcaaatctgaatatgacattattctttcagttatcaaaataatcgttgaatttattgaaaactatttaatgtcaaatatacaatataattctaagaacagtcctatgaaataagtatggcaaccaaattattttcattttatatatcgggtagctgatgcaaaaagactttcaaatgatatgttagtgtctaattattcattccacaagtatttacagggcatctactctatgtcagcagtattctgtatccaaaacaaagattctcactttattggagcttacatttcagctgcagagagaaagacaataaatatattaaataagaaaatgatataatagaaagttctatggaaaataaaatagagctgggaggaggtcgtttgtagtttttttttttcttcttcttcttctttctttttcttttttgagacagattgttgctctaccacccaggctggagtgcagtggagccatctcagctcactgcaaccttcacctccccggttcaagcaattcttcygccttagctgggattacaggtgagcaccaccatacccagctaatttttgtatttttagtagagatagggtttcaccattttggccaggctggtctcaaactcctgacttcaggtgatccgcttgcctcagcaaaaaggtgtgagccattgtgcctggccctgtagttttaaagagtgccactgagacagtgacatttgagcagaggcttaaagaagatgtggaagaacaccatgtgtatgtctggggaagaatatataaggttgagcaggcagccaaggtagagtctctcaagtgggagggtatgcaacatgtttcacagtgaatgaatctaagctttcacttagaatttctgtgaggtaataggatagacatagttggaaaagagtaagttgtgtgtttttacaagtccttgactttttaaagcattgcatttaacaagcattaattgcatctcaatgattctttcatttgttcttgattcaacaaatattatctcagttcctactatgtatcaggtaccttgataaaaaggaccagcaaattaccacccacagggacatgatgagatagaagacatagcccatgttctctaggagcttaccatacattgcctaagacacagtaccactcttgtacccaccaggattatctaattgaacatgcattaaactttcaatcatagttaatgagagcaaagagctacgtctcataaaataattataataatattatttacataaaatcatatttggggaatttaaaatctttacggaaaatgtttaataatctttacaaaacccatgtgcttatatgtattgtattagtcagcgttctctagaggacagaactaataggatagatgtatatctgatgtaaatatgaaggggaatttataaaggattattgactcacatgatcataaggtgaagtcccatgataggccgtctgcaagctgagaagcaagggaaccagtccaagtcccaaaacctcaaaagtagggaagctgacagtgcagccttcagtctgtggatgaaggcccaagagcccctgacaaatgaatagtgtaagtccaagagtccaaaagctgaagaatttggagtctgatgttggagggcaggaagtgtccagcatgagactgaaggccggaagactcagcaagtctgctctttccaccttcttctgcctgctttattctagtcatgctggaagctgatcagatggtgcctacccagattgagggtggctctgcctctaccagtccactgaatcaaatgttaatctcctttggcaacatcctcacagacacaattaggaacaatacgttgcaatccaatccagttgacactcaattttaactatcacaagtccaccccttgtcaacatgaacccatacacatctcctgaaatcatacataatctccaaataaagacaataataaggtcataattacasagctattctttgcacaaccagaagtgcattaatccttaccctaattgctattacataaagttaacacttaaattcttatatgaagtcaataaatcttacatcacatgataaaggaaaaaaggaaataaaatgaagatattttcctagtaaaagtgtatacatgcacaaacatgttcttaacaaaataagaaggaaatactcatgacaattacagtcctcatttctgtagctggtcacgtggtcgtagstggtattgatgactgccttcttctrctacccattctttattccctttgccttcagcaagcacctcagcaggtcatggttttttgcctggttgagtgacccaaatcttcattcctaaagagtctgggccatttatagtccagcctggattgggttgttgtagtttcccattgacgttaatcatagggcatggtaayagtaagagatgccctaagggatctcctgtattccatgcataatcttccttatctccgttgtggagtagtagactgatttcatcttgataggctgggtcaatcaccccagccaacactataactcctttcttagactgttgactgagaggtagcccaaaatggccaggtggcaatcttaacttgcagtttaatggaatcgttgttgtgtctcctggttgcagcattatttcctctggaagtaaggcctctagaccagctgaacataatgttgtgggaacaggaaggaaaacttttgctagtgggtcactaagggtgatggtgagtggtgtcacttctacttacaccccttgattcctggacccatgtatcttgactatgggaggaagagtaccgtgtattggatgctgattcagagcatacacagccttctggagaactttgccccagccctgtaaagctttgtcacctagttggcattataattgtgacttcaaaaggccattccaccattctattaatccagctgcttcaggctgatgagtttctggccacagggacatgatgagctagaagacatagcccatgtcctctaggagtttgccatccgttgcctaagacacagtrccactaatgtacacgccaggattatctaattgaacatgcattaaacatgcaatcatagttaatgagagcaaagagctaaatctcataaaattattaaaataagtattgacatagaattttattttgggaatgtaaaatctttaaagaaaatgttttaataatctttacaacacccatgtgcttaaatgtatggttttggaaaatgtacccagactatttgatgttgtgcatcattccatgtaattattttaagagttttcattattttattattaacctcttttttattcctatgttacattttaatactacattaattattaacctttttaatttagaaaggtagtttatkaaatgaatatttgttaaagcctctgaaaggaagtttataattggaatataaatgcataataacacattttaaatcaagctctttatgtgccattgaaaagctctattcctaaatgaaccataaccttgcaggtactatatcatgaccttttaaataaaagcaaagaaaatatcatgcacagattttatgtggaaaacacacctttttgtttgtgtatagtgcattcaaatcttatgactttagttgacttactacagcctcaatgagagctcaaaagtgatagaacaactcaaatggatattgtagattaatatcaataccagacatgctatgaaaacagtgaatgacttataggcataaaaatatatgatagcttgtttccggttacacatgtaaggtacttggaagttgccactccatcttaacaagtaaaacgctaaagagctaatttacaccccaccaacagtgtaaaagcgttcctattgagaactcatggacacagggaggggaacatcacacactggggcctgtcggggggtggggggctaggggagggatagcattaggagaaatacctaatgtagatgaaggattgatgggtgcagtaaaccaccatggcatgtgtatacctatgtaacaaacctgcacattctgcacatataccccagaacttaaagtataataaaaataaataaataaataaataaaaattcctgatgtctgaagaaaaagaatattttaaaataggttttattctataataaaataaataagatatacttaaaaataaaaaataaattaataatttaaaaaaaaaaaaagctaaagagactaaaaaccaacagctcttcttagattgtaagagatgggaggacttagggcaaaactgctacgccaaggttagagagatagacaggcaaatatagggaactatggcttactgaagcagagactcactagcggaaaccacatcaggatccaggaccagcgtaggaaaacctgaactataattgatgaatttctggaggatcagtgcagacaagtctgagagttaaaaactccaggagggcccaggcataggggacaccaaggatattgtgagatttatctagagaagcttgacaaacttctcaaagtgagtattagagaaaattcccccgctgcttctggcagggggaagagaagaagaaccatttcawaatatggcagagcattctgtttttcttaacaagacctaaagagcargaatagactggagttaaatatttgaagtattaagagggccaggcacagtggctcacgcctgtaatcccaaagctttgggaggccaagatgggtggatcacttgaggtcaagagtttaagagaccagcctggccaaatggtgaaaccctgtctctactaaaaatacaaaaattagctgggcatggtggtgcatgcctgtaatcccagctacttgggaggctgaggcaggagaattgtttgaacctgggaggcagaggttgccatgagccaagatcacagaactgcactccagcctaggtaacagagtgagactctgtctcaaaaaaacaaacaaaagaataaataaataaataaataaagtattcagagaaaaaaactcaccaatgtagaattatatactctgcaaaattattcttcaaaagtgaaggagaaataaacactttctcagacaaacaaacattgaaagaatgtattcagaataaacctccttgcaagaaatgttaatggaagtttttcaagagaaggaaaactatataggccagaaacttggacctacataaagaaaggaagaacatcaaagaaggaataatttaaggtaaaataaaaatgtttatttttcttactcctaattgatctaataacaatttgttcaaaataatcatagtaacaatatatttgattgtgtatacttacgtataatatatgtgcttatgtatacctatatataagtccaatgaatgacagcagtgacacaatggacaggagggaggatatgatttttttattataagatgctcatatcatctgtgaagtggtacggggttatctgatggacttggattagctatagatgtatattgtaaactctagggcaaccactacaaaaagtaaaaaaaaaaaaaaagtacaagtgatatgctaaaaagaagtagaaaaaaattgaatcacataaaataatgaaatacaaccacaaaagacggaaacagtatagaagacaaaataggaacagagaaaaaaatagaaaacattaatcaatatagtagatattaatccaggtatatcaatacttattttgaatatcaatgatctaaatacgccaattaaaagacaaagattgtttaagtggatttaaaaacccacctatgtattgcgtataagaaagtcactttcaatacaaaaacacatagattataagtaaatggatgaagaaaatgtatcatgctaacactaatctaaagatagcaggagtagccatattaatttcaggcaaagcagacttcaaagcaaggaaagttatcagggacaaaagaagggtattacataatgataaaatgatcaattatccaggaagacataagaatctttaacgtgtatccatctaataacagagcatcaaactatgccaaggaaaaaccaatagaacagcaaagacaagtagtgcatctattagcatagttggagactacaacacttctctgtcagaaatggacagatccagcaggtagaaaatcagtaagcacatagttaaactcaacaacactattagtcaactggatataatttgacatctatagacaacaacattcaataacagaatacacatttttctcaagtttacatggagcattcaccaagatagaccacattctggaccataaaacataccttaaattttaaaaggacagaaatcataaagtctctgatctgagaacacaatggaattaaattagacaccgctaacaaaatatatctggaaaatcccaaaatatacagagattaaacaacacacctctaaataacacatgggccaaaaacgaaatgtcaaaaagcattaaaaatattttgaactaaatgaaaattaaaagaaaacttatcaaaatttgtgaggtgctacaaaagtagtacttaaagggcaatttatatcattgagtgcatatattaaaaaagaagaaagatttaaaattaatgacctaagtttctaccttaggaaacagaaaatgaaaagcaaatttagtctaaaataagcagaacaaaatgaataataagaattagcaaaaatcaatgaaataaaaaaaatcaatatagaaaatcaacaaaatctgattatttgaaaaaagtcaacaaaattgataagcctctagccaggctaatgaataaaaagagaggacataagttaataatatcagaaatgaaagggtggacatcactacgggtcccagggacactaaaaggaaaataaagagtgctatgaacaactccatgcccacagatttgatgacctggattaaatgaaccaattccttgaaactgccaaaactcacacaggaaaaatagacaatcttaatcagcttatatctattaaagaaatcaaatcaataattaacaaccttccaaaacaaagcaaaagacccagatgggttcactatttaattctactgagcatttaagaaaaattcctaccaattctctcaatatctttcaggaacagagggaataccgatagtctcaaacttagaatttttcaacttcaagatgatgcaaaagcaacatacattcactacactcctcgacttacaatgggatatgtctagataactccactcattgtaagttgaaaatctcagaagttgaagcacacacttttgacttaacaatattttcagtttattacagccttatcaggacttaaccccatcgtaagtcaaggagcctctgtactttttaactgattatatgaggccctaatacctaataattgcactgacagcaaaccagacaaagacatgctagaaactatagaccagtatctcttaagatgcaaaaatgctcaacaaaatattagcaaattcaacgcaacaatgtataaaaagaattatacaccacagtgaagtgggatttatctcagacattcaaggctggttcaacattcaaaaaatcaggtaatgtaattcatcacatcaacagactaaaaaagaaaaatcacatgattttatcaacagatgcagataaagcatttgacaaaattcaacacccattcatgatcaaatctctcagtaaactaacaatacagagaaacttcctgagtttgataaagaatatctataaaataccttcagctaatatcacatttaatggtgagaaattagaagttttcacactaagatcaagaacaaggcaaggatttcccctttcaccatttcttttcataattatactggaacttctagctaataagacaaaataaaggtgggaacagggtatacaagttatcaaggaaaaactaaactgtttttgcagatgacattattgtgtacatagaaaatcagaaagaattgaccaaaaaatatcctgtaactaacaagtgattatagcaatgtggcaagattaaaggttaatatacaaaagtcatttgatttcttctgtaccaacaatgaaaaagtagaagttaaaagaaacataatattatttacattagaatcaaaacaaatgaaatacttaggtgtaagtctatcaaaatatgacaagatctgtgtgaggagagctacaaaactctgatggacaaaatcaaacaagaactaaataaatggagagatattccatgttcatgtataggaagacagtactgtcaagatgtgagttcttcccagcttgatctatagatgcaatgtaatcacagtagaaatccccgcaagttgtgttgtgggcattaacaaactgattctaaagtttaaaggcatgctagaagacccagaatagctaacacaatattgaaggagaagaacaaagttagaggactgacactacctaacctcaagacttactataaagctacagtaatctgacagtgtaatattggttaaagaatagacaaatagatcaattgaacaaaaaagacatcccagaaatagacccacataattaaatcaactgatttttgacaaagcagtaagacacttcagtggagaatacatagtaatttaccaaatggtgctggaacaactgcatgttcacatgcaacaaaaaattaatctagacacacccttcaccaaaattaactctaaatggatcatacatctaaatgtaaagcacaaaaatatraaattcctacaagataacacagaagaaaacctagatgatcttgaatatgttgatgacacatgtgtttttaaatacaactccaaaggcaatattcatgaaagaaattattgataygctgggtttcattaaaataaaaaactctggctgggcgcagtggctcacacctgtaatcccagcaatttgggaggccaaggcagatagatcacctgaggtcaggagtttgaaaccagcctggccaacatggcaaaaccccatctctactaaaaatacaaaaattagctggacatgatggtagcctcctggaatcccagctactcaggaggctgagacaggagaatcgcttgaatctgggaggcggaggttgcagtgagcagagattgtgccactgcactccatcctgggagacagagcaagactccgtctcaaacaaacaaacaaacaaaaaaaaacttccgctcagtgaaagataatgtcaagagaatgagaagacaagccaccgactgggagaaaatatttgtaaaagatgcatttgagaaagtacggttatccaaaatacacaaagaacacttaaaactcaacaataagaaaacaacgaaccagattttaaaaaatgagctaaagactttaacggacacctcatcaaagaagataaacagatagcagataagcatatgaaaaggtactctacatcatgtcaggagggaaatgcaaattaaaacaacaatgaggtaccactacacatctattagaatagccaaaattcataacactgacaacaccaaattctgatgaggatctggagcaaaggagctctcattcgttgctggtgggaatgcaaaatgatttgatcacgttagaagacagcatgtgatctcaacaaaattgatagagcrctagcaagactaataaagaagaaaagagagaagaatcaaatagacacaatacaaaatgataaaggggtatcaccacccatcccacagaaatacaaactaccatcagagaatactataaacacctctacacaaataaactagaaaatctagaagaaatggataaattcctcatcacatacaccctcccaagactaaaccaggaagaagttgaatctctgaatagaccattaacaggctctgaaattgaggcaataattaatagcttaccaaccaaaaaaagtccaggaccagacggattcgcagctgaattctaccagaggtgcaagaaggagctggtactattccttctgaaactattccaatcaacagaaaaaaagggaatcctccctaactcatttaatgaggccagcatcatcctgataccaaagtctggcagagacacaacagaaaaagataattttagaccaatatccgtgatgaacatygatgcaaaaatcctcaataaaatactggcaaactgaatccagcaacacatcaaaaagcttatccaccatgatcaagtgagcttcatccctgggatgcaaggctggttcaacatacgcaaatgaataaacgtaatccagcatataaacagaaccaatgacaaaaaccacatgattatctcaatagatgcagaaaaggcctttgacaaaattcaacagcccttcatgctaaaaactctcaataaattaggtattgatgggatatatctcaaaataataagagctacttatgaaaaacccacagccaatatcatactgaatgggcaaaaactggaagcattccctttgaaaactggcacaagacagggatgccctctctcaccactcctattcaacatagtgctggaagttctggccagggcaattaggcaggagaaggaaataaagggtattcaattaggaaaagagtaagtcaaattgtccttgtttgcagatgacatgatcgtgtatctagaaaatgccatcatctcagcccaaaatctccttaagctgataagcaacttcaacaaagtctcaggatacaaaatcaatgtacaaaaatcacaagcattcttaaacaccaataacagacaaacagagagccaaatcatgagtgaactcccattcacaattgcttcaaagagaataaaatacctaggaatccaacttacaagggatgtgaaggacctcttcaaggagaactacaaaccactgctcaacataataaaagaggatacaaacaaatggaagaacattccatgctcatggacaggaagaataaatatcgtgaaaatggccatactgcccaaggtaatttatagattcaatgccatccccatcaagctaccaatgactttcttcacagaattggaaaaaaactactttaaagttcatatggaaccaaaaaagagcccacattgccaagtcaatcctaagccaaaagaacgaagctggaggcatcatgctacctgacttcaaactatactactaggctacagtaaccaaaacaacatggtactggtaccacaaaagagatatagaccaatggaacagaacagagccctcagaaataatgccacacatctacaactatctgatctttgacaaacctgacaaaaacaagcaatggggaaaggattccctatttaatacatggtgctgggaaaactggctagccatatgtagaaagctgaaactggaccccttccttacaccttatacaaaaattaattcaagaccgattaaagacttacatgttagacytaaaaccataaaaaccctagacaaaaacctaggcaataccattcaggacataggcatggacaaggacttcatgtctaaaacaccaaaagcaatggcaacaaaagacaaaattgacaaatgggatctaattwaactaaagagcttctgcacagcaaaagaaactaccatcagagtgaacaggcaacctacagaatgggagaaaagttttgcaatctactcatctgacaaagggctaatatccagaatctacaaagaactcaaacaaattcacaagaaaaatacaaacaaccccatcaaaaagagggcacagcaaatgaatagacacttctcaaaagaagacatttatgcagccatcagacaaatgaaaaaatgctcatcatcactggccatcagagaaatgcaaatcaaaaccacaatgagataccatctcacaccagttagaatggccatcattaaaaagtcaggaaacaacaggtgctggagaggatgtggagaaacaggaacactattacactgttggtgggactgtaaactagttcaaccattgtgaagtcagtgtggtgattcctcagggatctagaactagaaataccatttgacctagtgatcccattactgagtatatacccaaaggactataaatcatgctgctataaagacacatgcacacatatgtttaatgtggcactattcacaatagcaaagacttggaaccaacccaaatgtccaacaatgatagactggattaagaaaatatggaacatatacaccatgcaatactatgcagccataaaaaataatgagttcatgtcatttttagggacatggatgaagctggaaaccatcattctcagcacactatcgcaaggacagaaaaccaaacaccgcatgttctcactcataggtgggaattgaacaatgagaacacttggacacagggtgtggaacatcacacaccggggcctgttgtggggttgggggagtggggaggaatagcattaggagatatacctaatgtaaatgatgatttaatgggtgcaacacaccaacatggacacatgtatacatatgtaacaaacctgcacattgtgcacatgtatcctaaaacttaaagtataatttaaaaaaaaaaagacagcatgtggcagtttcttgtaaaactacaaatactcttaccataggatccaacaactctactccttggtattaacccaaaggagttgaaaacttatatttccacaaaaacctgcacatggatgtttacagcagctttattcataattgcccaaactgggaagtaaccaaaatatccttcagtaggtgaattataaactttggtacatacagacagtgrtatattatttagtgctaaaatggtataaatatcaagccatgaaaacatggaggaagcttgaatgcatgttactaactgaaagaagccataatgaaaaagctatatactgtgtgattccaattatakgacattctggaaaagacaaaactatggtgacagtaaagaaatcagtgataggcaggagggttgggtggggtgaggaagaatgaataggtggagcacagaaaatttttaggaaagtgaaaatactctgtatgatactaaaacaatggatacgtgtcattatacattgtccaaacccatagaatgtgtaacagcaagagtgaactctgatgtaaactgtggatttgtatgatgatgctgtgtcaatataggttcatatacatataagacatacyatatatatatctgtcatacatatgtgacagctgctactactactacatgactacataactactacagtctacacagtagtagtcatgaycttttatacatgcgtatatattagtcatggtagtttcctgcatgcacttttgcttgtagcaagtattacaatcttcatagggatgaaacggaaggtttaaaaaatttattaataataagccatctttctttccaccaacatttactaaattacattaggtgctaggcaatcctgcaccaaatgataagaaactaaaggtggataataattagcatgttctcacattgagtgaggtaagagaagtgggacaagagaagagaagtatataaataaacatctatctgacacagtccaacaggaactgagtagtggttggtgtagcacacttgaatattaagagaaagcagtgattctgtctctgagatcattgaggatgatacagttgaggttagctctgagttagaccttgagaagtaggtaggagctgtacagtcagacgtctaggatggcactacaagaaggaccaatatgaggaaaagaatggacatctaaaagtacatgtggcatgcggtaggcagtatatataagaggttcagtttgatatgtcaagataaggrgcagcaaggtgatttggagccagattataaagggccaatactaccctatcatcagcccttaacatgcagtaatggtcaggaagctgtgaatcatcccattggttcctgctcactcattctttcctctaattttattatttcttaggcagttccatctgctggtctagcttagatggtatgcagagctgtagtgaaataactcactggcgaagatcatataaataaggttagcctctgagaatgaatataataaaaaactgacacacattgaataaaattaaccatctataaaagtaaaccaacacattttctataaaggttgtataaggagcacaaaaaaatcattcaaagtataaatattatagtcaaacagatcaagctttgtatctactcttattagccatgcaactgtgagtagttatttaacttcttgaagttttttttttcctgtctgtaaagtggggctaataacttctatgctatgatgttcwaaggattagagataagtcatgtgaaattctaaacatagtactcagcatatgcaagtacacagcatgtaatagttcttattgtggwacttagtaaaagtggcatcagttagcttttcctatataacaaaatacctcaaatttgggattgaaacaattattaatttagttcttgattcaggatgttagcaatttgcttaactgggctatgctgcatggttcttctggcctcacttggtcttatkccatctgtggtcaagttccaggtgggctagggactggctaatctaggtcagcctcagctggatggcttgtctgtgtgtcatgtggtctgtcatccttcaggaacctatgctggcttgtcgtcttggtaggatttcaagagagtaagcagaaaagcaccaggccccttcaagccttggtttaactctggtacatcatcacctctaccatgttctactgattaaaacaagtcacaaaatcagcgcacacccaaaggttgggtagataaatgcccccacttgatgggagtccttccgaagtggcatggaaaccaggagggaacaattttttcaaacaatctaccacgagagggttgaagacataaaatcaactagaatctctaatgtaaattgaaaggataggaaatcaatatggtatagtcttgatgtagtagagaggaacttggaatcaaaagacctgagcttaatccctgcctttgctattgattaacttgaccctggtaaagtaatttaaattatccatgcctcattattatcagtataagattctccaaattcaagattgttgtgggggataaatgagataatgtatgtgaaaatctgtactaaactgtaaatacagaaacaaatataatgaaaaattatttttgatataaaatgtactttataaattataaaaggatctagaaccccttacctttaccatctatgtgtccttattctgtctctagaatgtagaaaggcacaatatatattaaaatatataatttaaaaatatataaaatatataaacaaatacatgtcatagcagaaaaatgcaaaggatactgaggaatctcagaagaggggtgccaaaggaagtcagaggagcaatagggcacaggagaggcatcccagaaggcaatgtctacatgagaagcacgaatttactagagaaaatgatcgaaaattcaaatccaaatgcttagctgattagaaaccattgttttgtcccttacctgcataaaccagattcctacttagatatcttgcttcattttttatgaaacgtaaccatttgtttcaaagtcagccaaattgaactacctgagatttcttaaacacagcatattccttaaatacaccatcctttgcttttgatcttgctgctcactctacctggagtactctacctccttggattttkaaatcaatttccaatacagacatacctcattttattgcaatattgctttttttacaaattgaaggtttgtggcaatcctgcttctaacaagtctattggtgccacttttcaaacagcatacactcacttcatgtttctgtgttcatattttggtaattcttgcaatatttcaaacttcttcattattgctacacctgttatggtgatctgtgattagtgatctttgatattattgttaagtgctttcaggtgccacgaacacccgttgaatatggaaaacttaattgataaatactgtgtgtgttctgactgctacactcatgggcaaatccctcattccgtcagtctcttcaggcctccctgttccctgagatgcgacaatattgaaattaggctatttaaagtacttcatgactaaaacacgaaaagcaatggcaacaaaaaccaaaattgacaaacgggatctaattaaactaaagagcttctgcacagcaaaagaaactaccrtcagagtgaacaggcaacctacagaatgggagaaaatttttacaatctrctcatctgacaaagggctaatatccagaatctacaaagaacttaaacaaatttacaagaaaaaatcaaacaaccccatcaaaaagtgggtgaaggatatgaacagacacttctcaaaagaagacatttatgcagccaaaagacacatgaaaagatgctcatcgtcaccagccatcagagaaatgcaaatcaaaaccacaatgagataccatctcacaccagttagaatggccatcattaaaaagtcaggaaacaacaggtgctggagaggatatggagaaataggaacacttttacactgttggtgggactgtaaactaattcaaccattgtggaagacagtgtggcagttcctcaaggatctagaactagaaataccatttgacccagtgatccmattactgagtatatacccaaaggattataartcatgctgctataaagacacatacacacatatgtttattgtggcactattcacaatagcagacttggaaccaacccaaatgtccatcaatgatagactggattaagaaaatgtggaacatatacaccatggaatactatgcagccataaaaaaggatgagtccatgtcctttgtagggacatggatgaagctggaaaccatcattctgagcaaactatcccaaggacagaaaaccaaacaccgcatrttctcactcataggtgggaactgaacaatgagaacacttggacacaaggtagggaacatcacacaccggggcctgttgtggggtggggggagtggggagggatagcattaggagatatacctaatgtaaatgacgagttaatgggtgcagcacaccaacatggcacatgtatacatatgtaacaaacctgaacgttgtgaacatgtaccctagaacttaaagtataataatttaaaaaaaaaagaaaataggctatttaacaactcaacaatggcctctaagtgttcaagtgaaaggaagagttgcatgtctctcactttaatccaaagctagaaatgattaagattagtgagaaagacatgttgaaagctgagatagggcaaaaactagacctcttgttccaaatagttagctaaagtgtgaatgcaaaggaagagtttttgaaggaaattagaaatgttactccagtgaacacacaaatgataagaaagaaaacagccttattgctggtatggagaacattttagtggtctggataacattttagtggtctggatagaatatcaaaccattctagatgcccttaagaacatttgtgaatcatgagaggaagtcagatgtctgcattaacaggagtttggaagaaattgattgcaagccttgtgagggattcaagacttcagtggaggaagtcactacagattagagaaatagcaagagaacaataatgagaagtggagcctaaggatgtgactgaattcctgcaatctcatgataaaacttgaagagatgaggagttacttcttatgaatgagcaaagaaagtggttgcttgagatgaaatctactcctggtgaagatgctgtgaacgttgttgaaataaaaacaaaagatttagaatattccataaacctatttgataaagcagtaactgagttttagagatttaagaggattgaaagaagttctactgtggataaaatgctatgaaacagcatcacatgctacagagaaatctcttgtgaaaggaggagtcaatcaatctagcaaactttattgtcttattttaagaaattgctacagcacccaggaattcgatgccacggtaagctataatcccaccactgccctccagcrtaggtgacggagcaagaccctatctagaaaaaaaaaagaaggaaaaaaaagagtgagaaagaaaatgctacagctttcagtaataaccagcctgatcaatcagcagctatcaccatcaagacaagacattcctttagcaaaaagattatgattcaccaaaggctcagttgattgtagtgaaaacataacttttrtgcactgggaaaccaaaatatttgtgtgacttgctttattgtgatattagttttagtgctgtcatctggaatcaaacctgcaatatcttcgaggtatacctctaaatgtccatgggtgatttcataattggccaagtgttcctgttgtatggtgccttccctgattcacacagttacaaatgattaccctttcttttgctctcattttatcttagttagtattattttttttgtatcaattttcatgtttcctttattatgccatgtgctttgaccattccttatacatttagacaaaagaaacagacatatgatcaagagaattcagcatgcaaattacactcagaaagcaaagcaattcagtgtggtcaaagcaaaagttgcactatggtcttgtatagcctattattttatcctgaaattggatttgaagccaaagtgtgatatgaggaggtttgtctctttagaatactttggcagatagtattggctgaaatcagatatggggcaactaataaggaatcttctgcagtaatccagggaagaaatggtgaggatcttaatgtagtcacaatgaggaacctggagatatttggaaaataaactagagcagtacttctcaaacttccctgtactttaggaccacctagagagacttgaaaaactctgatgcctgcacctcactccatacaaggtaacacagaatccttggaattattattattttttaactctctaggtaatttcaatgctcagccaagtacttggttaatcactggatgtgggcgacaaagataggtattcctagttttctgatctgggacaaaagagtgaaacaaaagcatatatagtgtggataaataagcaaatttagagtggagaaatttaagtttggttttggacaaatggaaattaagtgctaacgggtagtcgtatatgcaattcttgcacttaggaaaaagatgcagtttagaggtatacactttcgagattttctgcatgtattaatagatattatttacagtcattgcgaatatgatgtctagtgaatgcatgtgaaatgagactaaaagaggactgtgagtggactctgggagcatcaacatgtgagaaattgacagaggtagaaaaagaacaccaaaaaaaaaaaaaaaaagaggaaaagtaagtggtatctccaaagctcagttagaagaggggttcaagaaactggaggtggttagtagtcttaaatgctgaagagagtttagtacagatctgggctgaaaagtatataatatatttggtgaggtcactgttaaccttggggagatcagttcctaagcatattggggacagaaactaaataaaaatatattatggagtgatcaaaaggggaggaaaaagcaagttactgtagctcctagagtggtacagtggttgtttcctgttgtgttggaaaacatctctgattttttatagaaactcttgtatattgtttaaatgttacttttctatatttgaaatagttgtgtaaataagacatttgtcagccccaaaataaaccaaaaaatgatgaatttttaaataattttaaaagacaacttgtaagcatactagtctcatttatgaccattaagtaagcaatgaacaaataaaattagaaaagcttattatttcaccttaaatgtcttatagtcaatgtatatatttcaggaatattgcaccaatctcactttcactaaatttgaactaaggcataaaggacatctaaaatttgaatgttgtatggttaattaacatttaataaacttattttctttgtttaaatgtctttgaaaatcaaatgtctcatgctgtttttcctcatcaatgtaatcccagtagtcttaggaatgattttgttgaattgtttgacaaaacctaacttggctgcttgtaatttatagttgttcaccccygtcactttgcagtttttccctactaaaaaatttagattgtcttgaagctgaattgttgactggatttcctatgtagttcacagtatggttacagaataccaaaatagcattgtcaatgtgttttaaaaagcatagacctgaagtcaatgggaatttgacaagacagcctgcatgttattgtaagccattgcaagttttatgttgttcttcaccytaatttttaatgtgtaaactttaatgaaattcagtttttaaaagctacttaataaaataattttatttattccctaaggaaatggaattgtcaaaacaaaaaaagttgaccattaaatttgattcttttatttaaaatttcaaaggatgacaatggaagccatatagcactactttttttttttttgcyaaataagcatctgcacattgtttttcacctttgagataccttttagagagaaagaaatatgcaaaatttgattagtaaattatyatactttgcattttatatgcttcaaaatgttaatgtctcatagaaattagatgtttacaaaaagtgtatacattttcttaagttgtattaattagtcaaaatgaaagtcaaaactattaaatactccaatttaaaagtattttctacgaagcagaattcactaaaagaatggcttttcaggagcatatcraattttaatgacttaagcactaaaaagcatcttgataagatgggtctcaactctaagacaatctataaaacccaatttcatgttttcagtaatataaaggggactgtaatctgtgttccaactttgtaaatcaacttgtcctttgatttttacdaatcatatttttcataaatattatcaacactgattaaatatctgcctttttgacctcataatcataccatgttctagtaaatttgctttccctttcttttctttcttcgttttttttttttttcaaagacaaaatctcattctgtcgcccaggctgtagtgcagaggtacaatcatggctcactgaagcctcaaaactcctgggctcaagccattctcctgcctcagcctcctgagtagctgggattacaggcatatgagccaccatgcttggcccayttttagagactatttcacattttatctcttcctcatagtcacaaacccataactagttctctttactctcagtaagagaccttacaccctagttcataaagaaaatgtagacaccaagaagaatgattttactttttccacatcgaatttagaaacctaaatgcatccatacttatttgtttctctctctactcgtcttctatcctgttagatacaaacaatgcctctgcctctcttaaagcccactttctccacttgtactctcgattcatcatcccctcttcccttctcaagagcttctttctctttcccaaatcattttcactagtgtaaaaacatactcaaatatagtccattaagaaaacatcattagtcctcccgtgatcttgtacaggctgccttcatttgtcttttagctagcccaagaaaacctttagagagattcatgtattgcctctacttcttcmtattctattcactcaattcattctagcctgacttttgtcctgtcacttccctgaaacccctgttttaaaggttacgaatggtttttgtctcttcaaatccagtggacacgtttctactctttgacacagactttcagaagcattcatcacggttgattgttccttactttttggaacacttccttctcttggcacgacatcacactctcttgtgcccccaggtcagtcctagggcctttctttttctctatattattttcttccttttgtgaagtcatctagcctggtgacttcaaataccattttattttgaagtctctaaaacttgcacctttatccttgacctctttagtgaattctccactcatatatccagtggcacaattgatgtcttcactaatgctatgcttactagacatactaaatataaaatattaaaattggacctcttcaatactttcttcattaggctttattctatctcagtaaattgtctacattccacagttcagtagttcaagccaaatatctaggatcattcttaatttctacttttctctatgtctctctgaatctaagcattcaccaactagaacctcagaactatccacttctctgtatctccgtggatattatgaaagccacattatttcaacataatcagactccttgctttcacccttaacccacttatcctattccctatagtcacaagcatcttttgaaaatgtacatcagattattttatcaccctcctttaaacctttctgcggcctcccattacaccaacaataaaacccartctcccacagggttcagagctcccagagatctggctattgcctgcttctctcattttctttcatactattcctgtcctctcatgaatctacaaccacaaaagccttcttttttccccttgaacataccatgctcattcccacctcagtctttgcacctgcagttacttctacatacctggctgcttttactcacttccacattttatttaatgtgaggtgccatctcatctctcagttttcaactcagggagctttttactgaccatgtgtctgacatgcatttatgtattctggtgattctctgtcatgctctcctcctctattactaccttcctaaaaataatattataaataggtctaacaattggaactggaaatggtccaattaaagtatctttttttaactcattatgacattttcctccctaaaatgtaagcttcaggagggcagggactttttctgtcttgttcatcacttctgagttagaacagctgttggcatatagtggagctcaagaaatattggttagaagttgaatacacgaaaatgctaagtcaatgtctcaagctcctttttgtgtgccatttaattcctcttatattagatgctcaatttgcttattaatcaattaggtgacattgaatctcccaccagactgtgtaacataaactgtaggatgggggaagacaaagttcaaatactgtgtagcatctgggtttcactatctcttcattcaataatgttttaaaatatgagccataaaaattgagcactagaaatggcataaattaagtgaaatattgatatagaaaaatgttgcttttatttaaaaatatatttcattgggtatttatttctaataacattgcatgatgtttcacgatataaaatatccatcattctggttttttttcttaggaaaaaaaatctgttccctcctgcttgattaaaaacggagtacagcaaaatactgaagggcttcctaattatcaaataaatattaaattatgtccagtgtccttttactgttaatgtcttttagcctgactcttttaaaaattgctwtctcttttaataaaaagtaaawttattttttggtcatctttatttctcagaaatagaatgctaccacatattttcacaaaccatcctctggctttagataaggatatttagaatcctkagaccatttcacatttttaaaataaatataaagtcatttttcctgaaatttaattgatttaaaaaattgctttgaaaatttcttcaaaacatgacaactttagttttgcatgtagtaattgtcaagactgttaaatcatagaaacaagaatgtaaaaatagaatttccttaagccaaagtgtggtatttattagtttaaatatgcagatatgttagtgaggcacccrgccttaaaagtggctgcaaaggggatctctctccatcctgtgtgtttgtctactttctcctgtctctgttttattttttcccagtgtagtaagctttgggattggaaagtggttaaatgaggaatcagtgatcaacagcagctctgaataaacttcattccagtttagtgaccaaggagaaaaaaaaaaaaagttttaactttcccagttccactgagggattttgatagaagcagagtacctaattcctatgatyagtgcaggtggggatactttctcatctttctgggcaagaagatagagtctgctttcaatggatagggaaaggagaacagggtagtgcttggctgctcagagcatacaatggaaaccactgcttaccataatgtatctctcccatctgtggtcacccctccccagtcagaggctgccccaccagcattcagtggcatgattctcgcaatgtcctgaacaactctctgtatgatatttatttcccttcatcaagtccaattgtagtgcctcatgcttctcagcaacctacagggtgaacaattaaccaacctggcacagtcaatataaatttgaagcaaaaatagctctgttaaaattaaaattgccatgtaaaagagagaaacagtgttagtccctacttgagaggatatatcttatcctactgtcaaggctgctaaaccttgcttccctgctgtggatttctgtggtcaacccatctgcctggctagattcagcccacgagaaaggtttttcttgtcctctgtggaaccctgagaggggagctggagagggaggtgcacatgctgtgactgtgctgattgagcagccacttcatagttgcatgagaatgtgaattgggggattattttgttatgttaggaggtgggggttttgtggttgttgttgttattgttttattttgtttttttttttttaagaaaaaattttctaaaaatctatgcatattgcttatcagtttcgccacagggtaactagtatctaatagctaattttttyttcttcttcagtctgtatctctgtatccgtctctgcccttgaagttctagcaataagcctcagggctctgcccattccccagttgatttttcctttcaaataaggtccttaatctctctctctcttttttttttttttttttttttttttttttttttttttgcaaggaatgcctacaccaagaggtattaggtctagtcctggaagatctggtgccctctttgatagttctccctgatcttttttctaactggagaatagggcatagcatccctgagctcttagatcacttggaaagggcrgaaagcatctctaactgaagctgtgtaattacatggtgccccttttatacttgcaaatgaagcttggagtatgacttctcacttttttagcccctagggaaaaggccatggaacaagcattcttacatttttctccccaattctgaaaagctgtagtttcactagacgaaaaaaattgaatcctaaactcaatgaacaataatttggcatgcttaattttccttctctatccatcatctacttttactttcttctctttgttcctctctctaaggaatctattcaaaattgctgtttcttctggcttccatatttcggaacgttgttcaacctttttgtgactaatggtctgcgaatttctcagtggctttgattcagagtctcagatcttttgcttccttctttttaattgcttctctagttgactagtcctgtgtattttaatatctgattattttttcatcaccaagacagataccttcatcagccctaatcactcttcactcttactcatataatcgccagcagttttcaattgtttatttttcacttctctaacttatggtatccatttctacttaatcttcttaaaagggttagctgataatgcaaccccttgctcctaaacctctggtgacctcattcatttattctttcagtctttgatacgtgccaaataccatgctagttactgtagatagatgatgactaatgcagagcagctccagctttcatggtgtttatagtctatccagaaagaaaaagaaaaaaaaaactttaaagacatgcttctttccctggtttttagaactctctccaatatggtcacaactttctattctcctgatgaaaacgtttatctgacttttacagcatatctttttttttttttttctcaaagtaaataaaaaagctctatgtagtgagagcacagtggcttttagaggactcttaccactagactctgcaactttaagcttggcacaaactctttgtgtctcaatctcttagtctttatttttttattttatggagatagaatctcgctctgttgcccaggccggagtgcagtaatgcaatcatacctccctgtaaccttgaacacctggattcaagtgatcctcccatctcagcttcctgagtggctgggactacaggggcagggcaccacacccagctaatttttctatttttttgtggaggcaaggtattgctctgtttcccaggttggtcatgaatttctgggctcaagcgatcttcctgctttggcctcccaaagtgctgggattacaggcgtgagctactgcacccagcctcaatctcatagtctttaaatgataatggtaggaaataattacttacgtgtatcaagtatgtgctttgggctagcaaaacctagtygttaaaagcacagactcttgctcagtcacactgcctggctctgggtcctggcgctgttccttatcagctatatgactgtcaggtgtcattgccttggcgtcttcatctataaagtggggagaataacattgggaatgattaaataagttaataaagtaaaaaccattgaaacagtgccaagcacactgtaagagctatgtaagtcttagcaatttcttttattacttttcttttctttttttctttttttctttttttttttttgagacagagtctcgctctgttgcccaggctggagtgcagtggtgcaatcttggctcactgcaacttccacctcctggttcaagcaattctcctgtctctgcctcccgagtagctggaattacaggcacacgccaccacacctggctaatttttgtatttttagtagagatggggttttacaatgttggccaggttggtctcgaactcctgacctcaagtgatccacccgcctctgcctcccaaagtattgggattacaagcgtgagccaccacrcctggccaatttctgttattacttttcttaataagtggcacgattattcatattttaccaatcaggaaactaaatactttgctcagggccacaagtaagtgacagagtcagggttctaacctggacatcctagtttcagaggaggcattggtaattactactctatacagtctccattatgggatttctgtaataatgtagttaaataatcaatacataataaaatttaaaactataatgcactatgaatatttaagatattattatgtrtactatagtgagttatgtttgaaagagacactattttttttcttttccatcacttaaaaccttttcactgtaccagtaattacaaacagcattttaatggcattgtataattagacaatcccttcacgtacatgcatgtatttacattgctactttcagaggatggcaaagccagtaaaatcctctctattttgaaaaagagaatgctgaggatcagaaaagttaagtaacttgcccaagtgttcacagatagtaaatgagaaaatctcctaatgtaattccaaagccccaaatgtcatccagtgttttgctatcttaccctgctattttctaatgatttattttttcacagtttgaaaactaattttataatatagtttaccattataaatttatgtaaatattaatatatctttgtgtacaactggataactacttgaacttatattcttttgtttttctttttaaagattgtgattgctagcattatgtgcagttacaataaaaatgactggacggaacttgccaagaagtctgaggtaatggttactttagtatatatttattttatttcttctctcctatttttattagttttaaataaagagctgccatgagaaataatacagtagaagtaaaactgaattgaaaatgtaacttaaaacatttctattataatttgtttaccctgtgttttcattaaaatgatggaaatgtaaatttaaaaggaatttattctataaaagcggtcccttggatttcacacactacctaaaaatcctttattctctgaatccatacactctttatttgcatgttaagcaaactgtatattatgatggatgccatgataaaatttaattctacctttgagagtctaacttgatcttaccttgcctttaggcaaactagtttgacagtaagagaagaaattttgaatataaaactcttgaatatttaaagtataaaaggttcatttaatactattctagtttgaatacagacatgcataaaagagcgggacagaatgctcctgaatggaacactagtcagcaggttttccataatataaattgaatcctgcacaaatgcaaacaagtaaccatgtgccttaaatttgtatttcaaatagaaaaatacatacttaaaattatacacttatgtccatcatgctgtcatggaaaatagtctggagagtcttagctggggttccttgaaaacctctcagtaatgtagaagactaaatctaactataccaatgaactaattgacgctacattataaaatattgcaaagctgtctgtagtgttcaaaaatgttgattatacattttatttggatattttaaaactgagaagggaaaaattactactgggacttagaggggtgaaattaaacatgatcagtaattggcctcgtgatcttccatgctgggttcatttgatacatgtatttacctaattgaccatgaaatcttccacagagcccatgcttggcatgagctttgccaattttaagctgactatgatgaatggctttatcatgccgcttgcttctctgcctttctgtaagaacaaaatacttttcaaaattatttttttcaatattagacattaatttttaaatagacaacattactttttataagtcaaaagcctttaattataagcaaactagctaacctaaagatatttttcacatttcatatttttctttaatttcagttttatttaatatcaccttctaattactctgtagcaaaaacataaataaaaagaaaggaagaaagaaaaaaaagaaagaagggaggaaaaggtatgccttttgttcaatcaaaacagtctgcaaaatctctccataggagagcagtctacataacaagaggttatgataatgtcaattaaaaaataaaaatattcactataatcttaagtctggactagcccaggagatatcatatgaaggaagtatcccgcaggccttcacagcttctaggagggtagcattaagcagcatgatttcatcacagctcatatggtaggcacccaataacrttttgtagaatcagtatttggttttggttttatgaatatgcttcaaaaccggttaaaacagatttccttacaatggaaaaacccacattaaaacaaaccaacaaaaacatattcaagtcaaaattactgtactacctaacatatacatttcttttggggtggtgatatagggatgtaagaaatcagagacaccacaccaacrctctagcatgccaactgtttcaagtttagctaatgctgtgatgtgatgatgatgtatactaaaccttaagtttataaaactgtctttatggcagattaattcttgaattacacaatggagagctgaggaaacctgctatcagctttttactacttcatctgaaacagaaatgacacatatggagcagtagagccttagaatgcacatgcatttcatgttctatattcttcaacctggtttgaatttgtcatgtttttgagcaccacaaagaagtttctactgcttgtgtcaaattagtagcattgttagaatctagttagttttcttgatccaggtacctgatcacaggctctcttgcttttctggaaccttggtagtctactccaattctatgcaaaagaagatttatgaaacacctactatgtataaagtccctggctagccaaracaaagatgagtaatagggagcaatcagatatatgccaaactgagccatttctgaaggttcacaatattcacttgtaaatggatctttaatccagtgtagtcgatcttgaatcaatttcttttgtaatttgtaatcagccttgaaaatagagcccgagtaaaagttaatgtgaaaaagctttattgaagtatacaatctcagagcagtaagactgaggagaaaagaaaaatgagatgggaagaagggaaaacaagtgcaatatggtgcattccagagctggccacaacttcacaaggaaatggagccaattgctcagtcatatgggacagggaatagcacatcatttcacaagatgatagaatcacccattctctcatcactttctaggaaaggaagtggaaggaatgagtctactggctccttcagtctcctgtctctcactggccccatttcactccgtagggctctcctttcctctgaacttttgagttgcatgtcctgccccttcagggcagctgctagggaagctagatttgctagcatggggtgtgatgcttcttctaaacccagaattgtaggggaaggccagagcctcctgatggggcctgggcactggtgctcctggagctctcactttgacaggctcagtggaggttgtgacacaacccactctcatctggagggagtctgtgagagcggacagttactataggagatgtgaagatagcaamagggactggggctcccctttaactagtggcaaaattcctgggtgacaagtagggccatcaaatttgaggaagcrtataattggctgtggtccaaaatgcatcattaccaagtttaactacaatagctccactaatcttcttgctctcaaccaatccaaattctttccatctttcctaatttcagaacccttaacttgaccattaagtgctacttggcccctgccctgcctgcctctccccattgtcactgtgggtctgttttctgcattccagatcccgctgccttcttttcctcctccaacacgttcccaactcagagcttttcctgttcccttggcctgcaatgttctctcttcctcagtcctgagcctctggctacgtagtttaaacctccctgtcctattctgtaagaccctgtcttcagaggccagttgaccagatagttaatgaagcttaagcttcagggcatttacttgcatgggccacttgcaagtccctgtacctaactctgtgtttacaatgtttgattattgttttttccttaaagagggttttccaaattatttaagcattaggctccccaaaatctggatctacctctgtctgtgtttttcctctgtagcatataataaagtggtgattaacagttgtgtcattggccactactaatagttcctctgtcctgcttgttagaaagcaagttccgtgggggtcgagacccttgcatggttcactgcttaatcctcaattccaagcacaaggctttctttaccagcagatatttgttgaatgaagtaaaaaagaagtatacagttcgagtattgccatgtgacaaacaaaaaggaagccattacagaataaatgggaagaatggtattttatttggcacccatgaacttgaagtgtttaaaatccagtgatgatgattttaagtcaggtacctgatgagagattgccaaggttctgaccacctttggtaggaagagacaaggaaggtccagcagaaaggcataggcattaaaaccaagtgaccacactattcctggcggggccaaaataaaacactaaaacactaacaagccagtttcctatcagtttctttacctgaatctggacagcaatatgtcatgaattaaatagctgtgagagttagaaatcccaaatagtttgaggtaaaaatcaaacagaggcacattacagagatatgtaggaccagttggatgttaagtctctgaacagggacagtaacaggacagaatggaatcacaggagatagacacgcagctggagatgagagatagtaaytgactttacatccagtggggcccaagccaagagtgttttacctgtcccaggtctatctcagagaggtttaagatcccagagaactttaactccagttttgaatagttgagactagaggatagcattgctacttggaaagtcaacatctgaccccatgtattcatttaacagaagaagttaagagggaatccaataactgtgcctttcatgccccagtacagtacactgttctcaccctacttgagctctgatgtcctttgccagaccttatcacccacggacgtcttcccttcccacttggaccgtgatataccacaccatgccactggccatgtagacatccttctggctctgctccgcttaggctgtgacatcccacactgggccctcatggctcctcaaatgctcgtgctcacctgtcttgccctgcctgaccagtgactttagagctgtattgatcaggaaggtaagggaaagaaaggaagaggtaaggaaagaaggagaagagaggagaaatgctttgtgcatgatttcattgtatatgttgcacaagagtttgtggttttgccaccttagtttctctgggtgtttttataaagtggttcagagaattttaaaaactataccactgtcatattccaagaatttctcaggatagttttcctttccctcctgaggtatagacaatgtaggaccaggtgagttatcttaaatcattttcatatcaaggcagaggaaggacaagtcagaggtctatttggatggatagrtaagtatttagatagatagatgattgataggtagatagataaagtatttagatagatagtatacacctttatagtatttactacattccagaagtcatttacttttattttttatcactcctctttaaactcttatatatgttaaagctcttatttttcttttctgtttacttaaaactgtaaaaaataaactttcttttttggcacctttcatttcctgtgttagccttggaaacatttaaaaatacatctccctagaactcttctgtgcaaatatcaaatttatttatgccttacaacaacaactctgtgacttagttccactttttaaatatatttttatttttaatttttaatattttttggagttctagcttctctgacttgatgttttccttttttttttctttttttgaggaaactaaggccaaaagtagtgaaagagtgtgttcaagttcacacagctaggatggagtaaaagtgggattcaaacctatagtttggctcagagtccacaccatatatatatatayayacacacacacacacacacacaaactctctctttctactgtgtatagatggatgataaayagataatgtaggaaattagtaacagtgtatttcctatgtcactgccatcactaggatatttcattttataaccatttaggtgaggtggaataaactctgggtaagtgactaaactaaaaagcttgtgactaacaagaatcagaatgcatgcccaatttcagttaatttaacatttcatgctaattcagcaattaaggctttttgaatggttagagttgcttggaaatggaattaactgccttttaaggtggtgtgcatcctgagacaggaattttcaagcagaggccacatgaatgttcctgttctcatggtgtcaccttgaacagcattgtctgtttttgaggcttggatacacatttcaaaggccttgccaggtgtgtttggtgagtgggcatttgtatatgtgtataatgttggggaaattataataattagtcagtgaaaaaattttatattgaacaggtgattttaaaatattttaatttttacttcaagcttggaagcygtaaggatattgagctgttatgtttttcgtaacacactatgacaactccagccataaaataagtgatttgtagtaaattataatagtgggtataaatgcaggtcctggactcaaaatgcttgagttcaagaccctactatcagctataagctgtgggatgttggataaatcacttgaactctttatgtctcagttttatcaattgtaaagtagaaatgatgatatatcctacctcttagagttgctgtgaagataaagtaagataaaacatacaaaggacatagtaaagtatctggcatattgtaaatgytcaattaatgtaagctattattgtgtaatatggtagctaggtgtaagtttgaaatgaaatatgcataatgtaaatatgtataaaattattatgcaaagccttatttaatccaaaatgatgttgaattgatttgctgttaattgctgcatttcagttaaatagagaagtctacaggaaatatttgaagtaaccaggaaataataagaaacatgttataagtgtatacttgcactatacaatcttttcactaagctggtaattaccgcatgacatggttttgagacaggtcatattatccacagttgacacttgagcagctggagacaaagaagattgactgacttgtccaaatcatccccaattccttagctacaggcgtaagattagaactcagggttcagcaggctgtgctcatccatgctcactaccaaaccatcaaggaaagagcagcatggttttcagcaactctcaaataacatgaagacctttaaaatcggattaggaaagcaaaaccataaggaaaccatgttaaaaacaggctcaatgatcaaatggactttaacaaatgtgcagaagaaaaagcagactcactaatgaataaagataggcaagactatcaaccgattaatgactagctggagttcttaaatttgttgaggtcctacttaaaattcacaaagcaggaaaaaataggctaaaatcttaaacaattaggaaggaaagagaaagaagaaacaactgttgccctaaagaaaggtctggtgtacttagaaagtagtgaactattttttaagcctttgcatgtgataaacctgttaaaatactcttataaccaattcaagcttctagttggccttaccgaaaaataaaccgcggcactggaaaaattatagaagttaggtaaaagaatataaaatttgaatcagctagtttattcctccatctctaaaattactgtaataacttttttttttttttttttttggaactggagtctcgctgtgtcacccaggctggagtgcagtggcatggtctcagctcactgccacctccgcctcccaggttcaagcgattctcctgcctcagcttcccaagtagctgggattacaggcacaggccgccacacccagctaatcttttgtattttggtagagatggggtttcactgtgttgcctggctggtcttgaaatcctaagctcaggcaatcctcccaccgtgctaggattacagttgtgagccactgcacccggccactataataactttttttttttttttttttttttttttttctgagacggagtcttgctctttcccaggctggagtgcagtggtgcgatctcagcttactgcaagctgcgcctcctgggttcacgccattctcctgcctcagcctcctkagtagctgggactacaggcgcccaccaccatgcccggctaatttttgtatttttagtagagacggagtttcactgtgttagccaggatgatctcgatctcctgacctcatgatctgcctgccttggcctcccaaagtgctgggattacaggcgtgagccactgtgcccggcctataataacttttaaaagtgttttgtttattcttcatgttctttacagaaracttcccacgaattctaagattctcaaagtattccaagaatacttaraatgaattatgttgttcatttatacaagatctatttgtatatcaaggaattaatgatttaaataagaaggattcctattaagtaattaagacaaaactatcaatacttcctatttcttaracaaactgtttttaagtatgataatgttgattttctgttaaaaacattttacattttgcttattcattctagctagcctactacatttttgtttgtatgcctaatcccagcatcagttatccataattagtaagatttgtgtccataaaaatagaagctatttaggaaggaataaatgtgatgtcaaacagatctgagttacaatctctactgtgtcacctaataactaagcttgtcatttaacctccctatgcttcagttcacatgcctgtaaacttggtagcataataatacaaagattatgagaattagaggtaacaaatataaaacatatagagcagtgagtggccccttatgagcactsagtaaatatttggtgtgtgattgttgttgtggtggtggttgttatatagaccttaatttgagrgagagagactatacctcacaagatagctgtgatgcagaaaacagaatagttaacacttgacaaatgtgacttgtgttatcaacggtgaaagcctattggtatataaataaagctttgccttttctttcattttcctttcttgtttaaaggattctggagcagatgccctggagttaaatttatcatgtccacatggcatgggagaaagaggaatgggcctggcctgtgggcaggtaaggaccttgacagctgccactaagtatgtcagtgtgacataacaggcccccgtatggatagttactataccttaggcaaggagatgcatggatcagaygactggctagagacttccaggtctgcattgtttaaatatttagygtttaaaaagtggaaaatgagggaagctgaaattatagcaactgtttagttttattgaggaaaatatcacattatgtgcttgacrggaagtaatatcataacaaatagtttttaaaagcgctgaagcagaattagctgatttcaaatgcagtgttctttattcattcctgatgccgatccagtttccctggagcaatatactgtacaaaatgcattgttcgtagtgattttgtagtaaatggggcacggcacaaattgcattttacattttttagcatacgatcattattcactaactgtgtttggggagttgcaaaaagactttgatgctatttttatttttggatacaataaatggaaccttcatactaaaatactttcaaaagcctaatgaacaaaatgtgaaataatatgttaatatatagaaaacactgcatctttatgtaactagttaaatgttggatgttaaggagcactgtaaaaacttaatgctaaaaaggtgagtattttgcatcttataatttaccttttaagcccagaaggaaatggtgtgaattaaataatgtgaaatgtagtaatttctgacggattgtctagtcctggaaagtttattttatctccatgtctggcacaggatcttgtacttagtaggtccccacctttttttttttctctcaagtcatcaaattgatttgaattaaactcagaggcccttaatttgggagggcaaacatttctgcttatttaaatgaacatagattgctatctttgtattagcattcaggaagaattttaaagtactttgtaaatatttaacatgcagaatagatttgtgacttaaggagaaaccatttttatgtaacaacaagaaaggagggtctagtcaaatattcttcaaatatattctctgttccactcacaacaggttgcccagaagatcagtaactatgatatatgataacagaaccaagactcagaactatctagtatagggaaaacatgacattgaatcgtgacttttatgagtcacatgattagatagtagcatttaagtaatgtgattaaaatgagaaggattccttaaaggatacctggaatgggggctgagttagtattcttttcccatctcaagtcaagattgtccctccacttgtttcacagtctstgaatctcagaaccraagtattttttagctacatggatagaaacarctacggaggttttaaatctattgattgctttgttaggggagaatgcaattcaatatttctctcttaccacaaatacgacaattattttgaaaatgttgccctagtcccacctgagtttattttttggagtaggcttttgctatatgagcacatctgaatttactcagccattaagtgtcttaggtgcatcctttctrgagagttatttagccacataaagttttgcacagcctttggctgaatgagaatgccaaatgctaaaactttgcaatcagagatatcattaagctttctaaaaactcttggaaaacacatgttccaaaaaccatgatatcttggctgaaaaaaatttaggaacatttccatttcacttattagttataatctctacaactgaaaccaattcttcatatcagccaagtttagaaattttcttttgaatgatattctcttgtaaattatatgattgaagaataaagctaatttaatcatttttgttccaacatattttaaatgatttctctgcctgaggacacatgaatgttccatattttaaataaagggaaggcagaatattagtgcattttaaaaaatgcttttctgtgactctgactttctgaagtgagcacaaacacacttgggcttatttgccttttcctctagttccttttaccccttctctgcctcctattcccattgcttctccctttacctctctaagttccaaagtcttgaacacttgccaattggtggggtgcagaatttatactcagtggtgggggactgaagagtcattctagtccctcttccccattgctatgtgatcttgcatttcatctgttgaaaacttactatgtgctaagcacagagctgcatgcatggtcagagcctgattaatatttgcttcacgaattagacatgctgtcggttccatggctaaaatatttatctgccagagacactttcttgttcagtacacattcctctctaaatacttgatttttttctcctttatctcaaatattttctcacaaatatttaatgagtgaaaaatgctgcctttgtacctaagtaatttgcctgtgtgtaatcaacattatatagatgtaacactgatatatatacatatatataagcttatatatacacatctatataaaataagtgattaaaaatcatgaaatttatgaagagggaaggccgtaatccatactctgcaacattatgggttccatatttatttatgaaatttatggaaacagaatctcaagctgaccttgggaaattgcattgtgtattcctgcaaaacaaagcttcatatcaaatcttaaaacacctcagcattgctaagtgtttaaaagtagtctcatgtattcattccatcagccatctgtgtcacctttatcaagccacttgctctcctgaaggataagtgtccatctctaaaatatgggatttgaactaaatgatctttaaatctcctttaagctttaattttctgttaatgttaacattaaaaatagcaggctactgttatttttaaactaactttaaagagcattgttaaaacaaaaacaaagaaataaacaagtgcatattgtgttgctctttttaaaaaaaaatttgctttaagttctgggatacatgagctgaacgtgcaggtttgttacataggtatatatgtcccatggtggtttgctgcacctatcaacccatcatctaggttttaagccctgcatgcattagatatttgtcctaatgctctcagccctctgaccccccaacccccaacaggccccggtgtgtgatgatgtttccctccctgtgtccatgtgttcttgttgttcaactcccatttatgagtgagaatgtggtgttttgttttctgttcctgtgttagtttgctgagaatgatggcttccagcttcatccatgtccctgaaaagcacataaactcgattttttatggctgcatagtattccatggtgtatattgtggaagacagtgtggtgattcctcaaggatctagaaccagaaataccatttgacccagcaatcctattactgggtatatacccaaaggattataaatcattttactataaagacacatgcacacgtatgtttattgcagcactatttacatagcgaagacttggaaccaacccaaatgcccatcaatgatasagtggataaagaaaatatgttgctgtttttaaaaacactaacatttctttagcctgcattaaggcagtattttacttagtgattcttgtttttactaatgcttaccctaactaatgctgctcgctttttggtatattttactttgatgaatgagaatctaggcagcagttgctcaaaaaggctatgattggttaagtggacatcttgtacttaaagtggctagaatagaacccttggtcttttatactggaggctgcgcttccattttagttaacggtgtcaataaccctgatgcttaagcaaaggtgaaaatatcattcggctttggttgcattcattccaaagaatcaaagttgtattacagcatgaaaaataaaatatgactcttcttccattccctcccaacaacmctctgaagccggttgagtttttgttccatttttcacaaggcagaggccctcgagtttcccaggtcaaagatttggtcagtggcttctagacctgcactttgatttgatattagcctgaataaagggaagttgtctagaacagttcctaataagtaggtattgcaatatcaatgttaagtatcagtattgttaactgaaaattaagtgcaggattacataggctctaaagttgtctttataattctatttcatttctctaaatatatgaaactacaagcaaacctgaatccactacttaggttctgtctcctgcgactcaaggtgcttctctggtgtattagcatccaaatttaaagttgtctacatgcaatttatataattccattttctgtaacagcatattacttaatagatttaattgttttataaccaattctgtaaaattcagccaaaatgacacctttttgaggttttccccttttcctacatgctacatgttcttaccacattgagtactaaccctcttttagcctactaaaattatattacatattttacttccatcctgcagaaccttcttacccagttcaggctagtactgaatagacctcgagtaggcctttgtattgttgtggttgttgtgtttttaaaattattgccaacaataggtggcaaaaaaatcctattatttctgttaaaataatgacaagatatggccttccctggcctgcattgtcatgcaacaataacaaggtagaccttaactaggctcctctgacactgtttctggtgcatgtgaatagtagcaaacatttgactaagaatatgtgctcattctcaaacatgaatttgaccagtatatatctttctgattcaccttttaatatcaagaccaaccttccccaggagttctactgaacctctgagttcctgacattgttgtctttgggctgccttctttggccagcagtacctttaattcttagaccttccatcagctatcaaaagaaaaatagttgcccaggagctataaatggagtgagatatgtggtaagaggccttgccttccatatggcaataaagaagagcaagatgcagcatgctccacaggacttctcaatgctagtcatataaccctcttggratgattttctttttcctgccatcagaaaacctaaagctgcttacttcttttccttgagttgatgacggggcatagtaaagcacagaattttgtgactgagragaaccttaaagattttccaattcatctcccttatatacaggataggaattaaggaccagaaaagtgcttaatctgccttagcctaaggtaaccaagtagcaagtcccacagctttagtgcctttgttactgacccctgtctagtgttctgtctagtattcccaactgtgttattttggcgtatcaaagtttctggtcaagcaggaaaagtcaacgcattgccctggctactccctactatacctttttgcatacaattattattccttctgcttggaatttataccttctcagctggaattatccaaatggaaatcacctctctaattctatttcaaatgacattctaattcatgagctgggtgtatattatcagtcaatcaaactttccatgaggaaggaagaagaatatatgtgaaagggtttaaagatagaaacccagtgcatactcacatttgaatctgtagtgacctagagcttgaatcactgtcaaagaatttgatttctttacctaacagttccaagaggctacaaagatgttatttccctagccctcgatggattccaattgttcagtggtttgagtgccttcattgtaggtatgattgctaaagagtgaacaactatttagtatacactcatttagtaatgatttctttggatagaaagttcaaaaatgatagtataatcagagagaagactgccgtagctttacaggcaaataaggacctgaacaaagatggcagtacaaccgctatcatctgttatatcttgccacctcacagtccccttcctgcgtttaatcatattgttcaattctatgcatagaatttttaaatattagaatgttcaactcaaacagtccaaacattagttttgtcatcagggagatgtatgaagtcctgctttcatgacgatttagctaagcaagaataaaaggtttaaaagtggtaaaccttaaaattgatttttaaagattattactccaaataccacccagagcaatactttgataattctttcacgatctgttctatgttcaaacttaatttgcataaaactgtatgtttttttttttwaaaaaaagagagaggctttgtttctgtttcaacatgccagcattttttcattagacattaaccacagattattactcttacccttgccagaaagcagacgtcygtcatcaggaagagaatccaaaccaagtgtgaggaccacagtgccccagatgtgctagaatttcccctgggaaataaagtcttccttcagcagctggcttagcagaccctctatctcatatgcaatgcagtgtccagggagcaatgaccacagccctgcttggatcagacccccatagatgtctgtggaggagacaatatgaagacacttttttaaaaccaaaacagctgaaaagtcatagtattttccatatttcccagagttgaaactcaggagtttgggaatataagaaatcccaaaggttagagaaaagaatgtgggagccccagcacttgtaaaatacaacaaacttaagccacagtagcctccctggcatctcatggagaatctaaggtgaggatcactgctgagttctgttcgctttttgatactgattaggtatgtgctcctgagacatcttctgcaggttcttgattcttctcattccttgkgacttaagcctctatgagctatgtatgtggagaattatcctgaatgtgatgtttagttatgccggaatcagcatggacacatgtaggtttgggctagagagttggaactccaggtctatgatttgacttgataagtatgggatagactaggttggcctcagtgggatgatcccctgaggcatcacttttatgggtttgaaaatcattgcactatgaaataacatagttccatgaagaaacatgagaaatgactgtgtggtataagcttctgcaaaagtgactaaaatctgatgttagccatattcattggattcatcctattttattttcctcatagcattataatttttgaagttctttaaaataaattatccacttgtttatgagaaaaactatctctaatcaaaaaaaatctgctttatactatattatgttgcccaactttttatttgattttaattctcagccatttgatagacatgggtgcttacataagtagataaactacaggaaatctgtaagagacatttatgtaactgccaatattttgcctacagctggttctctatgagtttttcaattatagttattaatgttggtaatgatgtaaaaatttttgctgcttttaaaagttgtaatttttttagttgaaagcaacaccgtttaaatctaactgaattatcagttctaggtcaggaaatattgttgtttttgtgtagcccaaccattatgtggcagtaaaaaacattatatataggccaggcatggtggctcatgactgtatgccagcactttgggaggctgaggcaggaagattgcttgagctaaggagtttgagaccagcctgggcaacatggcgaaaccccgtgtctgctaaaaacacacacacaaaaattagctggatatggtggtgtgcacctgtgtttccagctacttggggtactgaggtgggaggatcacttgagcctgagagacggaggttgcggtgaactgagatcacacaactgcactccagcctggtgaatgttacaggaaaaacagctaactatggatttttttaacttacttggtttttattgttctcatttgttttattccagaaataagcaacaaaagtattttttaagttttttaaaaatcaccctcaaatatttgttcacatcacagtgagtttgagaaatatagcagaattctctatgtatttgttgactatagcataaggatgaaataaaaatgtcataaagagagacagagacagaggtgagatggaggagaggctatggtcttagttcatgatttcatgaagagttcaggtaatgtaatgtcacagaagaataatagagattgtcagggcagagtagagacaaggtgggacaccaagattgctaagaaatgaatattggcaggaaaagggagggtctagttacgtgatctgactggcctagaatattggaagaactggtggacaagactgagtcatgtattagaagccacaaatgactcgagagtaaaggagactgcatwtcaggctaaaaagcaatattggaccagaaaactagtaagtactcagcggctgagagtagagacaacagagttcaagataaggcaagagagaagataaggaataagacaaattaaacgaaggtatcagaggcaccaccttcacaaagaccttaaaattaaggtacttctaccgcaragagaaatttgtacacgcttcctgctgaggtagtcagtcttttatggtgcagtcagtttaaggtttccaactgcgataggtgagctgtcaggaaggaggcgtatggatttgcctgactagagaaggagataaggtaagtcaagaaaaataaagttattaaaattacggcattttacaacttaggagtattggctgaagactgaaggctcttttgtcatgatcattggggaagccatattctctgagaactattacaaccccccagacaaacacgaggtggtgcttattgataatcacagattttataccaacatgaagtctctcttgacattgtttatattgcagagatcttattgaaaattttgttttatacctaactttgtttttgttctctcaccaaaagcactttaagtatcagtatgcttaatgaatatatgtactctccaaaaaaaagttttgtttaaggaaaaatcaatttaaagcatgaattacaattttactgtctttgagatgtcttaaacatctttgactctttcctcatgttatttatttatttttttctaggattgattgcttgagtttttgcccctttctccctatttgttgctactgggtctattcagttttgaaagtcctcatagataggttgcaaattccattaaccttagtatgtgttcatgattcatcagaaaagaacatgcagctttcttctcttatttgtaaaatgtctaaccttctattaagtgaatggaaaactttgttgcaattttcctttgccaacattttttctttccttgaccacaccaaaactgtaaacaacatggcaggcttggcactcctgtttttcctgtaattgtgttttgggtaacatggaagaaattgatatatgaagggataacagtatcttttctcttctaatatctgtatagatatagatatagatatagatatcatggaatactactcagccataaaaagaatgaaataatgtcttttgtagcaacatggatggaactagaggtcattatcattttttatacgtataatttaagttctagggtacatgtgcacaacgtgcaggtttgttacgtaggtatacatgtgccatgttggtttgctgcacccatcatctcatcatttatattaggtatttctctaatgctgtccctccccctgctccccaccccatgacaggccctggggtgtgatgttccccatcctgtgtccaagtgttctcattgttaaattcccacctatgagtgagaacacacagtgtttggttttttgtccttgtgctagtttgctcagaatgatggtttccagctgtatccatgatcctgcaaaggacatgaactcatcctttttttatggctacataatatccatggtgtatatgtgccacattttcttaatccagcctatcattgatggacctttgggctgcttccaagtttttgctattgtgaatagtgctacaataaacatatgtgtgcatgtgtctttatagtagcatgatttataatcctttttgtatatacccagtaatgggatcactgggtcaaatgatatttctagttctagatccttgacaaatcgccacactgtcttccacaatgattgaactagtttacagtctcaccaacagtataaaggcattcctattcctccacatcctctccagcatctgttgtttcctgactttttaatgatgggcattctaactggcatgagatggtatgttattgtggttttgatttgcatttctctgatgaccagtgatgatgagcattttttcatgtgtctgtggctgcataagtgtcttcttttgagaaatgtctgttcatatcctttgcccaccttttgatggggttgtatgtttttttcttgtaaatttgtttaagttcttgtagattctggttattagccctttgtcagatgggtagattgcagaaattttctcctattctgtaggttgtccgttcactctgatggtaatttattttgctgtgcagaagctctttagtttaattagatcccatttgtcaattttgccttctgttgccattgcttttggtgttttagacatgaagtcctttcccatgcctgtgtcctgattggtattgcctaggttttcttctagggtttttatggttttaggtctaacatgtgagtctttaatccatcttgaattaatttttgtgtaaggtgtaaggaagggatccagtttcagcttcctacatatggctagccagttttcccagaaccatttattaaataaggaatcctttccccatttcttgttttcgtcaggtttgtcaaagatcagatggttgtagatgtgtgatgttatttctgaggcctctgttctgttccgttggtctatatagctcttttggtaccagtatcatgctgtcttggttactgtagccttgtaatagagtttgaagtcaggtagtgtgatgcctccagctttgttctttttgcttaggattgtcttacctatgtgggctattttttgattccatatgaactttaaagtagttttttccaattctgtgaagaaagtcattgatagcttgatggggatggcattgattctatgaattaccttgggcagtatggccattttcacgatattgattcttcctatccctgagcatggaatgttcttccatttgtttgtgtcctcttttatttcattgagcagtggtttgtagttctccttgaagaggtccttcacatcccttgtaagttgcattcctaggtattttattctctgtagcaatcgtgaatgggagttcgctcatgatttggctctctgtttgtccgttattggtgtattggaatgcttgtgatttttgcacattgattttgtatcctgagactttgctgaagttgcttatcagcttaaagagattttgggctgagactatggggttttctaaatatacaatcatgtcatctgcaaacaaggacaatttgacttcctcttttcctaattgaatgccctttatttctttctcttrcctgatggccctggccagaacttccaacactatgtgtaataggagtggtgagagagggcatccctgtcttgtgccagttttcaaagggaatgcttccagtttttgcccattcagtatgatattggctgtgggtttgtcataaatagctcttattattttgagatatgttccatcaatacctaatttattgagagtttttagcatgaaggctgttcaattttattgaaggccttttatgcatctattgagataatcatatggtttttgtcattgattctctttatgtgatggattacatttattgatttgcgtatgttgaaccaggctggcatgccagggatgaagttgacttgatcgtggtggataagctttttgatgtgctgctggattcgctttgccagtattttactgaggatttttgcatcgatattcatcagggtttttggtctaaaattctctttttttgttgtgtctctgccaggctttggtatcaggataatgctggcctcataagatgagttacggaggattccctcattttctattgattggaatagtttcagaaggaatggtatcaactcctctttgtacctctggtagaattcggctgtgaatctgtctggtcctggactttttttggttggtaggctattaattattgcctcaatttcagagcctgttattggtctattcagagattcatcttcttcctggtttagtcttgagagggtgtatgtgtccaggaatttatccatttcttctagattttctagtttacttggtagagacgtttatagtattctctgatggtggtttgtatttctgtgggatccgtggtgatatcccctttatcatttattattgtgtctatttgattcttctctctcttcttctttattagtcttgctagcgttctatcaattttgttgatcttttcaaaaagccagatcctggattcattgatttttttaaggatattttgtgtctctatctccttcagttctgctctgatcttagttatttcttgccttctgatagcttttgaatttgtttgctcttgcttctctagttcttttaattgtgatattagggtgtcagttttggatctttcctgctttctcttgtgggcatttagtgctataaatttctctctacacactgctttaaatgtgtcccagagattctggtatgttgtgtctttgttctcattggtttcaaagaacatctttatttctgccttaatttcgttatttacccagtagtcgttcaggagcatgttgttcagtttccatgtagttgtgcaattttgaatgagtttcttaatcctgagttctaatttgattgcactgtggtctgagagacagtttgttgtgatttctgttcttttccatttgctgaggagtgctttacttccaactatgtggtcaattttggaattagtgtgatgtggtgctgagaagaatgtatattctgttgatttggggtggagagttctgtagatgtctattaggtctgcttggtgcagagctgagttcaagtcctggatatccttgttaaccttctgtctcactgatctgtctaatattgacagtggacagtggggtgttaaaatctcccattattattgtgtgggagtctaagtttctttgtaggtctctaaggacttgctttatgaatctgggtgctcctgtattgggtgcatatttatttaggttagttagctcttcttgttaaattgatccctttaccatcacataatggtctcttttgatctttgttggtttaaagtctattttatcaggtactattattgcaacctctgctttttttttgctttccatttgcttggtagatcttcctccatccctttattttgagcctatgtgtgtctttgcatgtgagatggttctcctgaatacagcacactgatgggtcttgaatatccagtttgccagtccatgtcttttaattggaacatttagcccatttacatttaaggttaatattgttatgtgtgaatttgatcctgtcattatgatgttagctggttattttgcctgttacttgatgcagtttcttcctagcattgatggtctttacaatttggcatatttttgcagtggctggtactggttgttcctttccatgtttagtgcttccttcaggagctcttgtaaggcaggcctgctggtgacaaaatctctcagcatttgcttgtctgtaaaggattttatttctccttcacttatgaagcttagtttggctggatatgaaatttgggttgaaaattcttttctttaagaatgttgtatattggcccccactctcttctggcttgtagagtttctgctgagagatccactgttagtctgatagacttctctttgttggtaacccgacctttctctctgactgcccttaacattttttccttcacttcaaccttggtgaatctgacaattatgtgtcttggagttgctcttctcaaggagtatctttgtagtgttctctctatttcctgaatttgaatgttggcctgccttgctaggttggggaaattctcctggaaaatatcctgaagagtgttttccaacttggttccattctccccatcactttcaggtacaccaatcaaatgtagatttgatattttcacagagtcccatatttcttggaggctttgttcgtttattttcacttttttttcctctaaacttcttgctttatttcattaatttgatcttcaatcactgataccctttcttccacttgatcaaattggctattgaagcttgtgcatgtgtcacgtagttctcgtgtcatggttttcaactccatcaggtcatttaagtttttctccacactgtttattctaggtggccattcatctcatcttttttcaaggttttaagcttccttgcgatgggttcgaacatcctcctttagctcagagaagtttgttattaccaaccttctgaagcctacttctgtcaacttgtcaaaatcattctccatccagcttttttctgttgctgccgaggagctgtgatcctttgtaggagaagaggcactctgatttttagaattttcagcttttctcttctggtttctccccatctttgtggttttatctacctttggtctttaatgttggtgacctacagatagggttttggtgtagatgtcctttttgttgatgttgatgctattcctttctgtttgttagttttccttctaatagtcaggtccctcagctacaggtctgttgaagtttgctggagctccactccagaccctgtttgcctgggtgtcaccagcggaggctgcagaacagcaaatattgcgacctgatccttcctctggaagcttcgtcccagaggggcagctgcctatatgtggtgtctgtcggcccctactgagaggtgtctcccagttaggctacacgggcatcaggggcccacttgaggatgcagcctgtcctttctctgagctcagacaccatgctgggagaaccactgctctcttcagagctgtcagacagggatgtttaagtctgcagaagtttctgctgccttttgttcagctatgccctgcccccagaggtggagaccacagaggcagccagccttgctgagctgcggtgggctccaccgagttctagcttccccagctgctatgtttacctattcaagcctcagcaatggcagatgcccctccacctgccaggctgctgcctcataggttgatctcagactgctgcgctagcmrtaagcaaggctccttgggcttggaatccactgagccaggcgcaggatataatctcctggtgtgccatttgctaagaccattggaaaagcacagtatttgggtgggagtgtcctggttttccaggtgccatctctcacggcatcccttggctaggaaagggaaatcccccaaccacttgtgcttcccaggtgaggtgacacccccactgcttcagctcatcctcagtggactgcacccactgtccaaccagtcccaatgagatgaaccaggtacctcagctggaaatgcagaaatcacccatcttctgcattgatcatgctggaagctgcagatcggagctgttcctattcggccatctcagaatggaatcctagaggtcattatcttaattgaaataactcagaaacggaaacatattctcactcataagcaggagctaaataatttgtacacatggacaaagacaatggaataatagtcactggagactcagaagggtggaagggtggaaaagggttaaggtatgataaactacttaatgggtacaatatgcagtatttgggtgaaggctatacagaaaactcagatttcaccagtatgcaatatatccatgtaacaaaactgcatttgtatcccgtaagtctgttttaaaaagatagtactggaagtccttaccagaccaatcaagcaagagccttaccaaaccaatcaagcaagagaaagaaattaaatgcatgcaaataggaaaagcagaagtcaaattgttgctgtttactaacatgatcttatatgtagaaaatactaaggattccaccaaaaaaaaaaaacactgttagaactaataaattaacacagcacagttgcagcatacaaaatcaataaacaaaaatcaatgatgtttctgtacattaacaatgaactatatgaaaaagaaatcaaaaggaatccatttaaccaaggaggtgagaaacttacccatatagtaaaaactgtaaaacatgatgaaagcaattgaaaaagatacaaaaacaaatatatcttgtgttcatggattagaagaattggtttgttaaaatgttcatattatctcccaaagcaatctacacaatcagtgtaatacctatgaaaatttaatatagtttttcatagacatagaaaatataattctaaaatgtgtatggaactgcaaaaaaaccctgaatagccaagtcagtccgagcaaaaagaacaaagctgtggacatcatactaactgattctgaactctaccaccaagtgatgttagttaaacagcatgatgttggcataaaaatagactaattgaccagtggagcagaatggaaaactcagcagtgaacctattcatatatagtcaattgatgttaagcaagggtgccaagtataaccattggaaaaaggacatcttttcattaaagggtgttgtgaaaaatgtatatccatgtgcagaagaatgaaattagatcattatctcacagcattaacagaaatattatcaagtggattaaagaggtaaatgtaagaccttaaactgtaaaactactagaagaaaatataggagaaaaagtgcacaatattggtctagataatgattttttaattttttaattgctggagctccactccagaccctgtttgcctgggtgtcaccagcggaggctgcagaacagcaaatattgcagaacagcaaatattgctacctgatcacaggcaacaagtgcaaaaatagacaaattggattacatcaaaataaaaagcttctgcacagcaaaggaaacaattaacagagtgaagaagcaacccatggatttgaagaaaatatttttgggccataaatctgataaggggttaatatcaaatatatataaggagactaaacaactctttggaaagaaaagaaatagtttgaataaaaaatgagcaagggagctgaatagacatttcttaaaagaaataacacaaatgaccaataggcatatgaaaaaatgctcaacatcggtgatcactaggtaaatgcaaattaaaaccacagtgagatatcactcacacctgtcagaatggctgttatcaaaaagacaacagataataagtgttggagaagatgcagagaaaagggagccctggcacgctgttggtggaaatgtaaattagtatactttttatggaaacatcataaaagttccccgaaaaaccaaaagtagaattaccatatgatccaacaatcctacttctgggtatttatgcaatagatttgaaatcagcttatcaaagaaatgtctgcatgcctatctatgttccttgcagtactattcacaataggcaacttatggaatcaacctaagtgtctatcagcagatgaatggataaagaaaatatggtatatatacacaatggactactattcagccttaaaaaagaaagaaattgtgtcayttggaacaatatgactggaactagagaacatgttacgtgaaggaaggcaggcctagagagacaaatattgcatattctcttacatgtggactctaaaacaatgaaacaatctaaaactaaagaaacagaaagtagaatggtgattaccagaagctcggggtggggagaatagggagaagatggtcaaagaatagggaggagatggtgaaaggatgtaaagyctcaattagacaggaataataagggttctttttactatgagatatattgtaaaacatggtgaatatagtaaataaccatttattgtacatttcaaaattgctaagagagtaaatttcaaatgttctcaccacaaaaagtaagtattttaggtgatggatatgttaattaacttgatttaattttaacgtatacattgtattcataaattgtaacatcacttggtaactcaaatatatacaacaataatttttcaattattaaaaaataaaatttcaaaaatgaaagattttgaatattaaacatatacctattattcctatagagatgatagatttagaatacataaagtgaaatatagtttccctttaggtagtaaataagtgtgtcttaaggtgattgcaataaaagtatagttatcatgatgtaaatatatcccaaaataataaattcataaatgatttttatggtgattagaaactgattttattcagtcagttccctttgtattctaggcaaagtgcctatttctacacatgggatcacattcattcctcaatcaactttgagggggaagatagaatattctccacatgaaaaataaagaaactgatggtagagtgacttgttccccattgattctccagggattaatgtgattaatgtgatacatggcaggtattcagtaaataatttggggatagattaatgaatgaacgaatgaatgagtggataattgaatgaattcacctttgacacaaaatgtcttttcgtgtcattggcagtgagaagatcctgagaaggattgttcttgagtatgacccaggaaagtagttctgatttttttaaattgagaacttacatttcaaattaattttcttccttctgtgaccactctccataacttgttctgattttttgctatctttccaccttctactattttaagcttcacatgtctgatttctccaacctaaatatgtttgtccttgtccagaattacatactacttatatatgcatattattaacaattttctgtgatctggaccatctttttcaaaatattttatctttggaactcaaaaatcattttgtttaagaatgagcattttttgcattttgcgttttactataggagtttggaggatgaaagatgtcaaaacagctgactgtgacttccttttacacatctgttgtcctatataagcaagggttgtatccaaggatgagaggacagaaagagaaagtgcactgtctagcctggtcttttgtggaattaagggatgcacttttcagctgtctctatgcctatgaccaaatggcgaacggttctggattacaaatgccctaatgtcccatcatgctttgttgagagcaggtacaacacctgacacctgccgtgctttttgtttascaggctctcacccaagggctaattcatttaattctcacagcaattctatgatatatttactattattgttcccattttacagatgaaggaactcagaaagggtaagtaacatggcagggtcacacggcaagtcagtggcctcatctggacccaaatctcggccatctggctcaagagcctgtgctcctgtccctcagacatgactgcctctcaaagaagaattttaaagaagtaatccctggctttatcaatcacagaaatyattgatagatatcttgatgatgcatttcagtttgaagacagtgctatttgtggaagttatgaaagttcctctatataaatactaccgaaaagtccagtttctggaaaatgattgctgaaaatgatttgtatggtctctattttttttgagacttttaagtttttctgcacccaaaattcatttctaaagagaaactgtagcatagaaaaaaaaaaaaaaaacagaatgcagttttccagttattaatgttaattgtccaagtcagattttatgtttaaaatccatcttttggtggttgtttactttgacatgacccctgccttaaaggagggtatatgtagtttcagattaagaaactgctctggacagaagtttattatttaggaaaggctttaaaagggggaaaaaaccccaccgaggtgtcttgagagttaatacaccccttcttcaaacggtgggaagcactaaatatgcagagcgccatccagcaccacaagtgctcctcctgcccttgcctgccattccgcagccctgcccctctacaaatggtagatcattaagccatccaggcagtgaggagtattttcatatagctactgccctttatagcagcctggcagcgagtgaccataataaattatgcactgctctgtgagactgtgacacaatgcactggaggaacagcgggggtgttagaaaatccattatttgaaatttttgtttctttttcttactagattccatgctgctcttttcctgtcatcttgttcctttttttcctatctattgttttgagggttttgtgtctgacagttcttttctactgctggttttgtcctttttgttaccttgtttctgccttcatgggctcccccaccccccttgcttgatcttgtgtgttctgagccttgttctcctttctgtcatgcgtcgtttgccttacttttctttctctttccgccttattgtctcatataatacagaaaaacaaattctctttttgcctgcattcttttacatggtgttatgtagttgtcattttcccttcacgaaaggtgcactttactgtatgtactattcattttggttccaagaaccccaaacacgtgtccggaggagtgccaatgctgatggcaataaaaaacaatcaaacatcatcccacaaagtagggaaggggaaaaaaaaatcaaacaaccagagtagttttttttgaaaacagtgtagacctatttcttccctgtagatcagttcacatagaatctgtaagattttttttttttttttactatttcaggttgttcaatattttcctcttttctccaagagcaagtcttttccaaagtgacaaatttttgacactatttcttgtaaatccagctgtctgctcattctttcattgtttcccactgatgagtacagcctgaaaagatagttccactaagtggaattcagttaattcactgattcatttaattcattagttattaattgagcaactattaggtagcaggcctcatgcagatgttagagacactgggaaccatcagtttaggttttgttcaatcttttatattccttagttggttatgtccatcattcccaatttttctttcctctttgtgtggacacgccacattggcacttgttgtctgacctcctccactttcacttccttgatccctttggatctagagctccttctttttatttagagttatttgagaaggacttttttctgcttgaaaatctcactgcatcattttagaaagttcaaacctccttggcagtgaataccaaagaatgtgccagattctttaaccccatttttgtgtcacactcaaaatgaaataaaaatagtaatctccacctctggtatggctacaaatttttgtaatacttgcagtagctgaattaaattgaattgagatgtatagttatgaaatataagtgagttacatcaaaatctgcaattcaattcttcttttacggtattgagttccttgttccttttaaatgtttttctccatttgcttttatttgcctgactgatttcctcttttataaacattctcttttctaatcctgtttctcctgaaacacgtttgattttgtttctctccctatcgtgtttgctaattctccattttttgccttattgtattctaagattaatgctgtttttatttttgttgtagttattattttaaataagattggggatagtagctcaaaaaagttagtgtactgtcttctaccacggacatgatttcttctatctctgtattcatgtcctttataattttaacctttccccttgacctcatatctctaaatttccagttcagtgtttctttcattccatgatttatttttttcttttcttgccactttgattctgccctttacctttttcctgtatcaggcttatttttaaaagaaacattggttcttttaatatcattttgcaaacgccgtgggaacatcttctctcattttatttttactaattgggctttcagagtaaactctccaacttgtcatatagttcattttaagcacctgcaagaataagtcagttgccctgtcagcttccagatgcagtggaatgttcatgttagatcttacatatttcaaacttcyaatttttaattactctcttctcggtttggagaagagggaggaacagatataaagagctatgaagttttgaaagagagataataaactgaaaataaataagcaaatgtgataacggggacacttgcttccttagaggatgtcacagggaaattatttatagtggctgaataggagatacaaagttcagmaaacctcccacagattctttcctgaaggccacgacttcctgtagccaattgcatcaaacatagtggcttttctataagttcaccatatagagtttcattcatttcattactaaaagactcagccttggtaaggcactgctcccattttacaagtctttgacatgacacactcatttttaaaagcacacagtatcggttgctgttgaatctcatattgcatttctattgaccagattccagttataacataaacacttgggtaaatgattacattttaaagtcagtatgtaaaacaaccctgaacaactatgtcagatgtttttaaattttttctgattttgtgactcacagcattattaataattgaaactctgttctggctgtgcttaactagtgccagttttaatacaaaacctgtcatatttaaacacaactgctccaataataagctattaatatatcagttaatttatttcactgacccctgtaacctaaacttttaggtcaccttggatttgtcaaatgggatggctgcctacaaaagttcagtcttatatatggaggagtaaatataaaaatgttatgagcaacccacattccattataaattgtaagcatagaaagaatgtaagtaaatttgaatgactaaattatttttaagtatcagttgtatatagtactaagcttcagattagtactaaacttcagattagaaaactgtttaaataagacattttggacaaaagcctatggtttgagtatttaatatgttcctccttaccagctatatcccagccagtattacaataaagtttaattctttttagttaaaaagcagatttcaattttcccatggcttcctttctttttctttggtctccttctttgtcactcctacctctatctgtttcccagcctacaagaggagtggtcttcagctctgagactggtttctctcactgaattttgcttaaaaattaactttgtctttctgtttctttaattacatatttcttctctttttgcttacatagcatttctcttgtttgaatctgcagcatttttttttttttttggattcttttagaatcattgccactttctgattcctcagggatctagaactagaaataccatttgacacagccatcccattactgggtatatacccaaaggattataaatcatgctgctataaagacacatgcacacgtatgtttattgcagtactattcacaatagcaaagacttggaaccaacccaaatgtccaacaacgatagactggattaagaaaatgtggcacatatacaccatggaatactatgcagccataaaaawtgatgagttcatgtcctttgcagggacatggatgaacctggaagccatcattctcagcaaactatcacaaggacaaaaaaccaaacaccgcattttctcactcataggtgggaattgaacaatgagaacacatggacacaggaaggggaacatcacacaccagggcctgttgtggggtgggggcaggggcgagggatagcattaggagatataccaaatgctaaatgacgagttaatgggtgcagcacaccaacatggcacatgtatacatatgtaacaaacctgcacgttgtgcacatgtaccctaaaacttaaaatataataataataaaattaataaaaagaaataactccaaaaaaaaaaaagaatcattgctactttcttcagtaagaacttgtaggattggctcacattgataatattaaatggttctcatttttgagagcttattttatgccaggaaatggttaacattttaagtagattatattatttaatcctcaaacaactctctgagctagtgtactattattcgtactttctagatcaggaaactgcaggatagaaaagttgagcaacttggctgaaattctacagccagaaattgaccacaggttttctgtactacaggtactgtacacttaatcactatccgagctttcttgatgactacttccannnnnnnnnnnnnnnnnnnnnnnnnnnnnnnnnnnnnnnnnnnnnnnnnnnnnnnnnnnnnnnnnnnnnnnnnnnnnnnnnnnnnnnnnnnnnnnnnnnnnnnnnnnnnnnnnnnnnnnnnnnnnnnnnnnnnnnnnnnnnnnnnnnnnnnnnnnnnnnnnnnnnnnnnnnnnnnnnnnnnnnnnnnnnnnnnnnnnnnnnnnnnnnnnnnnnnnnnnnnnnnnnnnnnnnnnnnnnnnnnnnnnnnnnnnnnnnnnnnnnnnnnnnnnnnnnnnnnnnnnnnnnnnnnnnnnnnnnnnnnnnnnnnnnnnnnnnnnnnnnnnnnnnnnnnnnnnnnnnnnnntaatattttccagataaaaggacagaaattgtaggccctgtggatgagccttccaggcaattctgctgttcagtactcaagctgtgccactgtttttcctcaaaattcaggaaaaaggaatagttcttccttccatgtaagccaggtgcagacaaagtggtctgttttgcaagaacttcattgttttacacaactgtgttttccttatttacggaaattggttacaagaaaggaagcaggataacttagctaagtagttaactgtttcttttgtagaatgcaacaatctcagatacttgaaaaggttttgcagaattttaaataagtgttcccaaagagcttatgtttttatttcaaattacgattcgacagcattcaatcccttgttattgctttgtcagacttttaattgaattattcagaacatgaaacaaaaggaaagaactgtagatatagcacagtaatattaacagaattaccagagtgctgagaattattaaagaggacattatgtttgttaatcgggcatttaatttttcttctgtttgttgatggaaaacatcctcttggaaaggattttctcaaaaaccttaattgtgacaatgccttcttaacatccatgaatatactgtacaagcaaaagctatttgaaatctaattagtcaaaaagattcctaatttccattttaactgtagaatggctgaccagcattccagtgagattggttttcagtacacaagagaaagctggccttccaaacaggctttagaaagtcagaaatgcaggaggaaaggttttaagctattacagactatagcaaaaaaaatgatatattgtattcttgagaatactgagaatgtttattgtggtctcactacaaaaaatgaagactgtgtgagataatgcatataagtagctcaatttagctattccacaatgtatatatacttcagaacatcatgttgtacatgataaatacctacaattttgtctgtcaattgaaaaaacaatcagtcaataaaaaaacacaatactccctcaatttatgagcccggtacaaccttgatattgaaagattagtgtaagaaaagaaattataggtcagtctcactcataagcatcaatgcaagatatgaaacaaaatgttaacatgcagaatccagcaacatattaaaagattaaaaagatgaatatggcatgacaacatggagcttatctcagtaaatccaggttggcttaaccgaaagaaaacatcatgtcatgtaagtcatcatattaacaagttaaagcagaaaaattatatgatcatctcactagatacggaaaatatgtttggtagaagtcaagattcattcataattttaaaaacatcttagaaaattgtgaataggaaggaacttccttaaagtgatcaaagatatttgcaaaatatctgctgcaaacatcaaacttaatagtgaaatgtggtaagcatgtctttaaaatcagaaataaaacaagggtgcctgctgttagcatattcattctacattgtactagatataaaatgccaatacagtaaggcttgaaaaatgaatttaaaataaagagataaaaaatgaaaatatcaggattgggaaaaatgacattattcacatatcttctgataatctataaaaaatatccaaaagaatccactgatttatatatttatatggatgtttaaaaggccccaaatcaccaaggcattcaataataataataaaataaaatattttatatagcatttatgctrgacattgttctaagcacttaacatatattaacttggtcataaccactttcaacaattcttataaagctatatctcttaagataggggttttgacacacagttggataaattgagcaaactcgcagaacacagaactcgtaaagatacccagacagatatggaagcttgatttttgtctgagctatcattacaaaccagtgagaaaattttgaactattaactaaatactagtaagacaatcattatctatacataaaaatcaagtttaagtagatagacctttatgtgataggcagtacggtaaatgtttcaaaaacagtatagaaaaatgccttatggaccttataatctataaggattctttaaacaaggcagaaaatacagagatcataaaagtttgttaaaatttcttaatcaaaaaataccatgaggaaaacgaaaagacaagatataaattaggaataaacacttgttctacaaacaagagacagaagagtgatatttagaatatatgcatttcttcaaattcagaagcggaagacaactcaatataaaaactaaaaaaaggatcgagcaaccacttaagagaagatatagtaataatttaaaaactagaaacaaccaaatgcccatttatggtagaagagataaaaagacttgtaattatacagtggaatactttgtagcaataaaaatgaatgatatatggctatatggaaaacataaataaatctctgtgatataatgtcagattgacaaaggaagttgctgaagaataaggaagaatattatttcatgtatatggaagataaaaacatttaatactaaattatatgttytttggagatataaatgtatatggtaaaacttttaaaagcaaaggaatgagaaakaaaaacttactttacctaatatatgtattataaatattcttttgcatttactgcattaaacaaaattttaaacctatttttacagttcttgcaacatgttgggaaagtcttgtaaaaaaaatcattaaaataatatgacccaagtgtaaatattgtttgtgtacttctattaggcaggtttcatagtgattaagagcacatatttcagaactggattgctgaattcaaatgctatgcatactatatgttatcatataaagcaagtgactttgcactcattttgtcttctgtaaaatgggttaataacagcattcatctcatggagttgtaatcaagactagaagccttcttacacacataattgcaagtgaggtacccatcacttttcttcctgctgttttctacctgtcaattaaaaagcattttctcgcatcccgacagtcaccgttatccagtctaggatatgagttatgagggaaaggtgattgagccattccacttggactccatttttgtgttttcaaaatgaaattttgcttggtgaaaggatttcaatgttttcttacttttgttttgatcacaaagtttaaaaagcatagttgtgaatgaacatttaagggtatacaaaaatgtagagcccattttgttgagtgaagaaaagcaatgacaaatagaatgggaagcatgattccatctcatctttaacactaatgtcagaatatacaccaaaaatattatggacagttttcatcttctttttgtccatatgtattttttaaaatgataatgcactcttcatgtaagcaggggaaaatgggacattaggaaaaaatatttttagccagttactaagaaaatgacaaacaattcagatttttaaaaatggatagacaatttaaagaagcaaaattaccaatggccggtaaacgtgaaaagatatccaacccagctggtcagaatggaaatrcgaattaaaccaacacagatattatatttttcatcaactaatttggcaaagagtgattaccattagtgctatagagagtgtggggaagcagtcactttcatattttactagtggaaagtgaaacagtaccaccctttgggaaagcattttgcagcatctaagtaaatttcatggcatatacttttagtcccagcaggccaattctaaaaatctctcctataaaaattatagtacatgcataaacatgtttcatgtagttcaagttagcaccatttttaataacacaactggagacaaatgtccatccttaaagaacgttgagtaacttatggcatgtacrcaatgggatactctgtcactataaaaaacagtgagatagatctctatgtcttaatgaaagggaaaaagtaaagcaattttcgcatatatcaatgtaktgtgtgtgtgtgtgtgtggtgacatatatagattatatataatgtaaagagaaaaaaattgaatgttaaaataacaataatacatgtattatataaagatgtacatatataaacatagggtttaaagaatgaaaagaatagacaccaacactactagtgtttagaacctctggtactgggaaaggagaactttcatttctttgtacaattgtctatatatgaacaattctcaacacctgtgtgttttattgttatcttctgagttatgaaatggtactgcatagcattaactcaagcgtgaatgttggtctgtctattcaaaaaataaaccatatttatttggaatcatactgccctacttctagaattccttagaatggttactagcaagtacttttggcgagattctctctctctctctctcttttttttatttttaagaaataatgaccaataataaattatcctcaattcatttacttaatctagggttccttttcataaaatactttaaaatagctattttccactaataagtgtaattctgcagttctatgtaaatattgaataattatgtattaatataattgcaattattagtgtaattttttaaaaaataagatgcttgtttaagaagctttaccatggaaacagcacatgaaactatttaccatttaccattggagtaaataggtagtaagtgatgatataaatataaacgagttaaaattttaaagacttacagacttttttaacttggcattgcttttgtgaagatttataatatctcactagctattttctacctatttattgtagtaaagggactttgttctttcatacctgaccacaaaagaaagccatttgtagctttagcactcatatattaagggagttgtatgctttttaaaaaaaattctcatggaagacataaacctaatcaaacctttctaccctctagctggtaacctctgcatgaactaaagagttgaaatattgtttaatcatgctacataccactttttacagttatgagaaacattattttgctgctatagaagcaacaaaacaaaatgtttttactctgtgttaaggacaagtatattttttaaattatttattttaaatagcatgatttcttatactacactttcattttctgtattttaaatattacttttagcaaaaggcatatttttaaaataatgataatacacatgcaacctagggaccagagaccctcatactgacttgtgcctcagataaacaacatgtaatttcagttggcaatctttacttgattccttcagtccaaactcaactattattaacctttgtttgtgacaattgaagagaataatggtggaatttggggcctttaatgtcacattgaaatcaatagctgtaaatggtagttgccacagttctaactgatctgtcacattcaaacaaaagaaggcctttctcagttcatagaagatagctgggacaattaaacacacacatacaagaatctcaaaagacttttataacattaaggaaatgtactgattcacagtattttttaaaaggctttgtttatttgtttgtttgtttgtttctttgagtgtttttttttcctctcctgaaattttaagtcaaatacaggagatgtaactgacttcatccagagatcaaaaagtgtgctctatcataaaaataaattgaattgttcttctcaaagtggtggtgatggtaagtggtagggggagtgatgataagctccttcatgagctggcaaggccagtaattgcaaaggccactaaataaaaacaattcaaaatccttgaagccagatccctgcatgccactgacagcacccttaccacgacttcaactcccaacacaaatgtatcttttagacttctgaacattcatcagtgctaaactttcagtgctcagttttgactttgtttttaattttcttattcttctggacatttggggaatgtaaattaaggggtttcagttcaagtttccatacatgactttgataygcatatttgtcaactctgaacctactactagttataattggctgtacattgattaattccactaagaacataagtcgactttgcttagcactgtgaagctgtatgaagtaataagaatgtttcagtgattttctagaaagaaaaagccttagtaatttttatccttataataataacaggtttccaagttttattaaggcacaatatgaaatattcttattcactgaaataccattccaaccatcctttgaaaaattaaattagttgttcttcgaagtagaaactagaaagattcaatactacaagaatacaggagattaaaaggaagaaagtagacaagatcatgtatttaagtcgccttaagcaaaagtactattttttctcagcttacaattttatatgacaatttttcacacttaacattttccaaaattattagtttaaggactccattatttttctaaaaaattatacttctctgaaataaattcattgactcaagaagaacataatcaatttttaatacttcttttccccagtttatttcttctcactagagtatgagattctaaacttcgtcagatcagctacctggaacaaaacaactactatgctagtgaagcagttctcctgaaaacaaatctcctatttgtagcatttgttgctggtttctgtgttatgaattctctcactatagccaatttcaagctaccaacctgatgtcactcaacatggaatcgactccaggacaacactgaaacagttaggctttctctaggaaagacttgattctgcagcyactgttagcatgactagaacactaacagtagaaaaggatgtgctaatcttccttaaggagaaaaacagagtgataaaatggctgaccagaaagtcagctgttcttaccaggtcttcgtgattatctgctttgacataaaggaaataaggatccttaatttggtaaggtaaaactaaaaagtttttaatgtaaatttcacctttttaatatgctaacctagagaactcaaaatgttcctctttaatggtgtggtctctgttcagtaaaagaacttagagagatgaaaattccatgggttcctatgtatatcctgtgttcaggagatctgttccttaaattatattactttaggagagagaaggattcatgagaaaaaattttacttgtcaagtcttgtgcatagaaatatcaatctaagcatatctgcagtaaattaggggctttgcaattcaacttgatgtaattgaaggtatttgtatgaattcaatatacatgtccgcatgtatatgtagtgagagacagagacagagggagagaaaaagagagaaccctgtgttaatcagctccttttgctatgaaacagaaaggaaggcaaactagcctaagcccagtaagagaaattgttgactcagagccaaaccataggaatggcagtactcctgacatgggggaagaccagagacaaggacctaatgtcatggtactcctccttcaatttctcttggtaactagcctttactgtcactttcctgcaaatataagcagttgataaaggggtgaggtaggtcatctgttggtttakatttagatttattaaattctagtcaaagaacccaatgtataaaacagctattttgggggaaattgccaaggtattcttgtggccaactgtatgtcaagtaattcacatgagtatatgagaaaaatacatgtgctatgtatgttgctacataatttcacaattatctattaaatcaagcaagttaattgtatcactcaacttatctacrtatttactgttttcaatctgactgatcagtcaaaatctaacagatacctattaaaatttcccattgttgtgtttttattttcttttattttttgagatagggtctcactctgttgctcaagctggagtgcagtggcgtgctcacagctcactgcagcctcaacttcctgggctgaagggatcctcccacctcagcctcccgaaagtagctgggaccacaggcacacatcacaacacctagctaatttattcttactttttttgtggagacagagtctccctatgttgcccaggctggtcttgaactcctgggctaaagtggccctcctaccttggcctcccaaagtgcagagccaccatgcctggccatcgttgtgtttttatatcatttcccactttttccctatatgtcttttcttgtttgatatatagtttatgcatatagctttgagaattattcctgtaatcattatatcactaattatctttattagtgcttttgacctgagttttcattgttttcttaacattaatatttccattcctgcattctttttttcttttctctattttcataattcattccattaacatatatagtggtaaatgacctatttacttattattataatattttgtgtttactgtttatttactttgttgggtgtttttccttttttaaaagtctcttaatttggaaattgcattcttctgctattcacaataatatgtgaaacaatatttctcgcttagtatatccagttcagtaatgacaatgatcacactaagacagcctacttgcccattttactcctgaatctctactccctgtacctttttagagacttttaaactcctttctaccttacttcctcttccttcttttctccacaatttttggatttttctgagtagctgaaagctctttgttacgggttttaattaaacacacacacaaacataaattttaagaacactgtcttataatttctattctgtcttagttatagaattatcatcacataaactaaaacaagttaacactgtttattcactgtattaacactgcattgtgctttgctcttcttgtaaagaagagatttgcttctggtagaaattttatgagattgggagtacttccttgagtattttcttcagataagatatcagtacatgggtggcatattttctgaattcttgattgttgaaaaccattgtgccttttttcttaacatttgattattatattgattggctggtataaagattcttgggcgacagtcattttcttttaataacatagtcgcataatctttcttttgtaagaaaactattttttgttctgagtagaagaaagaatttttttcattagcattggaggtcagacattttccctgattatgtctaggtgtgtggctttttgtaaaattaatcctgtctgagtcttagtgagcccattcagtcaaaaggcacaagcctttcttcaacagaatttttattctgttatttccatgattatgacttctatttgatagaagctgaagttttccccatctggaactacttctctttgcatgttatgtcacctagatcttcctctaaatcacttattttatcactaatttccttctttgtccctttattttggtcatccagacagttaattcaggtctcagcagtagctactctcttttttttttacctcctctctttgattttagaactgtgaaaatcattattgttagttcaagtaattattatttttattttctaattgtrtctctttgagaatactcattacattgaaactaacattctcctctgtctcattcattagctcttccttaatagtagctacctgttcaagcttgacctccctcccacaagtttaagagtacatgaaataggtagcaatttttctttgacttccttgtaatgtagattttgccacacaagaacaggccaggtttgaggttttcttgagcactggtaaactggaggtttgtgggtgcaatggcaattttgtctggtgagctagtgattacaccctagcataccagaacctcttcactgggacaggtataagaccaggacctaagactctctaggtccaagggggacaaagttccttctaaaatataaaaacttgtagcattttgtcctacctattgcatcacccctaccctcccaggactgcctaccagccgcatgaggcaacctcctgaaggactgtgtgagaccttggcagacgtgctcttctttggatgatcgaagctccaccggcatatgtggctgggcagtctccagtggccaaggaatctgctatatattagcttcagacctgttgggacctctgttcttctcccttccccaagataaatgaatcctcacacttgctctcttctccaggaaactcaaggcttcagtggtactacttggcttatttaagtgttgacttaccctggcatcttcccatcttcctagaatccattttcacagttttaaatattgccaccaagtgtaaaggttttaccgtatacaattttttttattttcacctttattttgcttagattatctctaatgaatctaattttcccartgtctcagtaaaaatagctgtggggttaaagtggcaggtgaaaataatgacaccataatgtcttgatacttcatgtataaaactctgtaacaaatagactgtataataacagacacatttagcaaacaggaatggaggaaccactacatttagaaaaggagaaggagagaatcaaggtgtaagttgtcaatggtactaagtacagagcccattctgcctgggagatttagtggcaactcacttcccatgaaataaagcaagttctttgtgtagccagactgagtgccacagcttcaggtcctcttgccggggaataacccttgcccagtattggcacagtcataaatgttaacatagttaaatggtactcaactgttaagcaatcccatgccattctgccagacttaaagtgtctctggaaatacagctttttaaaaattccactcagatctgtattgctttcatttgagacaatctcctaactggaaaccaattccaaaaaaaaaaaaaaaaaatgtgttaagtcatgagccttcaacttagccctggtagtttcttagcaaaaggcctaggaggtcagccatcagctaagatctcgtttgaaggtgttctgtcttagaacagtggaaatcagagggctgtcttaggaggcctaggtgaatgagatgtgttacactacagaggtgagccagcatgtggtggtcagggcagaaggatggagagtgggaaattagtagctttcgtttggacaggaagcataacacgaggtatttgatagagtcctgaggaattctgcttcctcccagctctgactcacctgggaatatttgtttctgctcrgcattgtactttaagctcagtatcagatagaagaacttctcctttcggagacaaacttccctactcatatgcttaatctgagcctcatcaacttcttaaaaatcttactctctgttcagcttttacatttttcatttctgcctcttcatgrtccattcccattctcctacatgcatgataaaaattgctttgattctgccaccctctcaatacacttgtctatttttcatcattccttcctttctggtcattcagaaaaytctttgcttccactctccaaactctttctgtctgtgctttctcctactctgctcaaaacactatcagaagtgtcaccagtcacgttttcacaatcatctcccttttcatgtactgcacagaatttgaccttatttataacttctccttgaaacctctttaacattgtatttttccattcaatcccatctctgtgaccacttcagtttctaccctctgctgttccattttcaccttgttcctaagtcagaagtagaactcagctttcctagctcctgattcacatctctttccttgatatgatttgtttgtttgttttgagatggagttttgctcttgtcacccaggctggaatacagtggtgcaatctcagctcactgtaacctctgcttcctgggttcaagcaattctcctgcctcagccttctgagtagctgggactacaggtacacgccaccgtgccaggctaattttttgtatttttagtagagacagagttttgccttgttggccaggctggtcttggactcctgacctcaggtgatctgcccacctcggcctcccaaagtgctggaaccacaggcatgagccatcacacccagccttctttccttgatatgatttaaatatgttagtacatccattcattctacaaacacttattgagaacctagtaggtatcgacacctcaggtttgatgcctggtggttttactagacttagttctttaaatcatctttgcagttatgttttaaaaactgctgtaaaactttcaaaattgatttgggctcattgatactgcatttacctgttctgggtcaggctttgaatagcctaccaggtgtaattcaagaggcactccataaaggcttacttgctcaaatgtatctcttctattattgtgccatggtgtttgaattatgcactattattgagtcattctgtgaggtggagacactgtcacattgttgcttttttggagctttcttttaaaatatgaatattctttataaggaaaaactattaagctgtttataacttcatgactaaaatatgaaaccagtcacctcaaagagagacttgaagagatagagaaagacacgaaggacaaggatacgaaacactgagcaaaggaaaatgcccatgagagtcaaagggagaaggaggtctgggtagccttgaaacactgggatggagggggaggaacagaaggacaaaaaatatgaaagagtaaattgactctgttgtctttgctttcaaaaggcaggtggacttctttgaagtaaagcagcaactgtactattttcttttcccatatgttattttaaaatgcaagaaatttagagttattttgatacctatctgttgaattggctgagtggaaaaggtaatgcagagggctatggggacccaactaagttagagagagctgtggtaaatggaactctttgagttttgacatctttacaaataatgcctgatgattatgtattcagttgttttaaggaaaaatatatagtgattcccatggagaaacacagcattatcatatctaaatagattccaccttcacaccctgttttaaaaaatttctaaggaaggtgatatgagctcaaagttctcctgcaatcatttctgaatattggaatctgtgaagctcttttaaacagttacatggactgcctttttcctgagattcttcaggaattctggatcccaggcatcgtgtgtgtgtgtgtgtgtgtgtgtgtgtgtgtgtgaacttaactccataaatgattgtgatgcatagccagcgtgaagaacaactaagccaggaatttgatgagcttagtttgattagataaactgcagccatggaaagaagaggggaggctctgcttccctgttaggaaacatcttctaattaaatttaggaagcagcctctacaaaagctgacagcaaagttttctatgcaggctgcaaaggaaagcatgatgaaaaacacaggaaatattttctctagaagtttgtcacagtgacaggcattctgtcgttttttaaaaacctactctttgggtctgttccccactgccccaacacacacagaacctccgtggtaacacacttacacacagtgcttttcccaatatgcaccgggctctcttgttccctacagcacctttgttcattcttaggtggcggcacaaattcccctctaatgtctgcctcatcaagtctatttgttctccaaggacaaatttaaatagttctgctgagcactgatatccaaaatgacttctcttctctaaattctactgtagtttgtgacactgatcttataattataatttattgagctcctactatgtggtcagcaccagtcatacagctgctattcaacagagccaggaaagcagaggcttagttgatccaaagccaacattcttttcattgctttgcaagttgcagtccctactctataccaccttctattaatactttgattactcggactttgtctttgctcctagcctgaaagcgacttatggtcacagaccacgcaatatgcatgttacaaatcccgtaattctgctattgttttgtttgtttgttttttaatgtagacagatgagttgaacaatgaccatgcagcaggaattagcaagagcaggggttataacttcaaccataccccatgctagcacttgtacatctggagcagttgcagttcctctagcatcttaagtcttaagtttttaggcattttactgtcaaatttaaaataacttgcaagaaaactctgcatcttcaaaaaagtagagttccataataagctaagtaagccaaatttttgcaattactgaaaaattaacaagaaattattggggaaaagtaaatctactagtgctgagacttagatattcatgagggatatgtcccaagaccttctcaaatccccaagtatcattataatatataattttcctcataaaatgcagtaaagtgtaactgaaatatttaaatgatccctgtagacccctaatgagtctatagaaacagaactaaagtcgtttataatgctattaacrtaaattctgaattgagcactggctaaaacattttcaaatatcactttttcttgtttccatatagagcatatggtatgctcatttttgtctgagtcaccatcaaatttatccagaacttctcttttttggctaggacccatcaactttcaaaaactgtacttaaaaattcagctgggtgcggtggctcatgcctgtaatcccagcactttgggaggccgaggcgggtggatcacgaggtcaggagatcaagaccatcctggctaacatggtgaaaccccatctctactaaaatacaaaaaaattagccaggcgtggtggcaggcacctgtaatcccggctactcgggaggctgaggcaggagaatggcttgaacctgggaggcggagattgcrgtgagctgagatcttgccattgcactccagcctgtacgacagtgtgagactccatctcaaaaaaaaaaaaaaaaaaaaaatcctaagacttagcaattggggccgggcatggtggctcacacctgtaatcccagcactttgggaggccgagaagggcggatcacaaggtcaggagatcaagaccatcctggccaacatggtgaaactccatctctagaactagctcagagactacaggaatagaccraatgtgcatcattataaagaagcagctctgactacagaccaccacttgcagagctgggcaagaagggtgtattactctggacagtagatctaggcccagaaataccaaatattaaaatacaaaaaattagccaggcatggtggtgcatgcctatagtcccagctacttgggagcctgagacagggtaatcgcttgaaaaccagggaggcggaggttgcagtgagcagatcatggcactgcactccagcctggtggcagagcaagactctgtctgaaaaaaaaaaaaaaaagaattagcagttggctttctttgggggtcttttaaataaaacttcacaaaattaaactactaagttaaaaaaagagttgagactacagtgtaggggctagctggaaaagctcttgaaagttcaactcattcttagccatgtgagtcattcacataccctcactgcatgattcaagtttcttacagaattacatattaatatgttctttacaaccattcacaaatagttgaaacagcaaatgtttagtctatgactctcagagatttagattatttaatttcagcctcttttgtgtttttcaatgtatccatcaacaatrataaagaatttacttacttgactatgcattttgttcatttttccagagtttgtgatttacattactattcatactatgtcaggaatcaaaaaagtgcaatatcttttctatcacatgacaaggcaccactatcgttttgttggtaactatcttgaattgtattcatgcccaagcatgaagacagagtacttggcttggagcagatgaagatgcttctaggacacaaaactcaacraaatcatcaagccttcaaactcagaattcctagttcaataatttgcctatagtaatgctattcctagttctactttaatattactaccatccttattatattgctaaaaatacatatatgcgtgtgtgtttaataaaaattgaatgcatgtgtgagaaacttgaaataactctgttttatacatgtacatttttatttagctcttttaaattttccaaaaacaatctggcccatttaaagtagttaaattgtaaaacagaagcagaactagctcagagactacaggaatagacaggatgtgtgcctcattgtagagaagcagctcagacttcagattaccacttgcagagctggacaagaagggtgtatgactctggacagtagatctaggctcagaaataccaacggaattctcagtgttcctaggcacacaattagaagataacaatgatcaactaatagcatctcagatggaattcataggacctggatatgtaaaccttgaatacgagagaaataaagcattctttcttctaaggtaaaagtttctggataatagataaaacagtgatgagaatatcccgttaatactcccattagatctgtatttctcagaatttttcatcctgacctgaacatatatagcttccaagtggaattttaaagttattttcttaataaaatcacaagcattctttatattatcctgtatccatgtctgaacaacaacaaaaacactattctttattcttaagctgccctacacaaatggcatcatcatataatttgtagcaaaagctaaatgttataatacttcagaggagttattaataatttaatttattagctctagtcttctttagtctttctttcctccttctttgcttttctcctttgtgaagaaaatctcattacctacccataacccatatgaacatgagtgcaaacatttgcagtttcaactattggtgaatggactcgtataaaatataccaatacacaattttggcaggggggttgtttgtttgagacagggtcttgctctgtcatccaggatgtagtacagtcgcacagccatagcttactgtaacctcgaactctcctgggctcaagcgagcctcctgccgcatcctcccaagtagctaggactacagtcacacaccaccacgcctgactaactttttaatttcctctttttctgtagagaagaggtctttgttacgtaggctggctctgaactcctggcctcaagcgatcctcctgtcttgacctcctaaaacactggaattacaggcatgagccaccacacccatcctcaatatataggtttgcaaaaaatttgagtcatgaggctggtgtgagctagtgacttggctaagagttatcctaactcttagaagctttctcacacctgtatctcagtttcctcttactgtgttatatagaactggatcatgtagacaggcaatgatcatatgaaatatgtcagcattacatttgctttgcagttgcgttttatttttaaaaagttttatctaagtaatgaatatttagtcaagaattaatattcagtcaacaaagatatctactgtgtctttcatgtaccaatattatgattgtccctgtggatgatattgcatgatgaaaaaatacatgatctctaactttgagcaactcaaaatctgtgagcaaagacaaaatttaagttcatgaaattaaaataatttaaaggcaactataaaagcaaatggataatttgtgtagttatagaatatacggagttaactgtgactttcccaaaaggttatccaaggtaattcatccccagtgtaccacacccttacagccactctctaccccctcatcccttgccctgttgtatatttttaaatcacctacttgaaattatattacttatttattttgttcttatcatattttccactagaatgaaaacttcatgagaaaagtagctttgtcttattactgtcgagctctggcagatagagtagcagttgaatacatatttgtggagtgaatgaattaatgagtatcatcaaataaggattattacagactggttatataacatgcagcccactactaggcaaataagataattatggctgatgataccctactgtttaccattcacatactttagttattatgcaagtttggatattaattaaacaacagttataacaatgaaccacaacaaggagtgatataaaagagaatgaacttatcatcttttcaattttcaattttttagggctgcttttgagctcatcctgatttcttttaaagccaggaaaatcagtatttatttttattgattcactttatattgtgtcagggcaaaatacaggaaatttaatgtccaaacagttgttcactatctaattaggaattaagaaatataagtaaaatgtttcttgtatattaggattatatacatatatacataataacgaaagttgtagtcaagttaggacttgaattttttttgagatggaaatacattgcatattttggtattctagaagtgaccagaaatatcatagaaataagatatcaaaatatttccattctttgtaaattttaaccttcatcaaaagtcacaaacatggtaaaaatgacctgatagtcattcttttgtgaatctgtgttcaaacatagggtaagacatttatctagtgtgccattcatgcatggggtctcaaaattatttctttccttttttttttttttaagatggagtttcactctgtcgcccaggctggagtgcagtggcacagtctcggctcactgtaacctccacctcctgggttcaagagattctcttgcatcagcttcccgagtgcctagaattaaaggcacacaccaccatgcccagctaattttgtttttttaatttttagtagataccgggttttgccatgttggccaggctggtctcgaactcctgacctcaggtgatccgcccacctgggcctcccaaattgctgagattacaggcgtaaaccactgtgcccagcctcaaaattatttcttacccttacccattagtagccacagagtgctcatcaaacatcactttaatacaggattaaatactgaaaataaagaatgttagcagtgtacatttgtaatgctgattacatcccaaagagacatatactttattttgaatatgcttgtaatataaatggctgttcccactctaatacggataattcaaagttagtgacatcaccacaaaaatgaatttatgcagtattcaaattggtagcatttccacatcctgaaatatctttttgtaatgctcatttctattcatgaaatcttaacaaaattcagatttactattattcttcttttccttcttgtttaataggtgctttaggcttaagttcatcctaccaaattgtccaaaaatctaggaagtaatattcagaagttgtttctcactcaccttggaaaatattttctctaatcaaactttaaacaaattattagctttaattaaatgtgaaataaaacaaaagcatacaataaaaagccctttggtgtaaagagctgatacaaataagtccaacttgaatattcacaacttttctgtaataattgattgcaacataatcacagtaaaatttcagcatactttaagtacatttatttgtataaaagtaaatatataactctgaaatgattaacaaaatactacttaagtatactttgtaaaagtaaacctatattttatgtaatctgaccatttttcccttttctagtagkatatagttctgttatcttttctaactaatgtgtcttttggatacctataacactattgatacttttcaaataattttatcatagtatccagttatataacaagtagtattcatttattcatctgttaagtacatttctattaagcaaaaatctgagtaaaatctgaaggaaaagtaaatgagtaaattcactcaagggcaggagcaagtgtgtgtgatatgaatgggatggatattgtggatggaggaaacaacattaataaactctggcctgggagttaaacataagtagactaatatgactttcctaacatactatatagtgactggttttcgctgcatgccatgatttatatgtattatataggctattgtctctttcttaattatttagaaataaccatgyctataatatagtagcattactgttttatttcttaagaggcatctctatggtgtataaggtttaggcaattctattatgaataacmtaggctcagattatacattgtggacaaatcgaattatgcatgtgctatctgagaggagatctgtatgtgagcaagacatagaagccctgtatactctactctctctcagaggacagaggagatttgaagaccaattgtggatgggtatcgtgcatcaactgaaatacccacttatatctccttcatcagttgcccttgtgttaacatacagcatcaaagttcctgcttgtgccaggcccagagctatggattacccagttcttctaagaagttatatcttctaaatgcctattgttatgtatttgctttttgtaatatcagttttgcctatgaacacagcacgtagcatcaaaagcaaggcaatgtatgagcaccacctattagaagagatttagtgccatgttatttataacaaaacctggaaataatctcaacatccaaaaattgagaaataaataattaagtaaaatagggtgtatctatatgatttataaattattatatgaaatatatgactgttaaaatagtatttttaaagaagcttagtgacatagggaatgcaccttatataaaaatgaaggatatataactaaaaatgataagcattaaattttgagtacagtgtatttactcaataaaggagtaaaattttcttactcaaaggaaatagacctttttaattttatttctatttagttgtttcattatgagtaattttagttttttcttctttattcaagttggtatttgcttccacaataattaagaactttttttataatcaggaaaataacatttgaaaaatataatgtaggaatattgaatgaattatggtaaatagttgtttcttttctcattcaaggtaagacaagtagatatgattttaatctgtagcaggataagaaagatattcattggaatttgatgattataaatattatgagaagcagagtctactgtatctgttgctagggataatttgaaagaaaataagaaagctggaatgatttaagcaccgtaaagctaataggtgagaggacttggaaaatcattaactgtggtatatatgttagttttaatattgtctgggaacttcttcaggtcctatttaggcctgtgatctcaattatgtgtttaataagcaaagttcatttttggtgtctcagacagttgctggtttcacattgtaagaattcaggatgttgtttaaaccacaattgatttattttaaaatgtcttataatctctttatctttacatacacttattgccttgtaacataacagatgatctctttcatcatgtcattagttctaattgtgagaactgtaaaatgataattaattgctatatttgttttatacgtattttatgtaaaacacagttatagactctgatagttcagattaatttattgttagttttctttgactatatgtttgcaaatattaatttcttaaccccttgcaatctgccttccatcttattaggtgtctataactacattcccataagttgccaataactgtgagtggtatattctattacttacatttcagtcttcattctacctaatttctctgcagtattttacctcaataatttcatccacatcttttttaggggaagtggtcttctcatttatatttttcctggttgttctcctctctctctgaccattataaggattctgcaccttagtattaatgatcccaaagcttaagcccttttccttccatcttctcatccattcacaagacatcaaccaccatctactaattagagtttaatttgagagttatgccaatgactctcaaatctatgtttccaaaactcctttctgagatccagatttctattaactctcaaccagattctttcaggtagatgtcccatagagacctcaaactcaatgtatctgaaattcattcacccttccccagcccttgccaaaacctgcttctcttgtgtttcctaacttgattgaatacattactatcctccagcaattgaaatctgcaaaattttaaattttcattccccaactctgatttgtccttatcttgaaactttttaacattcatctttaaaataacatcctagtccacttgaaattattgattttcactgacattgtttcacattagccataccttctctttctgattggtctcctgcttggactcttatactctcaccccatagacatatataagagttatgtttctaaaacatggattaaacatatggccttccatgttttcttawtgcctaaaggataaggcacaaaatctttcaaaaattgaccctaaactctagctgaaccatgtggacatgtctcctccctgcttccttcatatgcactagtttccttcccatttcatatgataccatgcattcctatgcttttgaaccttttcttaagtattttttagtcatacatttttccataggctctactccagccagtgattttgtgaatccctcaagattccaaactacaatcaccttcactgttgtctcctcacatctctctcatacacacacactctagaagttaataaaaagtaatcactccactgctaagttttcattcacttcataaacacttcaagtagagcagattgttttggatcatttttatgtctgtttattttaccaaacccagaatggcctaaaccatgaagactgtaaagctttcatggttagaggcaggatagttgcaagtgctcatttaaggacattggtccagattcagaaggtttcagtattcccacaaattattcactttcaaaaaaaggaaaaagcagtaagaaatctgtgagttgcatttgtgattttagcagttttatgttaagttctaggaatagtagcaatttgaaaggtatgaaataaagacttctttatagtgctggatgctgcctttgcccagatgatgtaaaaatctaattaggtgctgctgcttctaggtgttaattacataaccagcaaagttcaccatagtatgttccttgttaagtgaaaaaaagcgcaaagttttaaactatctaaatttagcagtcctttgggtactctgcatttgttgaatattgcaaaagtaaatacccatctgttttagtactaatatgattttgtatatcaagcactttaaagatttttttcccccatgaaaacttcatcaactgttttatcaacaatgtaggcttcaggcacttctgtaaagttgagttgggataaatgaaagatccttgtcgaattggtaatcatgcaggtattgagaatgaaagggagatcatattttaatttaacttcagtgcctcaagatattttcccttatggactatattactgttctctgtctacatatccatcttgtagaaatcatagccactgttaatacatttcaaataaagctttcctggatctgggtgatatttatcacttctttctgcaagggtctcctgaattatatgagggcttactcattatgacatattaaaatgctaaatgatttatagaggaatagagatgtattgtaattctaaaggccatttttatattctgctgaacctgacatagtttaagtgtcacaactgaaactataacttgattgtaagttctttgaggacaaagttgatgccttactcttgtaatttccacatagtccatgaaactaaggacctgctcggccaggccaatagctcctttctaaagaaaagtaaacagaagcagtatttggcatacacctgccgtaaaagtgtgtgtcctggctaccttgaccacaatttattggaccagatattgtatccctgagcaaaaagcaaccacttggagactaaataaaaagaggtcagcaacttgtcaggaagtgtgatgccataacccaggcaataatgtcactccacactggatagtggccaactgcctgtatcaattaacactcttaattgcaagcaacagaaactgactggctgtcagaagtgaaaggagatttattggcaggatacaagatggcttatggaatcaaagaaggcaggaacagcaggcttagaaaatgggcaaaaaacgaaaaggctcagagaatgaacaccargagttgtccagctaatacagcctctaccagggttgatatccaccactactgccatcatgggatactgtyaggagatgctgcacaacacactaccacaaatacaatttaaccacttttctgattgtgaggttaaaactttgggctggatcttcagttgcctrggcctagatcatgtactggttttttggttgcaagacagtagaaagagtaagaccctcttttcaaagacttgtgaaatggggatagttcctgtgtcctaccaatgcttcatatgatttaaatttcctgcaaataggaagggaagtcaaatttcwgacagccaaaatataaagaacgctatttgtactgagtgttgttctctgtggatttgtttttaaatatattatatatatatgtatatatatgtgtgtgtgtatatatataygtgtatatatacacatatattatatatatgatatgtatatatacgtgtatatatacacatatatgtatatatgatatgtatatatacgtgtatatatacacatatatgtatatatatgatatgwatatatgtgtatatatacacatatgtacatatgatatgtatatatacgtgtatatatacacatatatgtatatatgatatgtatatacgtgtacatatacacatatgtatacatacgtgtacatatacacwtgtatacatacgtgtacatatacacwtgtatacatacgtgtacatatacacatatgtatayatacgtgtacatatacacatatgtatayatacgtgtacatatacacatatgtatatatgtatataaatgtgtatacatatatacatatgtatgtatacacatatgtggatatatatacgtgtatatatgatatgtatatatacatatatatttacacatatatatgcctatacatatacacacacacatatatatgcatatatatataaaaaatagtaaaaaaattgaatcggaaaaccaagttcaactcaattttgaaaaaaattgaattggagaaccaaaaagctaatataggaaaaaggagaaagtgagtagaagtagaaatggaataagagatgctgagaaataagagcagatgtattcgtattgcagagtttttaatccttaaaacaatagacacccattcctaaagtaacaacaagaaaacaggagctgctctttagagctgctgtatgtcttacaaaatgatttatggtgtcccaatccccagaggcctagcccttcctttaccaaaaacatttcacttacttttttatttttccatgtatagttgtaataaactccccaaaatggggtaacctcgccatgtttcctttccttgacacctgaaagattaaaatagagaactctctttttacacagacacaccccttatgacatgtatgcttataaaccaccacatgagtgtaataaatatattcaaggatttttaggttcaagattgctaaagattttagataaaatccagtatccatgaatttcattttgaatttgtgaatactacacttacaaaaggtcatgtttaaagccttctctatcccacattatcaccaaagacttctaccaaagtcacccactttagtatttccttagtattattatttcctttagtatttagttttgagtatttacctcaaaaagggatatcagtccacagagctggcaaaaacaagcaagcaaamaaacaaacaaacaaaatggcctagatatttctttccagctcctacagcagcagtgggaagaaatttttttttcccttcctaattccttttatttatttatttattatttttttttattatactttaagttttagggtacatgtgcacattgtgcaggttagttacatatgtatacatgtgccatgctggtgcactgcacccactaacgcgtcatctagcattaggtatatctcccaatgctatccctcccccctccccccaccccaccacagtccccagagtgtgatattccccttcctgtgtccatgtgatctcattgttcaattcccacctatgagtgagaatatgcggtgtttgtttttttgttcttgcgatagtttactgagaatgatggtttccaatttcatccatgtccctacaaaggacatgaactcatcattttttatggctgcatagtattccatggtgtatatgtgccacattttcttaatccagtctatcattgttggacatttgggttggttccaagtctttgctattgtgaatagtgccacaataaacatacgtgtgcatgtgtctttatagcagcatgatttatagtcatttgggtatatacccagtaatgggatggctgggtcaaatggtatttctagttctagatccctgaggaatcgccacactgacttccacaatggttgaactagtttacagtcccaccaacagtgtaaaagtgttcctatttctccacatcctctccagcacctgttgtttcctgactttttaatgatcgccattctaactggtgtgagatggtatctcattgtggttttgatttgcgtttctctgatggccagtgatgatgagcattttttcatgtgttttttggctgcataaatgtcttcttttgagaagtgtctgttcatgtccttcgcccactttttgatggggctgtttgtttttttcttgtaaatttgtttgagttcattgtagattctggatattagccctttgtcagatgagtaggttgtgaaaattttctcccatgttgtaggttgcctgttcactctgatggtagtttcttttgctgtgcagaagctctttagtttaattagatcccatttgtcaattttgrcttttgttgccattgcttttggtgttttggacatgaagtccttgcccacgcctatgtcctgaatggtaatgcctaggttttcttctagggtttttatggttttaggtctaacgtttaaatctgtaatccatcttgaattgatttttgtataaggtgtaaggaagggatccagtttcagctttctacatatggctagtcagttttcccagcaccatttattaaatagggaatcctttccccattgcttgtttttctcaggtttgtcaaagatcagatagttgtagatatgcggcattatttctgagggctctgttctgttccattgatctatatctctgttttggtaccagtaccatgctgttttggttactgtagccttgtagtatagtttgaagtcaggtagtgtgatgcctccagctttgttcttttggcttaggattgacttggcaatgcgggctcttttttggttccatatgaactttaaagtagttttttccaattctgtgaagaaagtcattggtagcttgatggggatggcattgaatctgtaaattaccttgggcagtatggccattttcacgatattgactcttcctacccatgagcatggaatgttcttccatttgtttgtgtcctcttttatttccttgagcagtggtttgtagttctccttgaagaggtccttcacatcccttgtaarttggattcctaggtattttattctctttgaagcaattgtgaatgggagttcactcatgatttggctctctgtttgtctgttgttggtgtataagaatgcttgtgatttttgtacattgattttgtatcctgagactttgctgaagttgcttatcagcttaaggagattttgggctgagacgatggggttttctagataaacaatcatgtcgtctgcaaacagggacaatttgacttcctcttttcctagttgaataccctttatttctttctcctgcctgattgccctggccagaacttccaacactatgttgaataggagcggtgagagagggcrtccctgtcttgtgccagttttcaaagggaatgcttccagtttttgcccattcagtatgatattggctgtgggtttgtcatagatagctcttattattttgaaatacatcccatcaatacctaatttattgagagtttttagcatgaagcgttgttgaattttgtcaaaggccttttctgcatctattgagataatcatgtggtttttgtctttggctctgtttatatgctgtattacatttattgatttgcgtatattgaaccagccttgcatcccagggatgaagcccacttgatcatggtggataagctttttgatgtgctgctggattcggtttgccagtattttattgaggatttttgcatcaatgttcattaaggatattggtctaaaattctcttttttggttgggtctctgcccggctttggtatcagaatgatgctggcctcataaaatgagttagnnnnnnnnnnnnnnnnnnnnnnnnnnnnnnnnnnnnnnnnnnnnnnnnnnnnnnnnnnnnnnnnnnnnnnnnnnnnnnnnnnnnnnnnnnnnnnnnnnnnnnnnnnnnnnnnnnnnnnnnnnnnnnnnnnnnnnnnnnnnnnnnnnnnnnnnnnnnnnnnnatccatttcttctagattttctagtttatttgcgtagaggtgtttgtagtattctctgatggtagtttgtatttctgtgggatcggtggtgatatcccctttatcattttttattgtgtctatttgattcttctctctttttttctttattagtcttgctagcagtctatcaattttgttgatcctttcagaaaaccagctcctggattcattgattttttgaagggttttttgtgtctctatttccttcagttgtgctctgattttagttatttcttgccttctgctagcttttgaatgtgtttgctcttgcttttctagttcttttaattgtgatgttaggttgtcaattttggatctttcctgctttctcttgtgggcatttagtgctataaatttccctctacacactgctttgaatgcgtcccagagattctggtatgttgtgtctttgttctcgttggtttcaaagaacatctttatttctgccttcatttcgttatgtacccagtagtcattcaggagcaggttgttcagtttccatgtagttgagcggctttgagtgagattcttaatcctgagttctagtttgattgcactgttgtctgagagatagtttgttataatttctgttcttttacatttgctgaggagtgctttacttccaactatgtggtcaattttggaataggtgtggtgtggtgctgaaaaaaatgtatattctgttgatttggggtggagagttctgtagatgtctattaggtccgcttggtgcagagctgagttcaattcctgggtatccttgttgactttctgtctcgttgatctgtctaatgttgacagtggggtgttaaagtgtctcattattaatgtgtgggagtctaagtctctttgtaggtcactcaggacttgctttatgaatctgggtgctcctgtattggttgcataaatatttaggatagttagctcctcttgttgaattgatccctttaccattatgtaatggccttctttgtcccttttgatctttgttggtttacaatctgttttatcagagactaggmttgcaacccctgcctttttttcttttccatttgcttggtagatcttcctccatccttttattttgagcctatgtgtgtctctgcatgtgagatgggtttcctgaatacagcacactgatgggtcttgactctttatccaacttgccagtctgtgtcttttaattgcagaatttagtccatttatatttaaagttaatattgttatgtgtgaatttgatcctgtcattatgatgttagctggtgattttgctcgttagttgatgcagtttcttcctagtctcaatggtctttacattttggcatgattttgcagcggctggtaccggttgttcctttccatgtttagcgcttccttcaggagctcttttagggcaggcctggtggtgacaaaatctctcagcatttgcttgtctataaagtattttatttctccttcacttatgaagcttagtttggctggatatgaaattctgggttgaaaattgaaattctttaaagaactataccaacttgttatggatgagttctccttagtcggaaccattcattgccaagggattgcagtttttctctgatagkttatttaaaattgcctcaatagtaattctttcttgcttggatttcataacattcccaggacagaagcgtgacttccctagactctcttcatcctaaatgtatcagcatggtgggtgctccagggcagaatggtgccccacactagcttcctccctgtgttggttaatcattcacttcaatatggaattataaaaatactgaggttttatgcttgtggttgttttctaagtctagcactgaaatacataagctaagtgaatagaccagcagatgtataaaatataaattgttatactgtttacactaatgctttgcattaagaaaacaaatgccaagctgcttgaagtctgcaaagaataaaaactccttattatacatttacatacacacttgcccttatccaaaatgaatccatacatagtagggcaagcagctgcctatatttcataacccactgaggtctttttaatgtgttctaagcaatgattaggaaacctgctggggttcattttggctcagctggtccacaattttgaacacctactggtggtatcaggaaaatgtgtacatgacctgtttctgcatatattaagatcttccaaattatgctgcataccctcattaataagcaaactatggatgacaccctttttgtatggtagataaaactagcattttaatttaaagataaataatatcccacacataaagaaagttcaagctcattttttggcccagtataaaggattcaacaaaagaataaactattctgaaatgctttaatgtagaagatttggaggtgtcctaattactgcgaaatatggccaatgtatggctctcgaagagttttttgtttgcctgtgaagataggcctatggaacctgtgtcaatcttggttttacaaaaaaaacatgataaaattaaagacaagggaaatagacctgggaatatacaccataggtaaagaaaaacattataaggcagaaaggaatggctgcccctaagtgacagacaagtcatggatcaattwtgggtgcaaggtaggcaactttaggtcaattcaggcaggcatagaggctcagagggatccaatccagaaagaagtgaacaatggataaagtctagaaatgtagagtacagatagcggaaagggagaactagacttcaaacaagcagaatggattatgaaagctaaggcagacattagaatggagtacagttcagaacagagggcattggaggcccaacacacctggaagaagtttcatctgacctctcaatgaatgatattttattttattttwttttattttattttattttattttattttattgagacagagtcttgctctgtctcccaggctggaatgcagtgacrcaatctcggctcactgcagcctccacctcctgggtttaaaggattctcattcctcagcctcctgagtagctgggattacaggtatgtgttaccatgcctggttttttgtttttytgtttttttttttcttttttttacttttactagagacaaggatttgccatgtgggccagggtggtcttgaacgcctgacctcaagtgatccaccctcctcagtcttccaaagtgctgggattacaggcatgagccaatgtgcccagcctctcagtgatgttttaaagggtttgtcattgattgcatctgtaagagacaaagaattggaatgagtattagcatctacactgattcctctggccatcctcccttgatggataattttgtcttgmggacacaaaggcatcatgtcctttatccatgggcatttgcacaattgcttccagagtcccacatcacaatagtgagtttgagcaagttctgaatcaaaagatcaagtaagtgtccaaactctttaaggatgtctctgagttgtctttttgcagaggtcactcaatcattgtctcctaccatgtccctaaaagcagtctttttctaggaaaaaaattagccctgcttcctggtattggaccttttctttcccctgagcatatattggctattgctgggtaggtcaccaacaaggcttaactgtattcaggacattccaagagaccttgttctgtcaagccaagggtagaactagaattcagaagaaatttgagagattcgtttggattcagcgtagctttcttgaattcctctcagtaagatatcctggggtcacttgggcaagtttctttcttctttgactttcctagaatatagcgtaatcctcttacagggagaattcttcatacaagtagagaactgttgtgtcagttgagtcctccaggaatcagacacagagagggagttaggagggccaaaggtttattggagagaaatgcttgygaaaggaaaaaagtggaagcaaaattggaaaaggggagccattggaccctgatacagacacaagaaaagtctttgctagcccagtagggagcttcaggacaaaaagtgcctattagaggagtcccacattcaccggaaatagctagacccttgtactacagttttgctatcattcactggggtctccctgaaaggagcatgaccccagtttaaaagcgaggcacacctaaaggaggaagcagttagaggcagtcagctcaccacactcctgcagctgggccagagtctgttcctgaaggtagatccgagtggttcatgtctgtgtctgttgcagttgcctgcttctgcatgtatttttcttagacgttttcagaacttagttactttagcatatctactcatcagttctcgtgaaaagttatgcgactcctcaacattgcagaaagttaaccctttaaattgcagagccccctctaccatgcagggtctgagccctgcttccatttctttgatgcaacatgggattcctggaatagagacaaggtatttacatattaaaatagcaacagtgctacagtgcccctgagaggctcagtgtctagaatagcacatgaaactgtgggcagaaggtgttcattgatctgtttatttgggcaggtacctctcaaacttcattaccatggccaggtgaggccgtggatttcctgttgggattagccggcagaagcaagataattctatgaaatctgaatctgattccatagggacaaattgtggcagaggagatctgaaatttgaacagctttcagggctgatctctacaattaacactgccatttgagagtaaagaagtgagctggtggagaggatctgagagtcctcacagagaattaaaatagtgcctgaaagaacgctggcagtcaggaattaactaaacagtgagtagtgtatggcaattcttgtccatttgtaaaaaaaaaaaaaaaaaaaaaaagaaagctttagcgactaagtggaatggggagcattgacactaagaatgtcagaggaatggtacactagggaaattttgtctgaaaggaagaaaaaaacatcattaagttatgttcaccagaaatgatatttaaaggaacaaaacaggaatatagttccccttagctgataaaaatatggacagcatctcccttcccctcaaggtcccagggactaaagactgagagttgaggcagggtcagggtcagaggtacaaactctggaaaagccctcaatatattaaaggttcagacagaaaggatcatggtcagcctgggtcctcaggtgggttctcgtggacttctaggccacagtaggagacagttctctccaagtattttagctcactgatrgagagcatcaaaagactgttttcaaactcagttggctcctggagcaagagctgctaatatcctgtatctccagcttattttggctccatggaagaggagatgcaaatgttttgtggttcaygatggaaagctggtatgcaattagaaattcttcattctttcattcaacatggtatttattgtctttcatgtaccaggctctttgctaggataaaagagtaaaatacatcccctaaaagactaatagtctagtagaaagaaattgattatgraacagagaagatgactataaaacactgtgataaatgcagtaataaagaaacattataggagcactaaagaggcagtcatttactaatccatcctatgctgaagtgagatggaaggatttgtcatggagggctgcgttgaagggtgttattcaagggacaaaaaatgaagggcattccaggtagaaagagaaaaataagaaaaaacttgaaatgagaaacagaatagagaaggctatgtgcttggggaggagaggacacacaggtgggtctatgtcatcttctatttaaggcacaaggaagtagccacacacacacacacacacacacacaggcacacatgtacacattccaggtatatacagttacaacattttataatcacattatgtgtttgttgtatgcatttgtctcccctagattgtaaagtattttgctttatgtttttaaagaacagggatagcatattacatatctctaaatctgtattatccartatagtacctaaaacagttatctattatgttatcctggacccagtatactgtactctcaattttcctccaagtacatagaaataagaaagtcagtgtcaatttgtgtggtgtaggctctatcaattcaacaatactgttgaatgcctactatgtgtcaggttctgcactacatgctctgaaataagctgaaatgatagaacactttcaggatgtcttgtcttttgtgacacttaatatcagatgtccattttattgtgtgcctggtttgcatttccttgcagactctagtttcattcatcttagtgttcagcacggaaaatttgtagtgcctcatggtcaataaatatttgccaaaagggtagaacccacattacctacaatgccactttctttcatttttctatttatatttgagtgcctttagaattatttttagaataatagatgaaatttatctatattagaaataatttacctatattagcatgaacacacttaagtatagagtttgatgtgttttggcaaatgtctatacccgattataccacattcaaaatatggaacgtttcagaggtaatcactgctaacaggttacagcataaatgcatagtctgtttttcagacctctatataaatatatgtacatatttatattttaaaaacaggattaggctatctgtgtgttattctgtgtcttgcttttgttcacttaatatgttttggatatctttccatgtcagtttacaaagatttatttttaatggctgcatagtatttcattgtatggattatagtacttttcacaaatcttcccatattgacatttattcttttttttcactactgcaaacaatgctgtagtgaatggcagacatctttgtacacatattttgaatgcatgtggatttaattaggctaggtatttggaattggaatttaaaacttataagatgagctttacatttttatacatattaccacattgttcttaaaaaggagttattaatttactttcctattgagagcctatgagaacgcctgtttctttgcaacctcagcaaagagggatattatcagtctttacattttcggcaaatcatgataggtgatcatgtttattcttttgtttttctaattactagcgagattcgatgtcttttcatatttgctggtcatttgtatattttcttattgtggaatatagacaacatacatgaaacatatatgtatgcatttataaacagatacctacacacacacatatatattttttaacaactcataatgtgcacaccatgtgaccaccaggtcaagaaatagaacatctccaacacctcaaaagctccctatatgtcccaccctaacacaaccctctctgtccactttaacaccatccctactctttgctttgcttttcttcgtagttttatcacccatatatatgtctctaaagaccatatttactttctatttaaggaatttatatgaatcaaattatattgtatacttttgagactggtttcttttgctaagccttatgagattaatccttatcattgtatatagctctagtgtgtttattccattgtatgactatattaccatttatttttcattttactcttgatggacaatttggattttttccactttggggctatttcaaacagtgctactatggatattttgaacatgtattctggagtttgcatctttaaaaggacatatacgtaagagtggaacctagatcatgtgaaactgtttcccaaagactcttgtactgatttacattctccccagggtgtattgactttcccccaaccccccaatctggtagatagataatggcatcacattgtggtttaaatgagcattgtccttatatggaaaaaatgtgaaaggtgttcataaggctgatcacatttcataaattttttggccatttggatttcatcttgaatgaaatccaatgaagtatgctatgttgaacgaagtatgttaaagttttgcccatttttctcattaattttcaggtggtcctttatatattctggatactactcctttatgaattgtgcttcagaatcttgtcccactttgtgccttgtcttttcacaatgtttttaaatatattaacattttaattttaatatcttcaaatatatcaatagttttcctttaaagaaaatggaacatttccattaccctcaaaaattttcttatacttatttccacttaattgctcctccagcctaattctcagtctcagcaaccactgctctgctttccatactcatggtttttcctcttacagaattttaataaatgtatgcatataatgtctacttctgtaacttagcatcattttgttttattaattccaagttgtggcatgattcattagtttctttttgttgttgaatcatatttcattgcgtggatatgcagcaattttgtttattcaactcacatattgatgaatattggcattatgtcaaatttgggcctattttgaaaaagtttctgtgagtattcatgtgcaagttttaatgtagaaatatgtttccatctcacttgtatatataattaagagttgaatttctgggttaattagtaagtccatgtctacctttttaggaaactgcacaactaatttccaaagtggttggaccacctttagaatacttaagtcagaaaaacagatgcaagaaggacacatgctaaaaaatagttaataaaaacatctccatttcaacacatagtctttgcattcactaatattataattgtgcctggaacagttgactgcctgtcctgttttattgacatagaaggataatacatcacgtttgctcattatgttgcagctacttctagtcttacaggaataagtgaagtagaagccttcgatagttctagtttacaattgatggctgaatttcacttcagggagcaattttgctaaagaagatgaaggtttaggacatgataatgggaaagaaaattaagaaggtgaaattggtactcagattgatcttctgggccccagttctttccatcagaaacatggatgtaatgaaaattctagccacctcttggcatgtcatatgaattaagacttaagagttgcttagtgaaaaacattttataactggtaaaattttgcagtggatttattgaaatgccagattctaagaaagccattttgaaatgaattgtacagagtgaaaattactaggtaaatgggagagaaatgtttcttcaagtcaaaatttcacttgtaatttagcttatcaggaaattctcagtctcattctgtagtgcttattcctttgcagaggacatgaaaccagtgagatttgatgccctaagtaattggtagaaatacctgctctacaatgaagaggtcatcttcagggtctcaaaagcagcaggatgggtcatttatagaactcccttaatgtgtaactaaatacagagtagttactagaattaaaaattattatcttgtgtcccagattagaaattaagctttaaaaacaaccagttttgcataatggacattactgcagcaagtaatctgcattcctcagcattaccttttctagttgtgttgtcaccgttgtttgattttcataggaatctattccmkwtaagattagttgcaggcagacactgggctgtacctcatcaaaattttcaaataggccaaatttgcctctagcttgcttttatcaaaactcttctcagcacttcacaagtctgctctggtaccttcactttatgtagtatcctcaagaccaccatttgctccctagatctgtcactcattctcttaggggcttcaagtgtctttctgcttataatgccatgcacctctgtcacaggaaatcattttgttgcttcagagctttctttggtgatcacattgaatagcaaaagggttaacaggtattgaagaacatgctmacacacacacacacacacacacacacacacacaagacaagcaactactgtgacagagattgcaaatcatgttcagggagaagcattaatgcctttagaaagcaccaataaagcctttgtgatctacgtagacgtttttgtgtattagacatttttaagattttgttaagctattctgtttttcttaattatccatcactttttcacagaattaccagtgatttgtaaagtagtcttcctacatttcatgcttttggacattgtcataaaatatagctgggtttttcttaaatctagacatagtttatattttgatggatatataaggaaataatgtgaaaatatgccaagttgccaagttttcactcatttctcattcattgacacaacatatattttttagtgcccagaaatagagcagtcaataattgttttttgttttccttcttcctcttcttcttctccttgtatgtattggtaatggtaaactcttgatttgtctgagagataagagtacttttgtatatttcagatcctgaagattttgggaagaattagaaattgtctaaaacttatttatttcaataagattctaaaaactggcttgttacaaaaggcaaagccatctcatgctatcactagaaaatgagaaggtcaagatgtagaaacactattaattgcttttagatcttgaacattcatatcaaaattttgaagaaaccaggaaaatataaatagttacagtctattcgtgaattccctgaagtatatagattcatttcatgatgttattgacctcaccacatttctagttgtattagaatattctctattatacctgtcaaacaaaacattgcaatttacagaacaatcattaatttttatggtaattttggttagaagttgtttttaaaattctcaggtagccaaactgtacttacccttggctgtgatgattagtcagcagctggcttgcctaagtatgaagatgagaaaaatatatgtgaacaccgtcaactttactcatggagggtcaaatttactcatggagggtcaaattatggtatctcaaaatagagacagatgattcaagtaaacagtgctaaccaaaaaaaaccatgtgtttctaagaatttgaaaaactttgaacaaattccagatcattaagcaatgggtaagaggcagtcatttaaagcagtcacctagtgaaaatcaggaaaaatgtctgacagatgttcagagtaaattattatggcatgggggtcaatagtattgaaagccacttggaagcctatatcagattattagtgtttactctattggaaccaaataatatttcaaatttgtttcagtaattcttatcaggacacattccatgtattatgccattcaagtgatctttaaattattgtcaaagtctaccttaaagagagcttccacaaaggacatgcaattcatatcatctagagttactgtcatttctaggctaagtcccatggaaattcataacttagaaatgaaagtcacaaagatgcaactgccttcataataccaatgcagtggttataaatatttcatgagcattgcatgggcaggggcagatctccattttcatgagttagaatttgtacagctaagtctccacattttactattcataatgcacactatgccctgtagagcattccatatagcacttttttaatatttatgtttaatgaagaaattactgttctaaaaagagaataagccaagccaaagacttctttttaaaagtattaagttttgcttaatagagatgataacaatcaacagaaattacctcattgcagtatcttagcacaaaaatgcataactttttgagtaatacaggatgatggatcaagacacattaaacctaagtgagaaggttctttctaaaggttataacattacaaatctcatcttaaaggaattcgaaaggttaaaatgcaaagagcaactttcttacatacaaaaacattaattacaaatgatatgcttgcctgctatttcatagtttaaatatatgactgtatttctctgggtttttcttttattcaaaaacattttaacttgctaagataatattaccaagttcgataatgaattgctattgcatactttaaggtaatttatcaaagcacattatcagtacctgtcagaataaattttgcactaaaagtaatgaaaaaaaggactattgtatgtgttgaaatcaaagaacattactgtactgtagctaagttattcaatggagaggataggtgtttgccctctaaatgatacttgccccatgagaaaataagagcctggaaaatcacagaaaataggcacatggaaatgtctatttcttgctttttaaaatgagcatttgatattttatttcatttttgtcattttgatcaattctgtcaagtttgtgagtgctgaaaatgctgcacagatcttggtaacatttacaaaagtaaattaaagttactgatcagctcatgtataatacaaggctgaattattccatatttgcatatactatatatcacatgtagattgatgatgaagtcatagattttattttgaatacacatcaagactaagtctaataatgaaaacaagctttagatttaatatcattcacttgagtcagcagttttaaatattttttattttgcttaaaccaatgagatcactagaaattttgtaatgtttcttgtacttaacatcaaaagtttgtgtttcattcctgataatatttaactgaaagtgggaaacactgtcttccattttgttctttgaaattttattttctaaaggctctgttgaggaatttaacctttatgtgatgaatttgcagttcacttgaagtgtgttaaccttagttccctaatgagtctaggtgtaatactgaggaggaatttgagaaatatatcatgtagctcattgtcaagttggatttgtcttgcacgtctccagctttgctgttgttccagtacacattttgatcacaattctttaattttgttctatatttaaccgacctatttgaacaggatccagagctggtgcggaacatctgccgctgggttaggcaagctgttcagattcctttttttgccaagctgaccccaaatgtcactgatattgtgagcatcgcaagagctgcaaaggaaggtaagaacttgacttgaatcagttgcccgctattgtaaatattggcccacattatgtagccatactcaagtatgtcttttcctacaaacatgtgcatattttttgtctcaattttaaaagtttccagttgrgcacttgatcccacaaacacaggagatttacacctggactcatgctagcaaattgaccatgaattttgatctggaaacacaagatcctttatagtttttcctaataaacacttatttcacacattataagaacaaaaaacacagtcacagcaaacccgtccaaaataaatgacctcataatgtaacaattcaatatattaaactttaatgagtaaaaaagaaaaaaagaaaattcaatttgcacaatgtgaaatttcttatgagttctcttcatattttgtagggcctagctgacttccttaaacacatgctcaataaatatctgttgaatacaaaaatcatgcgtgcttgtgttccatcccagggaaattgcaccctgacttgcaaagacattgtaaattacctggaaaataacaccaaatacaaaacatttggtaacaacaagtctgtataatatttgagaaagtaaagttgtggtaattaaaacttctttaatgtttaaaattttaaacataaatgtaggagttaaattagtgaagaactttgaggagaagacatgttctcaagataaaatagaatgcatttttctgggatgtgagggtttgaatgggttttaactatcgtgtcttataagagctgcatgaaaatgttgatgtgtcttgcataggtggtgccaatggcrktacagccaccaacactgtctcaggtctgatgggattaaaatctgatggcacaccttggccagcagtggggattgcaaagcgaactacatatggaggagtgtctggtaggtgttgcccacttmttgcattgtgctttcttggaggttgctgaaaaatcagaaggtcatgttgcaagagttttgtgccctttatgatcccaaattmttataactcatagctgatcaatattcctaatagttatgacagaacggattgaatatgaaagctcaagtgacagcacaggatgagagaatatcaagataaggtcttgcacaaattctattctcttgtggtccatgctttcctaagaatttctcatcgtctctcagttcttttgccacttactagtaagggttaatatgagggccctctgagagaaaaatataagtaccctcattataatatctttttcatggtctggactagttttcattctttctagaatttagacatctaccttcttcaaaaaccttgtcccaactgtcccaaacaagccattaaaacactgaattaagcatcagctgacaagacatttgcagacctcacacctttgcacgctctttctcatcagcatacgcttgaatttgaaaaagaaagagaggttttaatctcaaggtcctgttcagtatctttaccctgtgcactctgtgactgtgacaacatgaacttggtcttgcaaagacaatgctgtaaggttcttgactgtactggtttgggattagtctccttggtgatagagaaagtggtaaatatacataacataacagtgccccactgttcaagaaaagcattgctgaatcagaccaaaatgtgcttttggaagaggctggacagacacaaataaagctctatccatgctgaggtattcagttttgagagtatgaagtatgcctgtgagccatgaagaacaaaaacggttatattctgcttttaattgaatgccattcccacaatgtcagaaagaagaaggctgacgaggagcacctgctcaggctccagacacagctcgcttttatcaggagctatcaaacagggccttaaatattattgtaatgcagaataacgtggaccgcgttagcatgtgccacagaaagagagtcaagagactccagagttgggctgtaacatgcactatgttttctgtcagcccatttcaatttttccagcctgccatgttgacagcaagagaataaaggaggtcacagagggtgctgaacattaaaaattaataaaagaactattgcagtagtattttatataagtaacaccattcatgttttctcatttaagctgcaatgtctgaatattctcccatactataactcagtctaataaaactacaaaattacagcattagaaaaagtcttttgtgttgcagtctttaagcatacacacactggaaattatagcagtacctgaaaacaagctcagtcatacctcagggcctgttagcatttccataaaactctatttctaagatttataaattcatatataaatattcacttgggctataagcttaggtaagcctgggtagaactttcattttaaacaacaaaaaatccctaacattttaaaggacttgtacctcatttctaataggttctatattaagtttcttcacattaaacaatctgttttgaaaatagcctttctccacattgacagaattaatatagttttcctcctttaaagtaatgcttgcttaagtttaaaagtaatagaatctgaaaagcagtttaaataggcaatgataatatattttaggacagagcaagttctataacagagtaccttcagtatgagttatagcaaaacttagcctagcaaaattgtgttaaataataatggtttcaaattttacgagagttgtatcaaatatggttgtcaggacttcaaatgctgccttaatactgaaagttacacaaaataagctagatatttttataagatttttaaaaaatttaccatagcacagtgctaatatctgctcaagtgttgtctcagagcatggcaatgtctgctttcagagacgctgcatgaatcacagatttttaaaaagtgaaaactaaatagagtttaattttggatagccacctgaacacaatacatacttttcattgccagtgaaggatattttcccctttcaatatattctttagctgtttattcaattgttattatttttctcagaataagatttctgctctttgaaatgaagattatgttttgtttaaatacggaaatagtgaggcacctggagtagtatacctgctgtagaaaactgggcacatttcaggaatgttcttctagagaaaatgcattagctaataagggacagtgacttgcattgggaaaacgggatctcagctaaggaatgtcagtggaattatttccgatataagtagcctggatttgagagcaatgtctttcaaaggttggttcccaactcatgagtatactatgcaatcaagtttagtgaactgtaatcaacattttaaataatgaaatagaataagaaatgtcagaatgctttgcatatagttgggataagcattgtttggccaaacttctttttcagttatacacataatatacacttatatatgccataatgtaaaacgcactttttacttagttaacttcaaaatattttgagagttactgtttcagagggaggtctcttttgttaaataaaagaagtcaataagactatagaaagataacttctacctgctgtagcttaaaagttacatcaagagagcaaattaggacctcactccaaggtcttatcctcagctttgctattttagaagcactttttctaattcatctacagatgattaaactctggggggcggtgcttaaatatatgaaacaaactcataataaagtgatttataaacttgaatttcaattatgggagaaatacatcatagtattgctccattaaaaagttgaattatataccagatgatttcatagtgagaacagtataaaaggaaatcttgtttggtatccaaaaggaatattttttaycaaacaaggatggctgattcagctctccaccatataagtactctgtctaaaccattgattctaaataattctgtacctttctttggacagtatagatgtaacactaagttgttacgacctttcctttttctagaatccatgcagaaaacttctgttgcatcaaacagcagttaattcatgtatcatcacacagctgaatagtttattgggtttggagagaggaaaggaagaagaaawtctttgacttatttgattggaaaaaaaccctaatctcagtaacaattataaactccatccttractgcgtgacccattatttttcccagtttaatttctttttttcttgttttagtttgaaattttgacctttttttctgacttcattcccaaataatgagggcatcttaagatagcccccaaatyagtgattactatcacctatataaatggtgttatccagctgtggtgtgacattttcacatgaaatcctccctgtgggtaagattctttcagagctggttaagaatcagtcctgcatggcataagctaaagatgtctttcttgcagctgacttcatgaggataacctttattcatttacaggtgcttcgggagaaacagtattcaagcatttttcaatggggtgaattcatttgaagttttcgttgttgttccttgtgtttttaacttttttttattaatggggaatgaatttcattgtcctgtatatattttgtgtgttgcacttacaaacacatgcacattcacatatataggaaagagtgcagaaggcacttaaattgaaataatgatagacactttaggctcaatataatttacttcccacaagcttgaaaaacttattattttaaattattttatttgccaaatttgttctattttcaccaaaggaaaggaaattcttgttcttaacttcaaattttgaatgcttgtttgaagttattcattatgtatsaacttatacaattacaacaatagaacacatttttttcagtattaagacataaactttattattgatttctgaataattcataaaagatggcwtttaagattttctgtttcagctcaaagttactcctctcatagaggttattacagaatccagtaaatsactgtgtatttctaaataagttataatggaatattccatgaatgttcttagagtctacaagtgaataatgaatgatttgaaatctagctgtgtgagatattggacactggcttgtatggttactagcttcctaaaggtgttttcattgtaaatccaacataggaaatactaataaaagaaggtacaagttagaaatttagctagtaatttgtagatctgcgtcagtgtagggccagaagtgagtacaaagtgtataatttagaaaacttgcacaaatgtgaatcaatatagtagcttagaaagggattttaggcatcgacttcacatcgcatagtttatgtgtttttaagatagttacttaggcgtgaattgttagaatgcaataataacttggcagcatacactgtgctactgggcattacgtaaacacaaatccagtgtaacccactctaatcatacacttattttgttgtatttattagtgaatatttgtgtaaaatcagggagatggcaaaacaaaacagattacaaactcagaagttttagttacatttttctttaaataactattttcacgcatgccagcaactgaagattttggcaggattgctttaagttcttacaccacacattacaattccatcataaaaaacagtgttagtatttttttaattgggaagttgtttttaatgtgctggatttttttatgtgtcaatcacatgattatcgatgcataaattgcttttagaaaaacatgcctattatctgtcatcaaatttaagctatctattgtaatcatcttgatcgataagagcttaggctttaacattgaagatctaaaataacctgatagataaagatagaatttaaatggataaaaatgtagtaattcatgcaaaaagaataattaaaaggagagccttccattttatactcacttttttcctttttttgtatggacaaaagtaatgcaaaaaatctggcctgttattcacctatgtaaaaacattcttaacttattacaagtttaactgatcaaactattaaagaacttgttatacaaatatgtatgtactatatttgcagaacagtcaaaagtaggcatttcaaatacagatgctagattacaattttattataaattatcactttggttgagagaggcttaccattagaaatattctcatttaaataatgctcatttgaatatattcatgtacagattgacaaagaatcccctctttcattatgttgcctttctcagagcctcagtatctcactgtttagccatcgttggtctgtgcaggagaccagggccctaataatagatttttgacagtgagctcgcctgctacctgccctacacaaatcttcactgttcatgtttgcttcatggcaacaaagcagacagaaggaaaatgccaagtgctgagtctgaggtacagccttgccttggcttgacatttcagcagaatagcagtttatgagatgcataatttttcatctgggactcagctgccatattcatagatgcttacagctcatggacagactggagcaagggcaaaggtttaaagcatagatcaaggtctacrtcctttccttaggtattttaagataactattgtcccgcagataaatggtagaaccaaatagtatttaagagccaacaaattcatggktacctggatattatatatattttcctttggttaaaaattaggaaaataaattaatgtctgttccagttcctaagaaaatatttgatagactttgtaaaccaaagaactctgacaagcatattaagaaaacttacctttgcagcagtggtaatgaattattaaatttctttcctctgtgtgtgttttttcataaagaatgatttcaagcttgaaattaatcaaaaaatgttctattatgaaagtaaaactagagagtattgtgtcactgtttgagcttgaatttaaatattcacagattcatgcatatctactgtactaaaaaatcagtgtaggtacacgtcagtggctgtttaatttagaactacacatctctgtaagcttcagaaacagttcaccatgtcacagtctcatacagaacaatggtacagtacattggattaattaaggaagccttgcagagaactgagttctcagtatgtcaagatttcagttttatgttaaatattttctaaaggccagacccttaaatctcaggggctgtaccaagcagtgagctgtgaatttaaccataggctaactgctaatgataaggaaaagagtcctagttgaggcagctgtaatacagtcattggattaggctatcaatcactcgactccctaaggaaaagggggagaagaccaaacagtgaaaagggaaattaggaaaggagagcatgactggaatgagattcctcaccatctctatccattcgtcgtcctaaatccctaagcatcagaccaaactctctagcattactctgactatacagccagcatatttattccttaaatctagaggactatcaaaatgtcattgcctctccgtagttgaagatcttgaaacctgctagaagcaaatgtctgattacataagaagaaatcagattcttaatttatgggatttaagatttayatttatgagtcttttatggatcaggattcatctatgttagtaaagaaaaatatttttatttaacttgtaaactgtagccaatttttgcatatcaacatcctcttggtgaggtgagattccagtagatcagtggttctcagactttagcatgcatcagaaactggaaggcttgttgtgacacagattgctggacctcttctccagagtttctgatacataaggcttggagggccttatgtatcagaatgtacactgctaacaagttccagatgatgcttttgctaccgatctgggaaccacactttgagaacagtagatgaagaaagattagtatcatcgagcattttagttagaatatcttatttccaaaataatgtcaaacgctttaagcaatggtaaaattagaggggtatagtatttgataaataaataagaatctctgcccacagttaagtatctgaaacaaattatagtaaatgaagtcagaattcttagaaaaagtggaacacagtctttgaggtctcagagtagggaataacattcactcttttaagattaaatgttgagtggaaaccattgtttatgcaaagagaatttattatgagtgccattgaagacaatttatggatatcactagtcctttgaaaaggaaacaggtgtgagttaggcaaggataaaattacgttctcgattgtgaaatgttatgtttttcttcttaactttgtatagacactagcatattgagaaataacagctctcttctaggacagtgcttacatgcaaatttacctagttatgttctcaaacccttaaagtgtgggaaacagcagtgctggtagcttactgctcttctctcttaatttactgctttcttgccatccccagacaatgctatccttttattagtggaagggaggagataatcaatgatttggagatatgctatttcaatgcagtgtccctgctgttagcactgttacactatgcactgagctcttccaaagtcatctttatagactgttcatgatattattcatcaatcctggaagctgcttgaaaccttctctgacagacaaatgtcctgatgtgcattcccaaaaatttagtaccatgtgaatggctggtagaaaacacctcaaattccaagaggtccttaagtgtggggcatagtaaacctttgagacacatacatggtgtctgatacttgaaggtggagactgccagggttatacaggagtgatgataagagttgttatcagaatagagaagagaaaggaatttggtcaggccagcttaactttacttgctatgcttttggagagtccaacgtttcaattcaattcagtgaaaaaatgttggattggaaagtgtactgaagatttttatatacagtacattatttctgtggttttcaaattgttatgcttacaaataccctacaattaaaacgttataaaccatatactcctcactcattttagttgacctgagaattttagcagtaagttcaagtgctagcaaaagacataatcccccatgttttgcaaatatgaattctttaaatgaaattgtttcagcattttttaaataaacctactaggaataaataacaccactgtgcttttttatatttatcatcacccatttaaaaattcataaacatgctctaacaaatagtgggaagttttgcctcttttttcytccttaaactcatattttaaaacaatttctccatcaaattttatcctatttttatgttttttttaaaatttgaacatcttaaggatcctctttggaagtactctttaacaaaatatatgtctataaatggacttttacattttaaaaattcctagattcagtctttaaatgataaatgatttcctgtattgttagaatttataatttatactttatcaaaacagcatgaatatatcataaatattgacaattattcaaaataaaagtgaattttattgaagattcatttattaatgagaaacatatggctttttaaataatttgatcatgtatctatcgagacatattattcttaaatagagtttatcatcagttttattcttttttttaggtgtagacrttggaaatccttgtttatctaaataaataaactggaaggagtttattatagtcattttacctaaatatttggacaccttctccattgtaagcctaaaattagttagcgatcttcaccaaaagtgattaagcaacttgatgacttgctctttctattttattgaaatcagaaacctgggttttacctgatttgcaagaatttttgtcactcaatcattagaatcaatcattttctcaaaaccaacaccaatattttgaattattttgtttggtayccccaaatttttatattctatgtatatgttattgtaatatttgagatcaatgaaaaatatgctttttttcgaaagtaagggaaagactgttgaaacagaggagttgagacagaagaaccagcgggatgccttgattgcattgtttctcaggcatacaaaatttaagacatcatacatatggaaattgggaaactagaaaatgattcccttaaaatcagtttacttgtgggatatatagatttctgtgtaaagtgtaactctctgtgtgtatactctgtgagaaaaccactaacatatttcacttaatcttcacacaactttatgacaactaagcaataccttggttttccttttaatataaacttaactatgtctcttacagtagcactggcaattttaagaaaattatcaggctgagagcgatggctcacacatggaatcccagcacttcgggaagctgcggcgggcagattgcttgagcccaggagtttgagactagcctgagcaacatggtgaaaccctgtctctaccaaaaacacaaaacttagcctggcatggtgacatgcgcctgtagtcccrgctactcctgaggctgaggtgggaggagcgattcagtctgggaggtcgatgctgcagtgagccaagattgcgcccatgcactccagcctgggcaaaagagtgagaccctataaaaaaaaaaagttatttatagatttataaatctcagtatttaagttaatatgtgctctttttggtatttggaaatttatgttgacagacttttgtattgctagaaaattgatcaacatttctgcattcctcagcagcactggctattcaagcaatgcatagcagctgtgtgggaatatcgaggccttggaataatacaatctttatgtgcccagaactttattgaacactttgtatgcattcttatttaaataaccctgggaggtggataccattgggcccattctgcagacttagagactcaagtctagatacttaagaaacttgccagagtttacataaccaggayatgtcatagtctgggttcatactcagatctttctccaaaatgaacttttaggcatttttattaatatcagagattaacatctgtcatatctgtctaaatatagtatactcattaaattctaatagtctacaagtgtcacttactaatctaacatttattctctctggttttgaaaagctgccagtgtactcttctgtgacccttgttaaaattatgggccgatattacctgtttcactcagtctctatcttggaaaattgagtcagataggtaaattagggaaacattcttggattcgtttcaaggaacaaaaatgagaggcatcattcaggcatttttcttgaagtgtaagcatgcagctagaaatgtagctgccatcaatatagtaataaaaaactttatttcttactgccttggatgaaccgtctgagcactcagtctaactgtgatgccaagagcaactttggatgtccttcttaatttcttctttgtaatcctgagtaagttacaaatacctgtgttcctgcatatgtctcaccttcttttcgaacagattcatctttttccccaaagcaacatcatctcttttataatttcaactgagcttgcaaaagcctagtaagtaattcagatatgctaccttttcattagatgaggaaaaagagaaggacattttgaagacggtgaggtagggaagaaattgagatttaaaaaacctatactaagtcctttctgaagtgaaaaaggagctcacactctttctcatttctcctggtttacaacaaaacgatatataatataaataaacaaaaataaacaagaaggttaaactgtcttagcacatatctgtcatgatatggtgtgagaaatgttaattagtgtgtattaatttgaaaagaagtgtatggaacagaaaccatgagtccaaggaatgttcctaattagtctcagttcatttagcacattcggttgatgactgacctgtttggattataaacatcttaaaagcaagagccgttgtttctttcatatcgactcctccagaatttatgaaagtttcagggacatagtagacatgtaagaaaccccattttattcttaatattcagttgcatacaagcaggagcatttagtgattggactggttttttttgtttgtgacagagtgtcactcagtcacccaagctggagttcagtggtgtgatctctgctcactgcaacctccacctcccgggttcgagcgattctcatgcctcagcttcccragtagctgggattacagactcacaccaccatgctggctaattgctaatttttgtatttttagtagagatagggttttgccatgttggccagtctggtctcaaactcctgacctcaggtgatccatctgcctcagccccacaaagtgctgagattacaggcatgagccaccacacccggcctggactgacttttaatctttgccagccatcttgattttgctgttgagctttggaaacttagtaagaaattctagctaatagaatataggccatcttactatgtgttagatgtcagatgctgggagcttttcacatgttatgctatttaatcagtacaacaaaccaatcaggtgggcacaattaggggcctgcttttttgaaatataaactgagacacagaaaggtcaagtaaattctataacatcacacagctggtatccaggtatatgggaatctctactgtctgactcttcatactgtacacttaagcactgtgcttcagctgccccttctccattgctcattctgtattaatttattccattaagcttttgtaatgtcttaacatattgtaggatgaaaatatatagtcacttttgtacttgacaaaaaaattgactgaaaacaatctataaatataacactgagattaatcactgttttaaaaaaattcacagtaatgacaggtcacaattacactgtaagtggtctagtaaacctctccatattcctattaacctctgtgcttcatgcatttctcatattaatatactgagaaataacacaaagaaacatatgtacttttcaaggcagatgccaaaggtttaatggatcaaattatttctatgttggatttttattcaatagttccaaacatttggtcttttttttagtttactccaatactaaaatgaaattatgaatttctctattaagtagttaaaatgaaaacataatagaaatgaattaggccaacaacaatgccttgtgttgttgaaatatctttttaccctagtgttcccagatccccaaacccttgttttaatagcaagcttatactagatgagggtgtggtaatattttgtagaaatagtgtgtgtgtgtgtgtgtgtgtgtgctcgcgcgtgtgcgygcgcgtgcacgcatgtgtgtttgtgtctgggtgtttgttccttgtacattatttgaaatcactctcaaagacctttctttagtttcaccctttttatataggcttgtgatatggtttggccrtgtccccacccaaatctcatcttgaactgtagttctcataatccccacatgtcatgggagggacccaatggcaggtaattgaatcatgggggcagttacctctatgctgttctcatgatagtgagtgagttctcacaatatctgatggttttataaggggcttttcccccacttcactctgcgcttctccttgctgccaacacgtgaagaaggacatgtttgcttcccgttctgacatgattgtaagtttcctgaggtctccccagccctgcagaactgtgagtgaattaaatctctttcttttatacattacccagtctcgggtatgcctttaatagcagcatgagaacagaccaatgtagcttataatacagcagaggtcactgaagtctttagtatgataatagtcacctgaggagcttttcaaatacacagattcttggaattagagcatctaattcagtagatgtttgttaaggccaagcatatatattttcaattagcatctcagaggattctgatacatgcaactttagtccccactttgaaaggaaaaaaaataaaacctaatgtggggtataacgcattataattttgtgtaaaaaaaatttaaaatgtttgttttaaggagaatgaaatgaaaaatatatatctttggtaggttaaatttagtcagtgatcattctagtactagtaattcaaatataggaatttagggttttttttagggtttattttattgtattttattatactttaagttttagggtacatgtgcacaatgtgcagtttagctacatatgtatacatgtgccatgctggtgtgctgcacccattaactcatcatttagcattaggtatatctcctaatgctatccctccccactccccccaccccacaacagtccccagagtgtgatgttcccattcctgtgtccatgtgttctcattgttcaattcccacctatgagtgagaaaatgcggtgtttggttttttgtccttgcaatagtttactgagaatgatgatttccaatttcatccatttccttacaaaggacatgaactcatcattttttatggctgcatagtattccatkgtgtatatgtgccacattttcttaatccagtctatcattgttggacatttgggttggttccaagtctttgctattgtgaatagtgccacaataaacatacgtgtgcatgtgtctttatagcagcatgatttatagtcctttgggtatatacccagtaatgggatggctgggtcaaatggtatttctagttctagatccctgaggaatcgccacactgacttccataatggttgaactagtttacagtcccaccaacagtgtaaaagtgttcttatttctccacatcctctccagcacctgttgtttcctgactttttaatgattgccattctaactggtgtgagatggtatatcattgtggttttgatttgcatttctctgatggccagtgatgatgagcattttttcatttgtctgatggctgcataaatgtcttcttttgagaagtgtctgttcatrtccttcgcccactttttgatggggttgtttggttttttcttgtaaatttgtttgagttcattgtagattctggatattagccctttgtcagatgagtaggttgtgaaaattttctcccattttgtaggttgcctgttcactctgatggtagtttcttttgctgtgcagaagctctttagtttaattagatcccatttgttaactctggcttttgttgccattgcttttggtgttttagacatgaagtccttgcccatgcctatgtcctgaatggtaatgcctaggttttcttctagggtttttatggttttaggtctaacgtttaagtctttaatctatcttgaattaatttttgtataaggtgtaaggaagggatccagtttcagctttctacatatggctagccagttttcccagaaccatttattaaatagggaatcctttccctatttcttgtttttgtcaggtttctcaaagatcagatagttktagatatgcggtgttatttctgagggctctgttctgttccattgatctatatctctgttttggtaccagtaccatgctgttttggttactgtagccttgtagtatagtttgaagtcaggtagcgtgatgcctccagctttgttgttttggcttaggattgacttggcgatgtgggctctcttttggttccatatgaactttaaagtagttttttccaattctgtgaagaaagtcattggtagcttgatggggatggcattgaatctgtaaattaccttgggcagtatggccattttcacgatattgattcttcctacccatgagcatggaatgttcttccacttgtatcctctttaatttccttgagcagtggtttgtagttctccttgaagaggtccttcacgtcccttgtaagttgggtccctaggtattttattctctttgaagcaattgtgaatggtagttcactcatgatttggctctctgtctgttattggtgtataagaatgcttgtgatttgatttttgtacattgattttgtatcctgagactttgctgaagttgcttatcagcttaaggagattttgggctgagacaatggggttttctagatatacagtcatgtcatctgcaaacagggacaatttgacttcctcttttcctaattgaataccctttatttccttctcctgcctaattgccctggccagaacttccaacactatgttgaataggagtggtgagagagggcatcactgtcttgtgccagttttcaaagggaatgcttccagtttttgcccattcagtatgatattggctgtgggttagtcatagatagctcttatgattttgagatacgtcccatcaatacctaatttattgagagtttttagcatgaagggttgttaaattttgtcaaaggccttttctgcatctattgagataatcatgtggtttttgtctttggttctgtttatatgctggattacatttattgatttgcgtatgttgaaccagccttgcatcccagggatgaagcccacttgatcatggtggataagctttttgatgtgctgctggattcgttttgccagtattttattgaggatttttgcatcaatgttcatcaaggatattggtctaaaattctctttttcgattgtgtctctgcccggctttggtatcaggatgatgctggcctcataacatgagttagggaggattccctctttttctattgattggaatagtttcagaaggaatggtaccagttcctccttgtacctctggtagaattcggctgtgaatccatctggtcctggactctttttggttggtaagctattgattattgccacaatttcagagcctgttattgctctattcagagattcagcttcttcttggtttagtcttgggagggtgtatgtgtcaaggaatttatccatttcttctagattttctagtttatttgtgtaaaggtgtttgtagtattctcttatggtagtttgtatttctgcagtatcagtggtgatatcccctttatcattttttattgcatctatttgattcttctctcttttcttctttattagtcttgctagcagtctatcaattttgttgatcctttcaaaaaaccagatcctggattcattaattttttgaagggttttttgtgtctctatttccttcagttgtgctctgattttagttatttcttgccttctgctagcttttgaatgtgtttgctcttgcttttctagttcttttagttgtgatgttagggtgtcaattttggatctttcctgctttctcttgtgggcatttagtgctataaatttccctctacacactgctttgaatgtgtcccagagattctggtatgttgtgtctttgttctcgttggtttcaaagaacatctttatttctgccttcatttcattatgtacccagtagtcattcaggagcagattgttcagtttccatgtagttgagcagttttgagtgagtttcttaatcctgagttctagtttgattgcactgttgtctgagagacagtttgttataatttctgttcttttacatttgctgaggagagctttacttccaactatgtggtcagttttggaataggtgtggtgtggtgctgaaaaaaatgtatattctgttgatttggggtggagagttctgtagatgtctattaggtccgcttggtgcagagctgagttgaattcctgtgtatccttgttaactttctgtctcgatctgtctaatgttgacagtggggtgttaaagtctcccattattattgtgtgggagtctaagtctctttgtaggtcactcaggacttgctttatgaatctgggtgcttctgtactgggtgcatatatatttaggatagttagcttttcttgttgaattgatccctttaccattatgtaatggccttctttgtctcttttgatctttgttggtttaaagtctgttttatcagagactaggattgcaacccttgcctttttttcttttccatttgcttggtagatcttcctccatccttatattttgagcctatgtgtgtctctgcacatgagatgggtttcctgaatacagcacactgatgggacttgactctttatctaatttgccagtctgtgtcttgcaaggggctagggagttccctttcctagtcaaagaaaggggtgacagatggcacctggaaaatcaggtcactcccaccctaatactgmgagtttccgacaggcttaaaaaatggcgcaccaggagattatatcctgcacmtggctcggagggtcctacacccacagattctcactgatggctagcacagcagtctgagatcaaactgcaaggcggcagcgaggctgggggaggggtgctcgccattacccaggcttgcttaggtaaacaaagcagccagaaagctccaactgggtggagcccaccacagctcaaggatgcctgcctgcctctgtaggctccacctctgggggcagggcacagacaaacaaaaagacagcagtaacctctgcagacttaaatgtccctgtctgacagctttgaagagagcagtggttctcccagcacgcagctggagatctgagaaggggcagactgcctcctcaagtgggtgcctgacccctgacccccgagcagcctaactgggaggcacctcccagtaggggcagactgactgctcacacagccgggtactcctctgagacagaacttccagaggaacgatcagacagcagcattcgtggttcatgaaaatccgctgttctgcggccaccgctgctgatacccaggcaaacagggtctggagtggacctctagtaaactccaacagacctgcagctgagggtcctgtctgttagaaggaaaactaacaagcagaaaggacatccacaccaaaaacccatctgtacatcaccatcatcaaagaccaaaagtagataaaaccacaaagatggggaaaaggaaaaaacagagcagaaaaactggaaactctaaaaagcagagtgcctctcctcctccaatggaacgcagttcctcaccagcaacgtaacaaagctgggcagagaatgactttgacgagttgagagaagaaggcttcagaygatcaaactactccgagctacaggaggaaattcaaaccaaaggcaaacaagttgaaaattttgaaaataatttagacgaatgtataactagaataaccaatacagagaagtgcttaaaggagctgatggagctgagagccaaggctcgagaactacgtgaagaatgcagaagcctcaggagccgatgcgatcaactggaagaaagggtatcagtgatggaagatgaaatgaatgaaatgaagtgagaagggaagtttagagaaaaaagaataaaaagaaatgaacaaagcctccaagaaatatgggactatgtgaaacgaccaaatctacgtctgattggtgtacctgaaagtgacrgggagaatggaaccaagttggaaaacactctgcaggatattatccaggagaacttccccaatctagcaaggcaggccaacattcagattcaggaaatacagagaacgccacaaagatactccttgagaagagcaactccaagacacataatcgtcagattcaccaaaattgaaatgaaagaaaaaatgttaagggcagccagagagaaaggtcgggatacccacaaagggaagcccatcagactaacagcggatctctcagcagaaactctacaagccagaagagagtgggggccaatattcaacattcttaaagaaaagaattttcaacccagaatttcatatccagccaaactaagcttcataagtgaaggagaaataaaatcctttacagacaagcaaatgctgagagattttctcaccaccaggcctgccctaaagagctcctgaaggaagcrctaaacatggaaaggaacaaccggttccagccactgcaaaatcatgccaaattgtaaagattatcgagactaggaagaaactgcatcaattaatgagcaaaataaccagctaacatcataatgacaggatcaaattcacacataacaatattaactttaaatgtaaatggactaaatggtccagttaaaaggaatttaggtttgtgattggacactcgggtggactctccaaaagtctcactaaaatatatgaagacatagaggataaacaaaaatttaatgagatgggagaattgcctgagcctaggaggcaaaggttgtggtgagctgagattatgccactgcaccccagcctgggtaacagaaagagaccctgtctcaaaaaaaaaaaaaaaattaaaggaacaataaaaagttgactttcagccaattgtcagaatggccaagaaattttcacaaatattccatttagtgaacttcacatatggatttaaactttgagtgatgggattcagcagtagtagtccttctttactactcctaatttctgaccaggtatttctgagggtatgtatatatgattgtatacatcaaagagcaattataaggatactgtaataagtggttcagattttattttttgtgtttgttttctaaactaygaatagataaaaatagagaaatgaagcacttggcacttttatacctactttaaggcaagcaggattgctcttgttctgatgccataggatagaacctacagtgaaggaagcctcttcatttctcttcgtttctgcragcaagcagttgttggaagcaatgcctaatgtttaagaggtctaattttcagaagccatgatcttcaagtagaatcagagacttcaagtttcctgtctatttactgtgaattttgtagtttacatatatcccttctatacagagtgttagaggtcaaggcaaggaggaaaagttaaaaccctccacctttagtcttgtagagtcccataaaaatctgctagattctgccaatttggctttgatccagacccgttagcatcaatgttgtgtgtgtctctagtcctgaaaaggggattttcccaaacaagcagacagaaaaagcagggcaattcacactgggttgaaacaagaagatacagaatggataggaaaatacgtgggaaatggaaagacaatacagaatcaaaaatacagcagcacaaataaaatacacattgctgttgtgacagagcagaattgagatcatggaaaattgaatgtgttgtgaaggatagccataggaatttctccagaaaatgtagaaaaatatgacagagtaatcaaaattatgaaagagaaggtgacaatgagacaacccaaaatgaattcatgatgaagtagcaggatgggagtgggggagcagaataatgaatatacatttatattcatraatgaaattgatytaaaacttttatttgatgctttaaaaaattgactagcaattaattttatattaattgctgggaaattaaattcaacagcacattaaaagatatagccatcctgaccaaagaagaatattccaggaatgcaaagatggcttaatattatgaacattattaacataatatactatataactgtatccaatatgaaaaagcttaattcttttgaaatgatctggaaactcattctaaaatttcagtatcactttctgtttaaaatcttagaaaactaaaagtagtttatgataaatattaatattgagaatatacatcataaaccaaaagtcaaactcacacttaatgagtgagtttactattaaaaatagttccattaaaataaaagtcaagacaaagatatataccatgaacattgttatttaatattgttgtgaaagttatgtgtgacacatgtaacatgaaagaagtgacgtatcattctagaaaataccattattgttaatagagatgctctgttcatatacctaggaaatgtgaagagttaatttaaatctcagaattaattaaagtataagatagtgagatgataatggtgatgcttaaggtattatatcggctgccttttattaaggagattttgtgtaccaggctctgagttaggcagctttcacaaagaatcattttataaatgagaaaaacaataccaaggcctgaggtccattggtacttgaggtcagatctgactgattccaaggcttatactcttggacccagtgttccactgtacagtagacayacaaacaattgctttcctatacaccagcattcaaactagcaaaaacgaagtataaaacactcattcttaaataatatatgggactgaaagaaacaacataactacttcagcatagagaagcagctttgaatrtatgacaaaacayaatatgttcttatagtagaagactcatagtaaatacrgcgtttatttcaaattgagttatattaaattgagttataataaaagactcataatatggcatttagttcaaattagaaatgaayatggcagttatttcaaattaagtcaattacaaaattgaaatgagcttttttctaagacacataaaattactttaaaatttaagagcaagaggaaacaggaaaaaatcactaagcaactttttcacctagatgaaaggtgaaaaaggacatacataacagattatttaaaccaatttcaaaattataataactaagacaatgttttctggcacaagaaccagtagattaaaccaatggaacagagaactctgaaatagtcttcgtatttccaagaatatcgcatataaaagaagacactcaaaccaattgtcagggaaacaaaagatgttttattaaacagataatcaatggataaattagctatttatttagaaaaaagtctaagtattaacttttcttcatactatgtatcaaaataaatwgtagactaaaattttaacaattgtactaaattaaactattaaaaaagaaaaaagataggtgtatgtttatcctatttgaaaatcatttcaccataaagacacatgcatacatgtgttcatcacagcactattcacaatagcaaagacatggaaccagcctagatgcccatcagcagtggactgaataaagaaaatgcggtatataaacaccatggaatactacacagcatatgaaagtgaaatcatggcctttgcaacaacatggatgaagctggaggccattatcctaagcaaattaacatagaagcagaaaaccaaataccgttctcactcggaagtgggaactaaacactaagtacacatggacacaaagaagggagcaatagacactggggcctatttgagagaggaggttaggaggagggtgaggatagaaactacctatgatgattaactaggtgacaaaattctctatacaccaaacccatgcaacatgcaatttatacatgtaacaaacctgcacatgtaccccttgaacctaaaataaatgttggcaagaaaaaagttgaattttattttaaaaattttatactagtaaattagcttstgtctagtcaaataaactagtgtatctagaaaatatatgattttctgcttttgtctattagagtcataaaataatattaatgtatttcctaatattaaacaacctctgcatctctgaaaaaaagagaaaatggtaaaggaaagctttgtaaagataaaataaatggaaaaatatcagtgaaaatattgcaaatatttgactgcatattgtctttaattttttatatatcaaaaaaagaacaaaattagaagacgaatatgaaacagtgttcataagacaacaataatgcaattgcttcagaatcaavgtctatgacttctcactcagagagtatgatgtcataaaatagctgtatcctcaacaaaagctttgtagtcaacacagtaacaccagtgggttttctcttacaacatccctcagtgtaggtttaatatcaaacataatatcaagtggtaagtcaataaaagcaactctgagctgctctggcttaaaatagagatagatatttaaagttatttgagcaatagatggaaaaaagccaataacttatgtgcaaaaactcttaaaactcagtttgcgaagacatgcaaagtgaagcaatggtgagctatttttgagtatcaaattggtaaaatatttaaaggcaatatataattcaaagataatgatgaggtagataattttataccctactcrtgatattgcactttgttatacatcatgggggaaaaaattaaaattattccctgtgtgtcctaattgatgtyatttagggatgttccttagcttatgtgtgttaaaccctctatttctggatcccatacatttctcacccttagtatatttacttatttttctgggacttagtttgataacttcctgagatattctaagcattctgagaaactttagataaaatttgcatatttgaaaatgtttttattctatcctcatacttaataatttgattgggtataaaattttatattgaaaacaatttttaattaagtatttatagccaatattctagtttcttctatcagttatagagagggctgatctcatctgttatctgctctttgatttaaattatatatatgcacatccatatatatatttatatattttctctctttcaaattgttttatccttttggtagkatctactctttatctcttgtgatctggttttcacaacctggattttccttttaatttcttgttttactctcagctcttttctatgtggaaaattttatttttaggtctggaaattctctggtgttatctgtttatcattttttcttcccattttctccattctttcttttagtcattctcccctctgatttattttgttttgtttctcctatttgaattttgctttctcttttgggagatttctttgatatcatacctgtaacttattttttattgatcattatattttaacttttgtacaactctttctgcttttgatagtttttaaaatratgttgtatttataatcgaacaataattgtatttttatggggtgtgtagtgatgttccagtgcacgaatacattgtataatgatcaaatcggggtaattaccatatccatcactctaagcatttatcatttctttgtggagataagatttaaaatcttcgaggtatcttgagatatacactatattgttatttgctgtaatctccctactgtgtaatgaaacaacagaaatgtttcttcctaactataactttgtattcattgactaacctatccaggcccctgctccccctacccctccccagtctcttaataccacttttctactctctacttccatgaaatcaactttttcagattccacatgtgagtgagttcatgcagtatttgtcttactctgcctggcttatttcacttaacgtaataccctgcaggttcatccatgttgccacaaatgaaaggatttcattctgttttatggctgaatagtattccattgygtacataccacattttctttatttatctatagatggccatttagtttgattccatatcttggctgttgtgaatagtgctgcaataaacatgggagcacagatatctcttcagcatattgatatcattttctttggtggtttcttcttgattgcattatcttttggatgcagttcattctgtactgtctctgaagatgttagctatgtttggtttttttcttacagtttcccttcaatgcgtatataaatctctatatcttctgcctcattattcatttatttattttgattatttgttttggtttctctagttcatgtaaaaaaaaaracttctgaaatgtctggagattcaagacatcctcaatttagtttttaagtgtgagatattaaaaagttgattggaagccttgagtatgtgagtgaaatttaacagctagggagctttattgcagaggagattgagtggtaagctcttccttttactgtggctgacaaatgtgagtatcttcaggtcttttctctggggataaacaatttcttagaaggatcctcagatctccgtcatgaaagcaatgtgcctttctgtaaaaaagggatcagtggatgaatggtagtcccagctttcaatatgcagactttcatttcatttccttgctttcagtttcctgtctcaattacagccttccactagttttgatatctggagtatctctagtacacttctataaaaataaatttctgtctcacgcctgtaatcctaacaccttgggaggctgargtgggcggatcacctaaggtgaggagtttgagaccagcttggccaacatggtgaaaccccatctctactaaaaatacaaaaattagccaggcatggtcatgcacacctgttgtcccagctactcggaggctgargcaggagaatcgctcgaactccggaggcggaggttgcggtgacccaagatcgcaccactgcactccagcctgagttacagagccagactccatctcaagtaaacaaacaaacaaacaaacaaacaaacaaatctctgtctccagtggaccactagaaacctgattgcacagggttgtgatggaaactggggtccaattggctctatataccatcttcagacagtcttcacatttcacccactgtgcctccctgcttgaactgtgctctccagtaccctgtctttagctgcctttttgggagttctacatgttgaatgttcttttttttctactaagtcagttatcattttacaatctgcttttcatcttccaaaacttctcatatatgtgtggggaatctgccatgtttaaacaaagtatggggtatgcttaatgtaatttcaaaaacaatcccttggaaattgtaatatcagaatctaatgtcttacagattcaccactatgctcactacctgggtgacaggatcattcatatcacagacttcagcatcatgcaatatactcatggaacaaatctgcatgtccgtcacctgaatctagaatcaaagttgaatttttttaagaagtcatatattttaaaagtcaatttctgccattcagaagctcaagtttagtgtctgcaaagagctgtgggaaaaaaaaaawttttacgaaataccattgtcttagtaagagtgtaatatatatttatgtatatatgtgttagagtgtgcatatatatctacacacagttaaaattcatacactgatagtaaatttcattgtgcaagaaaaacagattattatctgcactgtcagaattcagggttatagatttctctagccctttgcatcattactacataacagaaaactttgtttcttcctaaatgatgctttattttcaactgtacacatcagattatcctcatttggctgtcctcatttttctctgcatattttgaaacttttagaggggagcaacaacaggaaatctgtttgggggtttaataaaaccaccaggtatttggcataattgcagctctgatctgtgactttttaaatctaggcattgagttaagaacattaagaaayattgaactatcacagcttagtcatgtgccggcacattatcaacaacaatggcacatctctttccctgtccatttactttctgtagtttctggttgttctgccctgaactgtaatgtgataaggggcagtcagaaagtaaatgtaacttttaaaaattagattatcaaaaacacagatttgttatagactggcgcattacttttggcttttctggtactttcttatgagatgaagcccctgagwaggcaaactttcactaacatttctggtagttactagtagttaggtattgctcaagacagaaagaaacattttagaataaggaaaatattaagctgcaatcaasagaaattctttttaatctttgcatttcctggaacagactgagtcatgagatgaattgacagtaaacacttaacactggcacattagtcagagttagtcacataaggtgaactaggcaatcacaaactaaataaatagatcagaaatcccaaagacaaagggctaaatatagtagaatgctcagaaacagcaataaggatgcatggtgtgaagtaagttgaataggagagtgaatagttgacaatgagattggaggactaaccagagatcatgtaggccctgcatggattttgggatttattctaattgttaaggtagttatatgatctaatttcaatttctaaataaatgggcaccatggctgttgtgtagcagacagactatacagcataagaatggggacagggyaattatttttaaagctaattcaggaatctaagcaagagacagttgtggtttagaccagtgtagtagcaatggaggaattggaggagggagaatgttgtgttcagaatatgttttagagaaggtcaatgggattaactgatgggttgaatgtgtgatacaagaggaaagggaattataaataacttcaaatagtttgggctgagcatgtgaacaaacagtagtgccattttaagtaaactctggagaacagctttatggcaaaagagtaagggaggaggatcaatagttcatttctgatttgaggggcattttgtttgtttgtttatttgtttgttttgtgttttttgtgttctctttttttttttaatttcaactctcattttagattcaagggtacacgtgcaggtctgttacatgggtaatttgtgtgatgctggggtttgggatatgaatgatcctgtcacccaggtagtgagcttagtacccagtgagttgtttttcaacccttacctcctttccttcctccctttctctggtagtcccaagtgtctgttgttcccatctatatgtccatgtatacccagtgtttagctcccacttataaacgagaatatacagtatttggttttctgttcctgcgttaattcacttaggataatggcctccagatgcatccaggttgcttcaaaagacatgatcttattcttttttatggctgcatmgtattccatggtgtgtatgtaccagattttctttattcagttcaccattgatgggcacctgggttgtttccgtgtctttgctatggtgaatagtgctgtgatgaacatacaagcacatgtgtctttttggtagaacaatttatttccctttggatatatacccagtaatgagattgctgcattaaatgctggttctgttttaagttctttgagaaatctccaaactgctttccacagtggctgaactaatttacmttctcaccaacagtgtataagcattcccttttctccacaacctcaccagtatctgttgtttgttgactttttttttttttttttgagacagagtcttgctgtgtcacatttgttgacttcttaatagccattctgactggtgtgagatggtaaccctttgtggttttgattttcatttctctggtgattaatgatgttgaacattttttcattttttcattgttgcccacttgtatgtcttcttttgagaagtgcctgttcatgtcttttgccagctttttaatggagttatttatgttttgctggttgacytgtttaagtttcttatagattctggatattagacttttgttggacgcatagtttgcaaatatttcctcccattctgtaggctctctgtttaagctgttggtaatttcttttgctgtgctgaagctatttagtttacttaggtcacacttgtcaatttttgttgttgttgcaattgcttttgagaacttagtcataagatttaaatataagaccattaagagtcctagaagaaaacctaggaaacaccattctggacatcagccttgggaaagaatagttctttttggatatgttgaacttaagacatcttatcagacatccaaatgaagatatagattaactagttagatatttgaccctgaagttcaaggagaagaaagaactgaatacataaattgaaccttcatgccataaacatgttataaaaagttgtggaacctgttgagataaactaagaaatgcatacagataaagaaaaaaaagaggtccaatggctattttagcattttatgaacaggaagagtaagaagatccagcaaaagaagctgagaggaagaagatcaggagaaggcatgataagccatgtgcagtgagatagctatgcacatgtctatgcctcaaggagagaggaagctaacaggaagctgacttatcatggaaaagaactgaargaagatttcctggaaagaggaaggattgagataaattaatcttcaaggttttaggcttataaataattggcaaactattatccacctcttctagaatctaaatcttgctccctttaaggtgtgtgcattcttataggaaatagatgacatatattcaaacacctcaatttttagaaatttcaaaatttctaaagccactttcacatactcataataaccctgaatgacaaatgtttgtaactactattacgcagagtttacaggtaaaggaaaataaggtgaacagatctgcccaaaggcaaatagaccactgcaaagtgacaaaattgggagtagaacctcttgccctctgaatcctagattcttatacttttcactccattacctattgcagtagaaaatttggtacctgtcaaaggagcaattcaaacaaagatctgtaggagctccatgggggagtgatcacttcttactggaaggatcagggaagactttgtgggagagataacattttaactaaaacttgaagaaagaatatgattccaggataaaagttacctagtcatggtattccatgctctggatgattttgtcccagcttacatctccagccttttctgttgccatcccctgccactgccccaggccataatcaaccatactgagctactcacacttttacctaatgccaaggttgctcttgcttctatacctatggtacctacaagcatactgctaccttagacacagaggcatttctacccttagaaccagcttctcagtccaatattttccttacactccccaaactactttagaagcccttacccctgattccatgcatcttatgcatcctgtgcatctctctcgtgtttatatcatattctacatataatttcttatctgtgaacttcaggggatcagagacttgcctggcatataactgatccctagacccacacactaggatacaatggttaccaaccagcactgatcactttttgacaacctggagcaacttcctgtgtaatagaacatattatgttggtgcaaaagtaattgcgcgttttgccattgaaagtaatggcagaaactgcagttacatttgcaccaacctaatagtaaatgctggtttctgctttatcatcatgaatgagtatttgtactttggttcatattattttgtattagtccatttcgccttgctataaaggaatacccaaggctgggtaatttataaagaaaagaggtttaattgtttccaggttctgcagactctacaagaagcatagtgctggcatctgcttctagtgaggacctcaggaagcttctgatcatcggggaaaacaaagggagagcagatcagatgtgtcacatggcaagagagggcacaagagagatgccaggctcttttaaacaagcggcwcaggtgtgaaataatagattgctagaactcatgcattaccacagggatggtaccacacccttcatgagagatctgcccccatggcccaaatataacccactgggccccacctctgacagcggggattacatttcaacctgagatttggaggggacaaatayacaaaccatatcatgttctaggttccttgaatttagatgtatatatccaaattcatatttattttctcrtttttattctttaaaatgtaagctgctaaagtaaatattgccttaactttatgttgtataaaatctcctatttagcacaataggcatcaaagaataattcacaggctgtgatgataataatttagagttttgttctttcttcaaaagtaaatgtttccttcaactttaccctgaaaattcaagaggaaaattgaaatgatggcttgtgaactttttgttgcatatacatttcattattgccttatccctggaatattattactaaataattttgtttcagaattgtacagatatcaagaaatattggggcttcagggtttcaaataatgcaaaagacatatcagacaagcaagacacttgcattttaatatgtgtgaactcatgcaagaaagagaacaggattgagagagctggataaatgtcttacaaaaaagcaataaacatacaaatcctccaggaaaactggtgcagtaattcaatcacatattgacaatgtctatattcctagataaatgcaaaaagactttccaatttataaatagcttaccaccttccttagtcctctctccacactgtttaaagtccatgacaggtaaacacacaaaagcaaagatttacactttaaaggtttaactgccattttgcagtcagtatggaggtaattgtactatattaaaaagtggtatcttgtgagagggagtagtttagttggagtatagatgaagagctagtctgtgcctcaaacatattttatataattctgcattgattttctgcattccttttttgcaaagattttaggatcagaaaatattgcrtttcacccttggccttgttgggcccatggcaaactatattttgaaaggcctgaacagttagagaattatgtttctaaaatttatctttttgctggatactattagcaaatttgacttaaaacacatttaattttgaaaattgtatgtcataacattaaaatacagtcatctacaagttgtttgaaataactatttggcatttaatgaaaggaaacatcccacatttctgtctcctctttaattttatagtaacacccgtaaaatgcccttatttctgattcccttaggcaactttagggttgaaagttttgtacattgacttcagcttaaatgtgatttaacatttaatatccactctcctctgaaactgacgggagaaaacacacttgtttcattttagcacaactgaaaataaagaccagtgataggccacatcctacttatctgatctcagagacaccttataatagaaagttcagggttctgattgttcaatattctaaagsagtcattcatgtaagttccatcagaaagatatgaaatagcttgtagtaacgtatcttttcctcagtcaaaaagaaaaaaagcttgaactgagtgaagatcactatgtcattaatctacttaaagattaacctttttaaacagccaagatgtgtaacgtacttgttcttattcaaagttcaattgtgttcagcaccatggaaagttttatgattgaatatatgtaattatagtatatagagattaaaaataactcaagggattgaacaaagttttccagtagttaatcattaatgaagatcttaaatctgtactttaaatacagacaaaactagttataatgatctcattagtgccttattaaggttatctattttagtatttgtcaggacaattcagacggaaatgaacttcttaacatgtttaggagaggttgatgatcgtttactcagttaaaagacataccatagctgattaattgctgtgcaaataaagagtcagactagaagcaacagaatagctaaatgtagcccattctgaaatttaactttcatgcttgtgctctctgccacatttttgtttgtttttattcatgaggccagaaaatatgttttaaaatatagaggaagttggagaaaaagtagagaaaaartaaacaagactgtgagttttattttcctaggacttggctgagtgtcaaattgaatggagacctttcacaggcgttcaaaacttgtgtttttaaaagagaaaaatgtgctggtttgcctttgacaaagtctgttgctctaagttcaaattgcagaaagaataaaatttttcagaaagaggctagcaattacttacggtatcagtttgctcttaaaaaggaacactgtgatataagggcaactgaagctgcagttattgatataaatatacttcagggagaagaacagagtgaatgtcaaatcatcagggaacatgcttgagatcaattattcaaagtgtggaagtccttccatttgratattgtgattcaatagttcaccaagtgggagaaaggagaatgcagctatttgaggatgtggtaaggtacaaaacagtagtgagtagggactaaattgaaaatgatctatrtatttatgccctagtaatttcttttaatctgcattagcaaaacatgcttttatggggttttcaaaatataatatcggcagaatgtggagaatatgcagatttcttgaaaaaggttgaatttaaaatagcaatctctctttgatctttattacaatttttcctccagtacacattacctcttctaagaggacaggtgaggctttgataagtattgccatatctgattgatctctaaagcccaaagaacctacttgcttaaagtttttctgagctggtccttttygtctaattccacaagattatctctgggaatactgcaattaacttcttcctgattttattttatttctctcccttctgtccattctctacactacatttaattttcttttattttcaaaatccttgttaatgatgtccacaagctcattcctaagaacgtttctatccttagctttccctgcctgcccccaggctcagctgtgctccagtcagagggaactgttctactctctaatgcaccaygctccccacactccgtgccttatctcttgtctggggaaatcccagcttccttcaatgtgccaacaaaccttctctatgaattctttagctgaatttgatgcttcctttgatgggaaacatactttcagtgtgtttctgtcaaaggacttatcattttgtgtggttactgcatttctcttttagcagtttgcaagttctttcagcacagaaatgtcctcttggtcattttttaaatcttgcattagcaaagtacctggtatgtagtagtaggcactcaataaacacttggggaaagaataaaagaggcaggtattaagagcagaaatcttcctgaataaatttgctcgaaatatgtaagagtttgtgagagaacttacataactaacttctccttaaactgtttaaataggcaaggatggctcttgaagaacataaccagacaaagtttatctttgtccctctcacttttacttcctcttttagcagacaaattcccagtgttcacagcacctttcttcatttgagacaaacatttttctcccaaactctaccttatgtagcaattgtttatatatgaaatattttctggccccacacttgcagcagagcttascagccccatgttttaccctctcacagcctttagagcacaggtccatatgaatggggaatggtgtaaatgttgtagttaatgatctttcacagaaaatgtgtgtgtgttttaattagatttttctagatttaacacaaaggaatagcttgaatatgagaaatatcagcacttggttgagatattgcaagaacacagattggggtagggaagaataaaaaattatagtctatacacattctactggaatattatgatgcctctcaaccgcaagatgaccatatatctttcctttgggaagactaaacccattctccggttgtttatgaatttagactcctaatgggaaattgttagtgattctattgctttctttactacttttcttgcctcctctcttcctttaacaaatagagtgctttctatatgccactstgctggaatggcatgaaggaaacatacatggccccaggccttcgtggtgcttataacctatgtccctccgaaaagcacctgaaatatggaagagtttacagttcttcatttgagccaaatgatgtgacataatctcatatgcttttcagagggaatttgggcaattaaatcttatcataaatttgctgatgaagtaatttacttggaaagatattgagcgctgtgtactgaattgtgcccctccctccaaagttcatatgttgaagccctaacctcctaacctccaatgtgactgtatttggagataaagcctgtgaagaggtgctgaaagttaaatgaagtcataagggtgggtccctaatgcaatagggctggtgactttataagaagaggaagagatatcagagctctctctctaccatgtgagtgaggacgcagtgagaaagcagccatctccaagctaggaagagagccctcaccaggaactgaatcagccagcacctcaaccaccgacttcccagcctttggaactataagaaataaatctctgttcattataaattacccagtctttgktattctgttaaaacactataaaatggactaagacaggaaattggtaccgagaagtgtgactgctgctataacaaatatctgaaaatgtggaaatgactttggaactgggtaacgggtagaggctagaacagtttggaggagaaggctagaaaaagcctaggtttccatgaatagagctttcaggacaattctggtgagggctcagaagaagacaagagctacagggagagcctaaatcttcttagggattacttaggtggtcataatcagaatgttgtagaaatgtggatggtaaggggcattctgataagatttcagatggaaataacgaatgtggtattggagacttgagtaaaaagctatccttgtgcagttgcaaaaaaaaatgtggtagaattgtgtctatgttctaggatttcgtggaagrcagaacttaagaagaactatctaaacaacatctggcaggataaatatctaagcaacaaagcattcaaggtgctatatggtggcagcttacagtaaaatgagagagagaaatgttttaaagatggaacttataattaaaagggaaacagaacagaaaacattgaaaaactctcaacttagccacataaagaataaaagaatgtgttcaggagggaatactaagtgtgtggctaagcgactgtttgctaaagagattaatatggatagaagaaatccaggttttattcatcaagactatgggagaatgaccatggaggcatwtctgagatcttcaaggcaagttaggtaggacattgaaggcagggtttctagacaggggctcatatcggacctcagcattaggtgccctgcactatcttgagactttgttccctgaatttttgtccatcaccctcagcttccccagcagtggctcaagcaatcctaggggcaccttgatccatcactccagaaggtataagctgcaaaccttcacagtgtccacatagtgctaattcttcaagaatatagaatacaggagctctggggccatggcaccctccacctagatttcaaaggatctctcggttagcctgggtccctaagaagagacttgtcataggcacagagccactgcaaagagctattactagggcaatgcacagcagagtgcaggagtgagactactgcaggraatccccactttgacattacttagtagagccatgggagtgaggcagtccctggaccccagaactgtggtgccaccagcatgcaactgtagcctaggagaactgcgggcataagacgccaaattgtgagagctgctgagtgtactgaacccatcaaagccataaacagggctgcccaatccctaggggcccaacccctgccccagtgtgtccaggwggtgggacatagagtcaaaacatattattctctagctttaaaatttaatgttcccttcttgtggtttggacttacatgaaacaagttactccttttttcttgcctatttctttcttttggaacgggaatgtctatcctatgcttgtctcaccattgtgtttttggaagtagataacttgttcgatttcccagactgatgggaatttgcctcaagatgaattgtgccttgggtttcccccatatctgactttcatgacactctggactttggacttaggagttcgtgctggaatgggttaaagccattgggatggaatgaacatattttgtatatgagaaggacatgattttgagggaccatggtggaatgctgtggtttgaatgtgtcccccaaaagcatttgttggaagcttaatccccaatgcaacagcaataagaggtgtgaggtgattaggccataagtctccaccctcatgaatggattaatgcccattcatgagggtgattcctgagaggtgataagccataaagctccaccctcatgaatggattaatgcccattataaaagcgcttgaggctgccagttcaatctctttctctcttgtgtgcgcctgtgccattctgccttccaccgtgggatgacacagcaggaaggctctcaccagatgcaggccccttgaccttggatttcccagcttctggaactgtaaaaaatgaatctgatcttcaatctgaaactgtaagaaatgaatctgatcttcaatcactgataccctttcttccacttgatcaaaaagtgggcaaaggatatgaacaggcacttctcaaaagaagacatttatgcagccaacagacacatgaaaaaaatgctcatcatcactggtcatcagagaaatgcaaataaaaaccacaatgagataccatctcacaccagttacaatggcagtcattaaaaagtcaggaaacaacagatgctggagaggatgtggagaaatagaaacacttttacactgttggtgggagtgtaaactagttcaaccattgtggaagacagtgtggcaattcctcaaggatctagaactagaaataccatttgacccagtgatcccattacggggtatatacccaaaggattacaaatcatgttactataaagacacatgcacctgtatgtttattgcagcactgttcacaatagcaaagacttggaaccaacccaaatgtctatcaatgatagactggattaagaaaatgtggcacatatacaccgtggaatactatgcagctataaaaaaggatgagttcatgtcctttgcagagacatgaatgaatctggaagtcatcattctgagcaaattatcacaaggccaaaaaaccaaacaccccatgttctcactcataggtaggaattgaacgatgagaacacttggacacagggcagagaacatcagacactggggcctgtcatgaggtggggggcagggggagggatagcattaggagaaatacttaatgtaaatgacgagttaatgggtgcagcaaaccaacatggcacatgtatacctatgtaacaaacctgcccgttgtgcacatgtaccctagaacttaacgtataataataataaaaaaagaaatgaatatctgttcattacaaattacccagtctatagtattctgttatagcagcatacagcagattaagacaccaaagatgcagaaccctgaactgcaggacacagcaatgatttgtttaattgatattagatagcactcctagattttgtcttgatgtccttgtaccctctctccatggtgcagacgtatcttctcttaatagatgagcattctgaacactaatgtgctatttttcattctctagttagtattctcccttgatatgctaagccaattggatactgctgcctaggggcatttattaatacccttctgaactcaaaggaacaaatgacacagattttataacacaggatatccctgaaattcatattctactaaaaatattatgagctaattattgtgaaacttagattaagtttatttatttctagatgtccctattagctaaaaaacctggtgatcagcagtaactttattgtgtagtactatttgtctaaattcatgtgactttaaaagtaatttttacctttacttaaagcacaatgtatttaccaattaaaatgctgtagaatgcatctcatatagaaagtttaatttgtaaacttctgagtaaaggaatcaaatttagaccaaaatagagtgatggggttttcttagaaacttagtcatctaagtrgagagtatcaaaattttctaacttatgagtagatagagtacatgtttgaaattgagcatgttagtcagagacctggaatgattaaagaaaaaattgtatttaaaagtttaataagaagattaaaaggtcacatttatctcaaacagtagtgatataaaaactatacactacataataaaaaacagataataagattttttgtacatcacaatgacacaaattctaccacattcaaactcccacaggtgggactgataaagacaaatgttattcttaaaacaattcttgtargatatattacatctagatgttaaaatgctctgattcaattatttatccattaaacatatatttgtaaaagagcctaccatatgccaggtgctgttctaaattctgagcgtagagcattgagcagacaggaagcagggattgctgtggggaggagagaataaaaaatacataagaataatctcaaatacctctaactgttatgaaaatagcaaaactaggtggtataattgtgatagaaaaagagatgggactttagattaggggtcagagaagatgtctttgagaaatgacatttgggctaagacttgtatgaacagtgccaatcatgcaataatatggatttagaacaccaagaagagggaaaaggtcatgcaaaggacctactaccatgagcttgggaatttaagaaacaacaagtatcagtgaggcaggagtctgataaacaaggtgaaagtggtatgatgtaatttataacgaggattccyagtatctaataatggcactgtccacggatgaacgggacagtcttgctattactatctattggggtaaaattgaagggacaaggcaaaatataactgaaaactataaagttttgtctttctcataaccatatctttgacacatgctgaggaataacatttctctgaaaacaaaaacactttcaggtctcgaagtcatagtggttttatatttaagctttgccttgatcaagaaatatctgatgtgtggataaagacagcaaaaaggttgtagtcagcagacccaggttcgagtcccaatttaaatataaattagctttgccttgtggtgttgaattgtgctgttttgatccatctgagcacaatttattatctataaaatatggtaattgtgaagatcagctgacatttaggaagcttaagttagggacaatgatggaaaaatttattactgtgtaaaagttaaaataggatttagggatgtggcttatgcatttgtcttagcttagtaaaacaaatatgattaatggaaacggtattgtttcgacaaatcactggaattttcaattcagaaatgtataaagtgggaagagaagggttggctcacacctgtaattccaacactttgggagaccaagcagggaggattgcttgagctcaggagttcaagaccagcctgggcaacatggcaagacctcatctctactaaaaattagaaacaaaaaacataaaacaaaaaaatactagccaggcatggtggcrtgtgcctataatcccagctatttgagagggtgaggcaggaagatcgcttgagcccaagaatttgaggctgcaatgagttctgcacttcagcctgggcaacagagtaagactttgtccaaaaaaaaaaaaaaaaaaacagaattttgctattaagattcagaattggcagtcatagctatctgtaggtaaccaaaagaatctagatcatgatctggctcttccatttcagcctgattctcattgttgcagcattgatctgattttatctttagtcattattttagaaaaaaatagataaaagaaaaaagataatatcaagggctattttcagccatgttataagtacttgacatatattaaaattttgatcatcaaatgaagggggtaatttttcaattatctgaagtatgtgtttaacatgtttttgttgtggtggtagggtttattttgtttgttttggaaatattttggtcagaatctcaccatacccaatctcatagaatgttttgtcaggttcagtgaaaaggagaatgtagatgtccaattaattgatatctaatgaggaataaaagttagaaggcaaacaaatgtattaatttggaaaaatgctatttttcacatcatgtattatacttaatcaccatagagggtataggttttcatcagtgtactactgattcccactatattttcttaagtgtaattgttttmatggttcaacccttaaataataaataataatggctatataagcttcaaaacctcacagcatccttgtagcagaagattctaagtgcagagttattaaaattgtaaactatttgtttttaagtttgtgggaatcattacccatcatctcrtctgtattacatttgtttttgaataaagattaacatttttttccaagcctttttctatattgtaatcatagtggggaaatggtatttcagacctcagataaaagctttatagtgatttcatgtgacagaattttatctgggtttcaaggaactctaataatagcatttacaattcttctatgcaatttcttctcttcttgttaccataggagtatggaaaacacgttcttggtttaaaaagctaaaagaaagaaaatcagcagtttaatctgagtattaggaaaaggatcacaaatcctgctatagtattttgtatttaagctagtttctgtaaaggcccctgacatgccctctgggagctaaatattgacaagcatgctttggcaatcaagatcaagcttgttgaattaacacagctcaagtcttgcattgacactataacccaacactgagaactgttatcttaccccatttattttggctttgtaggtgatactktatacttgaattagggatttgcactgtatcttaaatgctagaattgtggattaatttgatttgagaatatactagcccttatcatgttcacagtggaaattataaatgaagtgtaacattcattgttttctctcccagcatggatccagaatgaacctgctgtagacctaagtctgatattatcttctctatcagaaaatgtcttataattttcacctcctaaaaaaagaaaaagaaataagaagaattatattgttctttatatagcttctggtaaaagaaaatatatcccaaactgctaattctgtagaggcttcgttcagaagttaagacaaaatatagatcataaaagaaataaagattatttttcattactactctcaaaactttagaattttaaaaagttaaaattaattgtcttcaagttttagtggaaaatgtaacccatttttattgtccaggaagttgaagaacgaattgttaattactaggaataataatgataaaggtgatgatgttggtaagaactgacatttattaagggcttacaatgtgttcaaccctatgtggagcattttacatgcaatcgctcatctaactcacatgagatagatacttccattggcctcatttcatatatgaggaaaccaagactcaaagaacttaaggagcttatstggtcatgcccagtgtgcgtaaagattacctttattttctttccaatggatatacctacagtcaaagtagtaactagacatttctcctgcccttacggagctcacacattaaaagatgaggcaggtgggtattgctattattcaagatgttgttcccactcatgctagagagaacaaaaagaaaggaatctggtgattgaggatggtctaggagtgctccccaaaggatgtaatatttggtattagccttaacaaacaaagagaagaagacaaaaacaaaaaaaaattcaggcagtaggaatagcaggagaaatcacacagaggtgtgaataattatgatattttcaagaaacagcaaatagtttagtgtttaaggaattatcaggtagaagtcacatgaatgatgaaaaaaacttacggagttttaatgtcagaaacacactcaccagctgatgacctcagtaacttcactgtgaactgaagataatgccaaaaatcagacttcatagagctattatgaggaataaattagctaatgtatgccaaatgcctgcctagcctaagttctcaattctaaaaacacagttttatctcttaactaaattcataccctttgctaccttcagaagtaattttggaactgccatctcaaactattttctttaaataaaatagtcatttggcacaatttccctttgaattttcctgcttggcaagttaggagagagacacaaatygttcttttttaaaaaaaaaaaaaaaaaaaaaaagatgcatagtcttttatcattttctcaaagaaagtcatcataacttcatccacactagcaagtgtcacttgatacttaattttctcatatttgtgcagttggatctctacattaattttggatagatgtgattgcagatacatatatttacaataaagtagctgtcataaaaataatgtattctaaagttaaaggtgtccatcacagtgcccagcgcatagaggcatccattagctccccttccctttctttcctttcaaatttatattaaaagccttttctgaatctacttcgaaaagctacatggaaagagaactccagacattttgccagtgacttgtttgtcatgtgtttgtcatacgtcttcacaattctagactaagtcttcacaatccagcaactatttacacccctatctacaattcagtgatcatttacaaactgtttacttatggtgaacgattatctcttcattctgtgaaaacaaaatatgtgttctcacttgcatgccttctttgaaaacatttctgaagtttgatatgcctgtggtccatttatctgattttgtacttaaaatgcttactgcctccatgtactttctggaacttgcctgctctctgaactccctctggactgtctgctacattcccctggcatttagatttcgtacattatatagttatgttcagtctgcagatcctctctccagcaaaatataactccatttaggttaggaacctgatttttctgtttatttgacacagagtgaagttttgctttggaaaatgaaaatcaccatgtgtccttttgttttgtatttgagtgttttttgtttgtttctactaaaccacacattcaataaagtttatccatgcaactatttcataaattactgaaacattctaattttatggtaattttaagacttacacaaatatttttcaattgtatacttatacaacaaattaatatcttctcaagcaacacttttaataattatttaaatttgttactcttcagattaaatgacctacagccatcacacctctccagaatactttcattgtcttttttggctatatctctatattttatttgttataaatatgatagtacagaatactatcatataagtttcattaccaaaaaagatacagaaatcttaaaaactaaatatttagaaactgatgtaactagttataaaaccataattatataagagagtattcttttataacaagaagtcttcacacctgtcatccagtgttttaatgcctatagtacttattagctgactatttctattattaccattttacaagcaagtgccattcttgaaactgattgatgtttaggaataaagcacatttrttacatgttgccaacttcagaagagcaatcttataacctacagcgctttttgagaagtgatgataccttatatttctggaactaatcactgctaaagaaagtaaaaaggtgaaaacataattttttttcttgtgaagacctttcattgcattatatgccattcaactataaagtgattatagtgttttatctgccaagaatgacagtggtgaaaggtaactttatgtatatatgtaaagagatgtgtacatatctatctatgtcaaccattgcccatatcatcttccaatttcagtctggctagtctgacttgtacagatatagaagaaggatgaaaattgaaagcaagaaatgaaattcttgttgtatgtaatcaaaatttgtgatgttactataattgttttattatttcactgcttcttccaaatcattattgtacagttttcactcaccagtctttgaagttcttgcctccattataccatcttgaccttatacactgactttgcctcccattatgccacctgatctcatctgctaatcctaagtcactgcccaaccttgattgaatactttgatccttggccactggtctttcaatttctgcctgtggtaccagctacttaggaggctgaggcaggaggggcacttgaggaggggttcgagtctgcaatgagctattgatcacaccactgtactccagcctgggtgaaagagcaagactctgactcaaaaataataatatttttaatcggtaaattccagtttgtggttgctgttaagagaggaaaggagaatgtataccaagctttttatgatcctaaagttcatacacagttttcaattgaataacattttagcaaactctttctagtagtcagcattgtcacaatctctttgagctctaggatcctatttataaataaggcatttatagaatcccagttttacagtactggagataccatgcatggcaaaccaaaacataagtaataggttatatttcatgtttttaagtagctcagctgttttccatccagttagcctcaggtatttacccaaactcaaatttgttatcctctaaatactttaaaaattatcacagtaaatggcattaacctgagtcctcttgacactgttgacccttttactctgcatttctaattagtcacaaggttttatatagtccatctccgaatgtgaatgaaatcttttatgtcattttctatcttatataggcttgacttagtccaagcccttgtgtttatagacaattcttaaatgaccatctgctaatcactttcactttcttgtccttctggtccttatgcaacaccaccatcatatacaaagtccaaaatacaatcttatctggtaactaccttgctcaaaattctcagaggccctctcacttctgtaagaaactgtccagaatgctgaatgcagagtataggacccttcacaaacaggcctcattgcatctctgccttagtttgagttcttacaaaagcaaagcctgaagacaaggacttggatgaaagtggcctatttgggagttgatcttgggaaatagacatcagggaggaggaaatatgagacaaagaaggagcaaaagtcaacttaagcaggtatcacttttagatcacaattatgaactcctagaaagtgtgcagaagccttatagaattgtccccctgaaggatggaaggcgggagcagcctaagggctgtccctgaaagtatttattcacttgcctgtacttttgtggcttggaagcacaggcttagtaggctcttgtggtggcaggagaggccctgggacagggggtacaaagaagtttagcaaagcatgaagtggggctctgttttcttggggtcagtcagagctgacatggaactgactagaagagctgctgttgaattagaggtggtcaaggaggctgtagtgtgtgtcccagaaatatctgccccactctccatctagccttgtctccttcctctccctcctaatccatctttactctaggccctacgacacacctaacattccagccagatctktmtccttttgctcatgcmgttatctgtgattccctccattccttctctgcattcaaaatgctagttatcctttaagacatagttcatatttcatcttcaagtaaagatgacccaactagacaaagtacaatacacttttctctgatttgtcatgatcattttctaaggtttactggagtcattaacatacattataataagttatttatatattcatttagctagagtgtacatttcttaaagacagggataatgtctaactcctatttatgtcaccagctccaaacataatagctgcttcatagctggcattcaataaatgtctacttatttaatgaatgaaaatatttggtttttaatgtctagtttaaatttgtataaaaattaattttaaatttagaattttttcaaattgatggtatgaaactttttttaaattgaaaaaatagctgggaagatatacttgtaccatatatatacacatatacatacacaaatatatatatacgtatacatatatacacacacatatacatatgcacactatatagagayatggtatatgtatatttacataactcacgtgctctctctctcttytctctctctmtmtatatatatatatatacgtatgtatatgtacttttactttagtaccagtagtaaatatcaaaatatgctctcagaaaatacatttcaggtgtcacttataaaaatataggtctcatttatgtagtataaatacatctgaatgttttactagttggagtagtttggattctaataacaagatatcaaatatagagattttataaataggtgagtatatagtatattttcatattatccaacctattatttttttaattatgtcacttttttgttgagtacattccataattttataataatttagttttcttctttcaaatgccaaatgttctaatmaaaaaaactcagaatttttctttccattgtggtatgttaaaagcacattgttttttgtatgtcacagtgcactgagtcttctgatttctttttaccaatttttggctttgtgatttccaaaggaacttgttggtaatcattgcgtagtgtgaagtgggaaggtgggtgggcagaggaagggtgtagatattttaaagtctggtttgtggacaaggatatgtattacagatagactacatgattttacatcatatgttccaactattgacagatttataaaattataaagactgagggactttaagcaatccacacttaattttgttcttagtgctaaggtgtctgaggagaggggtagaggtaaggtaaagatgggagataaaggaaagaagagatgttagagaaataagaggaagtgtattagtctgttctcacactgctaataaagatatacctgagactggataatttatacaggaaagaggtttaatggactcacagttccacatggctggggaggcctcacaatcatggtggaaggcaaggaggagcaagtcacatcttaacgtggataacagcaggcaaagagagagcttatgcagggaaactcctccttatgaaaccatcagatctcatgagacttattcattatcatgagaagagcatgagaaagacacacccccatgattcagttacctcccaccgggtccctcccacaacacatgggaattgtggaagctacaattcaagatgaaatttgaggggggacacagccaaaccatatcaagagggaaatataaaagaaagagagaaggaaggatgaggaagggagggagagagaagcttgggagctatacagcattgtttcagaatataaagactgctattattgggtatgcttaacaatggaaatgttttactagcgcttttattagcgggcaataaaagacatcctggagggaaataattcagtcactgtcagacgttcccacttcaaccataggccttcaacttttggtaggaacataaagtcttaaaataggcaaaactgaaagctgtcataatcaactatcatcagtcatcagtcaatactaatttcttatagaaatagcattaattcttttcatctaggagatcttgtttataaaggagagaaattgtcacccatttgggctagccctgccygaaaatgaaatgatgaacttgacttctcaagcccacatgacttctagagcatgagatagtctgctgttctgctgctgaaagtcagcaacctagcayagggataaggaacgtggactctggcgctaactgcttggggtaaaatcctggtgccaccacttaccagtttcccctggttagattactcagccactctagatttgttttcccatctgaaaaaaaaaaaacggcraaaataaaaatacctacccctctgtattagtcygttttcatattgctgataaagacatacccaagattggacaatttacaaaagaaggaggtttaatggacttacagttccacgtggctggggaagcctcacaatcatgacagaaggcaaagaggagcaagtcacaacttacatgaatggcagcaggcaaagagagagaacttgtgcaggggaactcctctttataaaaccatcagatctcatgagacttactatcatgagaatagcagggaaagacctgcccacatgatttaattacctcccactgggtccctcccacaacatgtgggaatacaagatgaaatttgggtgggaacacagctaaaccatatcaccctcctaaacwytgtgaagattaaattacttaatatttgtataacacttacactagagcttgtcatataggaagtgctgtataagtgtatgcacttatgcttatgaaactgggcctttgtccctgaagctttgctccctgaagactttgattacatgagccttctctaataagtggggacataaaataaaacatatattatctttgcagaaacacctcaaacagtgcatttcattcataatttgatactcaggcatgccctaaactctcagaatgacttaagataaacgtgatgtctaaatgaagccaatgtaggtggtgatgatgaacagtttaccacaaccacagagcttttaccaggtgttaagcatcaaacctcctcttccaccttctgatctgaacttccacataccaaagctctrgcatcaaaacttcggttttatcttctgcgtcttggcctcttgacatacacttagcaagtgagatcttttcttcttgttttgggtaagtcttctgaagtagggagtgttgaaataaatggcttatgacatgtatagtgttgaaataaacgtttattttaacacttcataagtcatgagccatttattttaacagttttcacttgaagtttttaaataataggttttatacagggatgtgtcatccactctgtttaatgtaaaagtgaatatgtaaatacatccatctatctaatctggattttacaccctttggctgccaaacagcctggttgccatagtttctggagtaacctgaaattaaattttcttctctttctctttctgttgataggtaatttgatggtacataaggtgattggacatcactccattaatggacaaatggttaaatacagtttttttttcagaaatctaaaaaagtgtcagcaaagaccagagttgacagttaaatgctttcgtaactagaacagyttttactagaaaatgtcaggatttttcctttcgtttttagaattaatagcaacttgttgcagggttatttttgagcattcatacaartaagtatatatataaaaagtatatgtacagtgcaatgcctagagccaataggtacatacaaatatcaacttattgaaggaaggcaaaatgtttgtgaaaaacggccctagtttgggagtcaacatatttgggtagaatctgagaccttccagttactcttataaagacaagatatttaacaatttttagcataaaaagtgatagctcctggagattctgtgagatttagataaagtaacttaagtaatattaataaaagccttaatagagttctgtgtgcatatttagttcattcaacaaaggatagttattgttattgctattattccttgctaggaaatggcaattaattaaaatagctatgaatgttatatttttaagaattattttcaatattcacaagtttgtgtccttgtttttcccaaataatataggtaaactgatatttttataagagcaagaagaatccaagtgttatataggggaaacttttaaaaataaaggtttattttttaatgattttagacttacagaaaagttgaaaagatagtggagagaatccctatatacttctcatccaatttaccctgtctctaattacaaggagtattttaagaatttgtcaaagtaataccttgtgttggaaagtttttgtgccaaaaccggaatttaaatgctaatagtgatgggaaatgaatggaacaaaaacattgtgagatggaggatgagaatggcacaagggaacgatgccacgagaagggaaattaaagggaaacacttagcaaaaccttagctctcacaaagacttctcatttttccatacataaaacaataccctcacatatctaagtttattgaaagagttagttgagacatgaaagggaaatgtttgcttttgctttcagatactaaaaaatcttttaaagaataattaaaagctgagaagtaaaaatgctccagaaagaatacaaatactggcattcgttttccatttgacattttccaatgtctataaatgctattgatttcaaattctaaattatttcacttctgaacacgccttgtaggattattacagtgctatttgtgtgggcttgtaatcattgattgtgacattatactctccataaatgtgccattgtgaataattaaacttgttagtattttgtttgcctacagcctttagagtgatagcccgttttttggcaatcataatatgtttctctagttcagtttgtgctggatatgggaaatacatcatttttttctgaaactttttcaatacatttccattttcaaattttaaattttaagaactgcttcataatatattcagcatttagtaaattagaattctgggagtcttatgatttgtatttcgaagtttatgaataaataatcttctagagtgaaagcagatctttttcataccagttactacctgtgaaaacacttgcctagagtaaaacaaatattagtgttccaaaaatatatacattgtgaccattggccctatttacactggattgcaaatatacttgaaaaaatttgaaagtgttatagtttaatatgatttctgttgacttctacacaattacaatgagtctctgagctctgttgagaaaaacagtatatagcggttttggcaaaggttactgaaaaatgtctctcccctcaaggcatggaaaccatgctctagctctgcctctgtaactagatttaacatatctgtgatgcccaatgcccaaatctgaatggtcgaatgctgtttrgaattattatacacaatttaagcatttggacgatgagacacttatgtcaacaatataaattggaaaaaaacaagaaagagcatctacraatgtggaaaaatatatgcatcacattttgcttagatatgtgcattagacacagactatatatcctttccccaccaagttggtcctgacaataggctgtctcctcttcttgcaaatggaagttagctaactgccatttggcaataagttgagtcatccagggttgcacactggccaatttgcctgcatatccatgccagtagacaaagtaatgacctcaatttgacaagagcctgaaatttcatcagaaaacattaaagattgaaaaaatagcaaatagagaaaggatacttcattacaaatccaccatagacttgamataactatgagccaaatattccttaaagatttgtctgggaagttaagtttrtgactacaaggttttaataggaataacacccttgagtgactcctctctcgttttggagaggtaaagatatactcaaataccaatttgggcataaagtgcagaaacagacattctcattatatgttaacaatacttgtgatcagttgatggcattttttgaaatttggctctggggtctcacttagcactacagtcagcaaagggccaaactgcttctttggttcattgaagctgtgcctttctaaatagagtgatttttagcatgcctggctaattcaagagttacgatttagaggtatagtctagccgtaatacctgtctttatatgctcatcatttkgtactccatgtgtccttattcttagtaactagtgatttatcactgacaatgtgtgtgtgtgtatgtgtatgtttgtgtgtacgtgcttatatgtgatatatgtggcttctttaaaagcattgctctcaagaaaatttcatggagattacgaacattaacaagagcaacaccaccataaaaattgctctcactgggtcatctaagttgacattgatttaccttacatgatgtactgtagatgatgatcttcagtcycattcacctttaaaatataagctcacagattcattttttttctttttttctttctttttttttttttttttttttagacagagtttcactcttgttggccaggctggagtgcaatggcgcaatctcggctcactgcaacctccgcctcccagattcaagcgattctcctgcctcagccttccaagttgctggagaggcgcctgccaccatgaccaactgattttgtatttttactggagatgggttttcaccatgtcggccaggctggtctcgaactcctgacctcaggtcatccacctgccttggcctccccaagtgctggaattacagacatgagccaccgtgccctgccacagattcattttctatttgcaaatgggaagatgtcctcatatttcataaaattaagtatttgaaagattctgaccatcaaaagaattttttagaagtggattcatataggagatgctcacttttgagatggacattttgctacttcttatttatgtattcatatatttttatttttaatggagtatagttaaatacaatataatacacagatatgatatatgttcagataagttagctttcaaaatgatgcacatctgtagtaacacaatctgaaacaagacagaggatatttccttcacaccagaaagttctcttgggttgcttgctagtcaatttctccatctccagctgagacttataccaccatagactctttttatctgtactaaaacttcatataaactaaataatattcattctattctctctttctctttcttacctttcttccctgctacttccatgtgtgtgtgagtaggggacatgtctggcctcatttacrttcaatataatttttaaaataatattgtcacatacatcagtagaaatttcatttttattgctagtagtttacattctactgattgaccaaaatgtgtttattcattctccaattgatggatatttcagttgtttccagttttgagctgttatgggtaaggctgtcatgaacatttttgtacatatacttttttagttctgttttcactgttgagtgaatatctaggaaagaaattgctgggtgataggatagatgtatgtcattttttaaagaaactgtcaaacaattatccaaagtgatttatctttatttatttatttatttttattttttatttttttgagatggagtcttgcattgttgcctgggctggggtgcaatggcgtgatctcggctcactgcaacctccrtctcccatgttcacgcgattctcctgcctcagcttcctgagtagctgggattacaggcacacaccaccacacccggcttattttttgtgtttttatagagacagggtttcactatgttggccagactgttctccaactcctgacctcgtgatccgcccgccttggcctcccaaagtgctgggattacaggcgtgagccaccatgcctggccgtgatttatcattttatactccttccagcagcatgtgagagttcgttttgttccacattgttatcaacatttggtgttatcagtcttttggatttttagccattcctgtgggcctaaaatggtgtctcatggtgattttaatttcgagttccctgatgtggaacacttttttatgtatttattgatcatttgtatgtctttttaaaaagtattgttcaagtattttgtctattgtaatcttttaactgttggtttctagttcttcatgtattttacatatgagttcgttttaaaatatatgtgtgtgaatatatttttttctagactttggcttctttattttcttaatgatgtattttgttcaagtgtccagtttatcaattttttttttaaattagtcgttgcttttaacatcctttccatgaaatttttgcctaattcagggttacagaaatattctccttttcttctccctaggaactttatggtttcaagttttacatttagatttacaattcatcttgaatctttaaaaaaactgtatatgaagtgaggtagaggccatggtttcatttttttcctttcttttcttttcttttctccccccttcctcttaaaaatatcctgcttttctcacaccatttgttagaatggcttttttcccctcattgaactgacttcctgccttggtcaaaaattaattggccttacctgtgggactatatcaggactccgttctctttcacttatttgtcgtatattctaatgccattgtctttattactataaatttaaagcaagtcctaaaatgaaatcgtgtccttgagttattttctttcctgattgtttttgctaatctacatcctttgtatttttaaataatgttaagaatcagcttatcagtttcttcaaagaaacctttttggatttttgttttgagttgtgttgaatctacagatcaatttggtgaagtttaacatcttaacagtattgagtcaacaagtctatgattagtatgtctctttattttctgaagtatcatgaatttttctcagaaatattttacaaaatatttttagtgtacagatcttacatatcttttctaaatgtactcctattgttgctttttggtgctattgtgaatactattttttaactttctaattgcttcttgtgagtatatggaatagagtatatagaaagtatgaagagtatatagagaaagaattttttaacataaagtctgattttagctataggtttttttatagatgttctttgtcagattgaggatagtctcacccttgttttgcttacagttctcatcacggatggatttcagattttcctgtgtacactttctgtacccttttgagatactcatatgtcttttctcttttattcagttgattggtgaattacattaattgattttcaaatgttaaaccatgtattagtccattttcacactgctaataaagacatacatcagactgggcaatttccaaagaaagaggtttaattggactcacagttccatgtggctggggaggccttgcaatcatggtggaaggcaaggaggagcaatcacatcttacatggatggcagcaggcaaaaagagagcttgtgcaaggcaactcctgtttttaaaaccatcagatctcattcactatcacaagaacagcgcaggaaagacccgcccccataatccaatcacctcccactgggttcctcccacaacacgtgggaagtgtgggagttaacaattcaagatgagatttgggtggggacacagccaaaccatatcaaattaccttcatattcctgggataaactgtatttgatcatgatgctttacaccttttatatattgctgaatttatttaatacagatatttgagtctatggatattggtctataattttattttcctttagtttatttgtcaggtttcaatatcaagattatactggctttataaaatgagttgagattggctcattcttcctctatcttctacaagagtttgtgtaagatcggtattattccttcctttagtttaatagaatttaccagcgaagccatctgggcttgcagtttgctttgtgaaaatgttttttattatgaattcaacttgtgcaatagttatggatctatttttaattttgactttctgttttttgttgtctcaattttggttagttgtgttttgcatggaatttgtgcatttcacttcaactgttgagtttattgtatgacattgctcatattgttctattattatccttttatatttttagaaactgtagtgatggcatttttaaagcatttactatgtgcttgtcactgtgctgcctgctttacatagattattctattttattctatttggttctgtattagatacattagaaattcatgcctactcagtggctatacaaatcactactagtttttatcatccatttggttgaggcacatcctcagcttgtagtccaaagccctgaaacatcaggggtctcaggggccacacagatatgcacagcttgaaactagcttcccatttttggcaagtagctgacttgtggtatgttaagagaggttgccagattgctccatatcctcatgctctagggtagtattacagttcctttaggtaatactttaggagatcttgtctgaaataatgtagtcttaagttctttttcctttcctagttttttgatcatatgctctttttaatacatgctacagattcctgcactatttatgatgtttgttaaaagtatagatgcatctgtgaaaatgataattcacattactggcaatagttactgaatggttgaatggagtggaacacttgttctcttccattatataagctctctatattatgaaaaagtggatcatattattctagttgtagttcttatcccttctgtttgataaaaatcctaatattacttttcatcagactagaaagaactttatgatctctagaaaggctgcagacagggacatgtataaagagtacagattctctttagtgtcccctgagaaatatttttattggcagtaaatagcaatatttattaatttattaataattaacaattgctattaaaataggaatattatttttattaacaataaatagctttgaacttcccttacttgatattttgtttaaatttaaacctgtttattcttatactaggtcaatattttttaatgcattttaaaaagtaaaatgccatatagaaattgatattggtagctgcgagagctgggggtaggctgttttcctgcctacgaggcaacatccctacactatgtaatgcactgtataccatttcccaacctgagaggctactttagttttgctgttaacgtgttttataaatatgatttgttcattactatatctgaaatttttctcaccttgttcccaaactctgccacagtttgaaatatcctaatttttagccccagacctacccacttatctttcaagagcccaactgaagtaagtcctgcatcttcctcaaagccttcctagaccacctcagatttcctggctctccttgtcttctaagtttcagcagtgtctgttgtctgacccacaaaattgggcatgtgaacatgggttgtccatgttttttatctcattgacccagccttataagcttgctgagaagagacatctcttctgctgcctttgagcaacagccatggtgctgggtacaagaaataattttgactgaaaatgatttttcattttttaccctattgaaatttaggaagaaatgttattgtcaactaattgatagagcaactaaacagtaggatctctctttttcaaagtgcctggtcagttttagagtgagcattgattcagagggttcagataagggcccaggtagagatgtccttgtccacaccacatctttgagagttgtacaggccaaagaagagaacaaaacgccatcaactgctgtacagcctgtgtttcagtagactctgagggacacagccttatcacagagcatagagattaacacatgtaattctttgtaaagtgaaagagaatgygttgctgagagtgaaaggaatggttttacagtacagcaagtgctgccatggacaccctggccatagaaccacccacagagtaaacagagcacaggatttcagagagaaaagaaattgtgattttccaaaggaagaagtaataggatcctaatggatgtggaacctcttttttatttttctgtatgttctcagaataatgcccacttgttatcctggattctcccaagagtaaaatgaaactccggtcatcggcattatcattgtcattataatcttcctccttctcctactcaaataatcatttttgaaaacacatagaatggtgagatttttatgctgtgtaacatttgctctggacatccttaagcaaaatcacatgagaaatattacttcaagtccactaagtctgtcataggtgagaataatttcttggctggggaaatatgtcttttttaaatagttcttctatttatacttataggtaaacctttaaaattrtaggcaaaaagcattgccagaagctcttatttggagagattgaggcatgtgttaatctggaaataaagaaaagtcctcacattcaaacccggcagtgaattttatggtgatattgcagactaattgtcttattgttgtaatgcattatctaaccacacggccctgcctttcttacatgcacatactatttaattccttgagcctgaatttccatgtctgtaaaatggagataatgtatatgtgacttgtaatgatgtcgtgaggatataaataacgagtgaataatttagcagagcaactggtacttaataggttctcaagttatttcagtctaaccataaaaataatattgccactggctttgaattctaattttattttttcatatgaagtggacaccagcttaaaaattataaaggcttcaaatagttttaccactcgcaaccaagacacactgtataatcccacatcaatggatcttagtagtataaggaactgaatagcaaggaagaaactgagttagaactctggtctattttaaatgataaatactagctgcgatgtaaaaccatttgtgcgtttcctcaataactctactttgaaagtgcacaccatttttaaagtaaaagtacatttaaggttgatagtaagaaaaatttactacttgttcctgcatcaaggttttagagcaaataatacaatgaaggtattatacatattcgtagatatatatgattatagttcacaccagcctatcacataaatcaacttgtaaaactctcctttcttgtttccaaagagagtacatatgatacggcatctaccatggaaactaaaccaacttggaaatagcaataatgtccttaattcagtaattctttttcttttagctgtgtttttcctctgggtaaacctctctgcgcactggatttctttctaaatctgaatgtcctctctggccatattgaagaatgtgctcactgtactgtttcattaaactgctgtgttgtcgggtaattgtttaaacataatgccatagcactatcaaaaggaaaggtgaactaatggcatttgcaaatgtcagggattatcttaacacttttattatagtttataaaaagtaggttcagggcatttcatggcaattatttctacagaaattggttatttaaataaattgctaattatctgaagatgacagtattgaaaatgctactaatgagttgtttaataagtgtagcttgtggtggccacctacaggttgaaaatagaaagaacatacatatagactaattatgcctagtaaatgccatatatttttctctctagtgacaaatttaaagacatttagctcttcatgccatcttttgagtcttggacagtatagtgagtttctaagctcctcataaatttggttttggttctaaaacaaatttcactttgcttctgtaattgtctttgtcctattattcttggacataattatctttagttatagctagtatgattttataatttatcatctgaactgggatacttttagaccaaaggaagatagctattgttacattatgtaattacaaataaatacaggtataataaactgggactctcttgggcaaactgggctatatggttactctagttatacaattactagctattctacttctaatttaatttttatccaacaattaatataatgtctatttttctataatgttgatttttatggttttatcatacctggataatatatctttattaattataacaattattattattaactcttctttctaaagcttaatttatatccagacacttaaaatcaggaagcagcatagcattgtggttaagagcatggtgttgggagtcaggtaggcctggattcaaatactggacccatactttctaacagagtgatcttgaggatgtggcatttatccctgctgaatctcagtttacacatctataaaaatagagacagaaatatctatttcatagtaatgtgaccagcacaatgtatgcaaaaataaataggaaactatctgtcaattagaaagcactcaaaagaggagcatttatatttaacatatttaatcttaaaagttaactcatacttgcttcttttctaagttaatcactggtatctgttggaaaactatagagcatataaaattgctcttaaactaccaagaataagttatagtatccccagattttgaattggaagagaaaaactaatccaatatttcctgtagtacagagaagtctttctgttgcatcttgctgtcaagtagccatcaagattcaaggaatagggaagttccattgtagctgctttcattgctgaatttacaataaattaattataaaaataagaataataaaaccaatcgtgtatgctgaattgttcgttnnnnnnnnnnnnnnnnnnnnnnnnnnnnnnnnnnnnnnnnnnnnnnnnnnnnnnnnnnnnnnnnnnnnnnnntcatcctattcactctgttgtgtttgtagatcttttatctaaaatattggacacagaaccaaacatgttctttgtaatgtacagaggatagaatcactgtatgtatcactcatatataaaaatgccacatcatatattctgatgatgcttattctcgtaaggtgaattttaggaacattataaaaatagatatttttactacagaagtaaattataacaccattttatcaaaaagaatccaacaataaaaagtatatatatataaacttgaaaggtcttcaatccctttactgcaggactcaccccctttcccagagatgatacctgtgaacagtatgaaattcaacattatatgcatttacatgcacacatactaaatgtaatcacatacttttttgccaacaatgggarcataccatatatattgctctgctacttgtgattaactcttaacattataaattagagctatttgcgtgtcaattttaaaggttttctggaatatcatatcttggtgaactataatttatttaatagagtaactactcatgatcctttagattgttttctacrgtttttctatagaaagtaatacttccaggaacattgttgtatatgtaactttgtgtctaagcactaatggaacagattcttcaaaaaagacttagaagatatatatatatatatatatatatatatatatatatatatatayacamgcacacacacgttgcaaattacacttaaaaatctaataaagatttattcacacagatacacacattyactaccatagactcaagctatgaatattcataattttgaarccaatkaaataatatatgggttacaaaaggaaccccaaatgttatatctaggaatgaatattaacaacccttaaaaattaagtgtttatccttatatgtgttatagctgaatgtttatttttctgatcaattttctctggctttgacactaatattagcttatacacattataagctaggcactgtgccaagtctttcccatgagttgtatcatctaatacatccaaactccctggaatattattagtattaatgtccttgttttttaattagggaaaaccaatgttttaggaagttgaggagcttgctcaaagctacaattgtataaagcaaatggtttgagacttacacctaattggttggacttcctctgtgttctcatagcatcagtctgtactgatactagttttcttaggcaaaaataatccagagatggttcttttggtaattgctgcattgtcacttctcaataataactgaaaatgggaactttcatgtcgcagagactttatttttaatgtattacatcctttttaaactacgtgacactggataagttatttattcagcttgagcttctcttcctttatgtacaaaatagagaggacagcacctagcttcagagttacaagggttaaagtacacagtgtacatgaagcccctgcctcagtgtctgcacgtggaaatcactctatgaatgagtgatcctactcattccagtaacagtagctgacactttcagaaaggagaatggccctctttggtgaatgttattaattctcttggtaaaaataaatgcctgacacatgctaggtactgagttatttaatatgaatccactaggaacatattgaatgcattatgaagcagaaaaacatagctatgaagataggaagacttggagaaaacataaaaaattcaactaaaattaaaacattttcagaagaaatttttagcttttctgaaaaaactaaaataacatcaaataatcaactttattttttccatttcttctctttaaattacacatctctacatataaccctagatccttttagtacttcagtttctgattgaattatgcaaatattctcagaggaccctaatccatgtgtaaagatgttatttttaaataggtgtgtcccatgtatttattagtatattaacttcattaacattgtacacttaattttagtaaagcataaatttgttggtggttcatttatatgtaggttataaaaatcaatctctcacctcctaaatccttgaaattcttgatttactaattttttttcttctggatggtgttaaaactgttaacaattagacartcaaggttcaatttctaatgaatttgttatccacttaattcattatattttaattaatgtaagcaaattaaaactacattttctttttgcatacacagtgagcacgaatgagtattataacccaatttctgttttattgccagctagagctattatcagggagtttattgtggacttagttctaacaattaattgtgtaacagtcgctgtcctagaggagtcaaatgattagggggagaaagacaaacagaattaaactcaattattcaaaattccagttatttagcatatgttccacactctcttgctcattaaaaattccttttttcttcaaggatttagtcatgcgaagtacatctctgcctccttttcaccaataaacttgagttcagatattgtaattaaaatccatggacattttgcttctcaaaaaaaaaaaatcttaaatatattgatgtcagccttttgaggctttttttcctttggggtcaaagtaatcttcatcaacattatgacactgctaaatgacagctgttaggaaaagagaaaaaggaggggacatgtatggtcctcttaaggtttcagaggataaagttctgtcatcataggcatcatgcttttgtctccaatttaaaaattggttttaattgcatcactaaacacacaagaacatagaaggcaatgtcaaagtaaactacataaatgctcactctgaaatcaattgtccttgagggcagtacaaattataacagcaaacacttctacaatttttattatgtcctcgccttttatatatattatgtaatttattcttcaaaacagctctatgaagacgttattacaatttttattattttatagatgacaaaattgagattcggtgggatttaaaaattttcacaaagtcacacagcttataaatggaactaagatttgaacctcaacagttggcccagttgtctctctgatgttggtaactagttcatcctcaaattgccttcttgatagaattcatattaatagtatttataaaatgtataatgttctaacaaatgtgaattgtttctaatggaatactggtagagaatgaataactggattcaaattattaacttgaaataacctactacaatgataagacctggtgttttgtgagtcaagcgtagatatatagttaggacacaaactgatgamccaggaaaaaaaaagccataggtgcttaaaaaatattttgtggatagacagatgaatggataaatgaagactgagtaaggaacctgattgtcataatacattaatacacatatatcaatatataatattatagccaatgatagcrtttctgaaattgtatttaaaatgatatctgacaaatgagagttcattttcttaagaaaaatacttttcatcaaaatcagattgattaacttaattcaaartctctggcttactaaaatgtttttctgaaacatgaatcaattcaagaatgttctgtgtagtttatctaagacaatctatgaattcaacacactgatttgtattttaaattatgactacatggagggcctagaatgattattgaccaaaagttacagttcagtctagtccaccacaagagccacataatgcaaagcaaagttcttggtagcaatgttgcaactcataagtccagttcatttttcgtttgtttgttcgaacctgcagcttgtttcaaaacgtgggaactcagaatggcttgatttttattggaggattccacacagttgaagcagaatggcttgatgtaactgaattccccattaggttcatctggccaccccatgtagatgagggcttaatttaaattgcatgttacctgttagttcaattaagtgtataggatttcaatttcttgatttaaaccttgttgtttccttaaagatagagcccgcatacacattctttgaacttctcacactggcttcttcctccctagtctttggtctaaaatcattaatcactgtagcagtgacaaaattttaaaagacctttatctcgataattgtaattcaggaagtctttatgattttaattggcatatgtacaattttgtatggcattgatatatgtattttctttaaaccaacagttttatttttatcttgaacctattattacttcatttctgtcattttaaaactaaaaataaattctayatagcaatttagaaagatctttttatataccttcattttccttctagaaaccgttcttagtggatgaagtcattcttaagaactattccccataaaaatgctgagaacaggtagattatattttgtattaaatcagttgagttataaaaaatcaaactgggtttataatggaaataaaaactgaatttactgtagtccagcaacagagagatcatttcttcattttttggatctcatttcctcagagaacatagttactcttaacttgaaaaaatactcttattttttgaaaagattttctgttcattaggtacattataaaagcgttagaaaggaagaaaagcataaattggaaaatgtcttattgacctaattgaacatcttcaaatgccaataagaatttgctgatttttttaacacctgtgtaataatgttgccctttaagtgtcactggttaatttttcaaagctgtgttgcctttttatgtccattaatatcaatagaatatgtggccaaatccctgtataccactttgaaattttaccccttactgttaatgatagtcttctaacagtggaggtagaaataaattatttatctacttagctcaaatttactctcttgggtcaactaaataagggaggaaaaaaaccaatatttctttattacttcaaagtagtgtgtatgtaaagaagccattgggttggtatgtattgrctatgccagttatattatgcagagatagctgtgtgtctatcaaaaagtttgttacagctttccttaaaaaatgctttcctttaacttttgttatgtagatttcttttagtataactgaagatatgtgtatatatatgtgtgtttttgtattctcactataaattctgtccactattagcctttttatggttaaaacataaaaactgtgaggaatcactgataaataatatagaagtagaatcttaatgtccggtttctaatttgcccaacttaatactttgtatccaaaatgtctattatgaattttgaagtgtcagcattgaatattcctaactaaggaatgctatagtaatatgtagaggaagatgtttgaggtgtgggagccacaagtagacatttccacaaacatttttgtgttgagtacaaaagcagtagtcatgcaaacgttcaattttatctgaaacagatatgaacaggataaaaagaaagccaccgatttttttttttttttttttttttttttttttgagacagaatcttgctcttgttgcccaggctggagggcaatggcgcaatctcggctcactgcagcctccacctcctgggttccagcaattctcctgcctcagcctcctgggtagctgggattacaggcgcccgccaccaagtccagataatttttgtatttgtttgtagacacggggttttaccatgttggccaggctggtctcaaactgttggccaggctggtctcaaacttctgacctcaggtgatccctctgcctcggcctcccaaagtgctaggattataggcgtgagccaccactcccagcctctgttttagactttattttttagagcagtttagattcacagcaaaattgagaggaagatacagagatactcaatatatccactgctccaacacatgcatgacctccctcattatcaacattccccactagagtgatacatttgttgtaatccatgaacgtgcattgacacctatagcctaaccacccaaagtccgaactttacaataggtttcacacttggtgttgggcattctatgagtgtaacagatacattctctaagtgtgttttgtgtgtgtgtgtgtaaatgtataacaacatgcatccaccattatagtatatatagtattttcactgtcctaaaaatcctctttgctctgcctatttatccctcccgttcgctccttactaccactgatattttcactgtctccacagtttttccttttccagaatgtcatatagttggaatcatatgctatctagccttttcaaattgaaagccstttaactttttgtttcttttcttatttaattattttattttattttttaatttaatttaattttaagttctggccattttttaaaggaaggctgtgtgtgctacctcagagtaagcactccagtaaatacatattgatattgctggtgactagtggtggtggaggtgatgacaaagaactcaccacgtgaggctgaaccagttatttgtttatgttgtttgtgaagccctggtttaaggcagtgtcaaattcttgcataagttgaactgcctttagttcagaaaatgcttaaaggacccctgacttataagggaacaccaggaatatcaaattatattcctttattatgaaagcattaatgtactctgggatgtttaacatttgagaattcaaagtagctttagtacaatatactcatttttaaaatagccccaaagtattctttctatccatacaatttttattactattagggaataatatactggtaatgtctggctaattaaatattaaaaaattaaattcatacactctaattactggattctagtaaattctctttaacttgattaaaactttctaatatgtgaaaaattggattagactccctattttttttcaaattgtgggaagtacatataaaaagcaacatggaatctgtaagttcatcagcaccttgcctttttttacagagtctatgttcgcaacatctgctttgtactctaaagaaacataacatagctgtatgtctactgatgtactatatgggattgtttttcttttcaaaatctgctgttccttgttttttgtttgtttgtttgtttttgagacagagtctcactctgtcacccaggctggagtgcaatggtgtgatctcggctcactgcaacctccgcctcgtggattcaagcagttttcctgcctcagcctcccaagtagctgggattacaggagcctgccaccacgcctggctaatgtttatttttgtatttttagtagccatgggatttcaccatgttggccaggctagtctcaaactcctgacctcaggtgatccacccacctcagcctcccaaagtgctaggattacaggcgtgagccactgatgctcaaatattctwtgcaatcttttacacattactgtatatccaattgtaatatgcatgtaatatgtgtgcacagagaattctgtgtttgctatacctacttgtataacatgtctaaattcaatattggtatcaaagtccttaaaataaataaacatccattaacaaattaacatgctttaaaacataacatttatacactacatatgtatatacatcttaaacagagataaagtaatttgaaatttgtccagtgacgctgtcatcacatcatagtaatagaagtaatataagacagtatactcaagtgrtcagtgtgctaaccattgattattctgattttgtgtagggacagcaatcagacctattgctttgagagctgtgacctccattgctcgtgctctgcctggatttcccattttggctactggtggaattgactctgctgaaagtggtcttcagtttctccatagtggtgcttccgtcctccaggtagtcattgtgtttgtctgtcccttttaaaaatctccatctcacaaatgcaatgtaagttatgtgacaaaaaaaaaatagattcgtttttgggcctcttgaaaaggaggccatttgggatcaaaatggcagcatgtattaagttcctctgacaagttatgaagagacctgaggtttatttcctgtcctgttgagggcttacgaacccactgtcttttcttaatacatttattcacccatgtgatcctgaaataaataagatcaggtaccaaaatgagtactrtcctcctggaaaaacaatacatgaggaaatctgagtaaaagtaaaatctcaattgaaaaacaaaatgaaatcaagggtatgaaaatctatgtcattaccaaatttgatcctgagattcctggcagccaaagaaataaattattagctttataacttttaaaatattaaaataaattgattgttcagcttcttgtggtacaaagctgagggaacttctttcttcccttgtcctcttaaagggatgctgtgagatgtagtgaattgtactcttaataatacccctaaaataataaaaattagaacattaaaaagtattcatatactttttaaaaataatgttgctcaacatgggcttagtactgtcagcrcattttagcataagaatttctcattcaggttttgtagtctgaattgacctaggkaccaagctttttatatgactagactgtgaactgtgaactctctggtaatactccattaataatgacttctcactacttagcattgatggtaattggaaagcagaaagtttggcatcacatattctctggcaaaagggtagagtgtaaatagttcatgttgctaacttgacaatcagaattaacattgttctatgaaatacctacaatctatggtggaaataatatgtattagaaagctaatggaggcagacttctgcttccaagaagatggaatagatttacttttctctgtgcctcccactgtatacagctaaaaacccttatatgtaaaactgatgatataagaagactgaaaggtgaagagaaggcagattggctagggatctcaagacccgagaaacaacacagtggtgagtttcctgsgatttttttcctcacatatctcatctcacacttggagccaaagaagctcaacarcccagaaacaacaataggcacagatgaaaagcctgctctctctagccaaagaaccaggaaaggggcagtctagcaagagagagaacttttagacataacttccctgctccacccaacaccacggataaatattccatccctacacccatccatgcaagcaaaggacaagtagggatcttagacgtccaccctcaccaagcagtctcacatccccactgggcaaaaatgagccctcacccccatcccatatcagaagcctggacttctaccctcacctgagagtaatgaggtgtccgtcctccccccttctgcagtagtagtagaggaggtctagtgcagagtcaggaccttcatcatcaccgtgtggtaataaggccactctcctttcctccttcttatggtgtcagtgaaggccaagtagggagcagcaacaaggcgtgcctgcatctcttagccagggatgtgtcagtgcaggcttactggagagccagaattctcacctcctcccagcagtaaccaggagccatgcccctcgggtgtccaagaaagccaagtaagatacctgggcttctatctggcattaaggagstggcattctccacttcccctgccagactgacaccaaggaaagctagcagaaacaaagtttaaataaaatcaagagtctcttaatattataccaaaattgtcaagatttcaattaaaaattactcatgataccaagacccaggaaaacctcaggctggatcataaaaaagaattgatagatgcccacattaacatgacagagatactataattatctgtcagatattttaagcctccattataaaattgcattaacaagcaactacaagtatgattgaaacaaatgaaacaacagaaagtctcatcaaagaaatagaagatataaagatgaaaattttggacttaaaaatgcaatcacttaaatataaaactcagctgatgtgctcaatagtaaaataagagaacagaagaaaraatcagtgaactagaagatagagcaatagaaattggcaatagaaattggccaatatgaaaaacagagagaaaaaaagactgaagaaaagaatgaaaacagccctcagggaactgtgggactataacaaaagatgtaacactaatgtcctcagagtcccagaggagaggtgaaaaaggcaggaatggaaaaaaaataatggctaaaaatattccaatttttgcaaaagacataaacctgtagattcaagaggtcaaggtagacttccaaagagggcagcttcaaagaaatccataccaaaatccatcatattcaaatttctgaaaactgaagaaaaagataaaacctcgataacagcaagaggaagatgacaccttacttattggggacaaacaattctaataacaggggatttctcatcacaagccatggagtctggaagaaagtgggacatttttcaaatgctaaaacaagaactgtcagctcaaaatcctgtatccttcagaaatgagccagaaatcaagacattctcggctgaagaaaaactaagagaatgtattgccaggaatccttaaccaaaagaatggctaaagaaagctttttcagaagaaagaaaatgataaaagaaggcaccttaggatatcaagaagaaaggaagaatatggagcagtgtcttcaaaaagaatctggaagataacagtatccaggcttgagtatcacctgaatttattttcatccacatgtagaaatacctgagctgaaggatacaatggagttatgagtgggtttcagaagagactcttgctcattgtcagatgtgaccatgggcaagtcacacatggaagtaaagattattgactgtctaccatgtgctggtagtaattgctgctacatatagtatttccacaacctacttgagagtgaaatttttaaatatttttttttattgacatcaactaaggcttggaggataaaagtgattgatatggcttggctctgtgtgagattacaattcaaatctcaccttgaattgtaataatccccatatgttgtgggagggacctggtgggaggtagttraatcatgggggcaggtctttcctgtgctttcctgacagtgagtaagtctcactagatctggtggttttataaaggggagttcccctgcacatgctctcttgcctgccgccatgtaagacgagactttgctcaccatttgccttccacatgattgtgaggcttccccagccatgtggaactgtgagtcaattagacctctttcctttataawttacccagtcttaggtgtgtctttaatagcagtcacatgactagcaatggagccagaattcccatctagagtttcacagccacaaagcaaatactcttccaactgggcatattgcctgtcttccatcacaggacctgtaagacgggaatattagtaatacgcaagtcttccatgcccactcaaagcttacatgttcaggctatagcttacctcttagagtcaagwttctatgaagagaagaaaagtgaaatcatagaaaactaaacgagagttatgtgtcctgggtgtagatgtgtgctcagggtgcagatcctagtatgtaaatatacatagagtactatgtgtcctcatagaaatgaatggtgaaataattattcaaatgtcagtttctacttaggctcctcttagatggaaaatcagaaactcactgactatgcacatgaagcctattgtattctggacatgaaaggaccctggaactggaactgcaagaaccagtgggacagtcctggggcaagacctttgccatctctcttttgtgagccatgtgatttcttcttcagaagaaactaaatttctgtccactcttgttctctccatggcttactcttgcctcctctgaacttctatcacatggctgtcatgacccttagacccacgccacattgcagccttttagctctcatttctccatgaaatgtcccaatagcttactgtctattggcttggatttctttttttaaacttttattttaagttcagggtacgtgtgcaggtttgctacataggtaaacttttttcatgtggtttgttatagagattattttatcacccaagtattaagcctagtactcattatttttcttgatcctctccctcctcccatccttcaccctctcataggccccagtgtgtgtcattcccctctatgtgttcatgtgttctcataatttagtttccacttctaagtgagaacatgcagtatttggttgtccgttcctgtattaccttgctaaggataatgrcctccagctccctccaggtccctgcaaatgacatgatctcattcctttttatggctgaatagtattccatggtgtacatgtaccacattttctttatccagtctatcattgatgggmatttaggttgattccatgtctttgctattgtgaatagtgctgcagtgaacatacatatgcatgtgtctttataatgggatgatttatattcctttgtgtacagctcagactgctaagagaggaaatctgtttgcctaaatttatctttttatgccaggccccatcataagctattggttaccccatgtattgactgcttggtgtgtaacagaaatatagtaaattttggttgaatgagtttgttaaatgaatgtgcttggttatgggttttttgttttgttttgtttttaccagaattgtgaagaggggatacaaggattcacatggtataaaagaaatcattatctctttagctctagctgggaatagcccagagactttctggctattaaaatattggttcccaaatgattttgttaaaaatgtaaagtttcacacataggtttttacttcagaaatgaagaggaaatcaagacaatttcagctaaaaaatacctaggagaatttattgcccagagagctggcaatctaatctgtagaaatttaaagattatttttcagctctgccattagcttgagtcagatttttaactcagccagaacatgtttttttaaccaatattagctaaagtatgaattaaaatcagtatwtatatatatatatatatatatatatatatatatatatatacttaggatggtcataaggtgggaaatatttgaatttataattttagtttggtagttcagtggagggtagagaatatatatttccatctttcttccattctaactgaatttcacttcattccactccctaatcttgggttaacctaacctttcgttcagtatagttttaagctgttgaatattattagagaaattaatgtaactctgcaattgggcttactccaaatacatagtgtttaatgtctgctggggcttgggtactagtcagtatttctttttattcgtctttttttttttttacttcccatcaaattctttttttttttttcttttttttttttttttgagaaggagtctcgcactgttgcccaggctggagtgcagtgacgcaatctcagctcacagcaagctccgcctcccgggttcacaccattctcctgcctcagcctcccaagtagctgggaccacaggtgcccgccaccatgcccggctaatttttttgtgtgtgtatttttagtagagacagggtttcactatgttagccaggatggtctcaatctcctgacctcgtgatccgcccacctcggcctcccaaagtgctgggattacagacaggcatgagccaccgcacccagcctcaaattctttcttgcagttagttcraatctttttcatacagctcaaagcccttagcctcttgatcatcatcctcccatttctctcatatcatcctttcattgcctctcattgcccaaccgaattctgttctctggttttacaatatttattaaatccacctttctaatgatttctattcacaagtgaaatgtgtaccaacaaaatgaattctttatagcaggtataaccagacaaatgaaattgatttaaatatctaggttatggtgctgatacactagagtatagaaatagaagtcctgtaatgggtgtagaaatagtaatataaataaatattttgattctgatttttctcatacactattcatcatgtgtatagactatgtagataagtgagtgccctactaaaattaagatttacactcaaattagtaatttcaaaatcttatgtaattaagtgagttcactgctaaaataaagatttacactcaaattagtaatttcaaaatctgttccaaatgaatctatgtttgtaaattaagccatatgactgacattaagaagagtaatgacatttcaagaatggaaagctaatttttttcataagttgyataagtgtgatagcgcataccttctttattgctttatatgcatcacagagaataattcattcattcattttttaataaatatgtattgagaccctactatatattcttagcattgttgtagaaatttagagtatttctgtgaattaaaaaaaaaaacaactaaagwctgttaccttattgggcttacattcttgtgagcagagacagaaaaatatacaataaatgttaaatgtaagtgtattatatttaacataagataagtgctgtgggaaaaaaacagacttcattgtaaagataatatttttattaaaaaatgatggttgtaaatcctagaaaatttttattgaagaaaaaacctaggttacagcatcatttgcttaaatttttgctaattgaggaattaaatgtaagttcacaaaatattgtatatcacctcacagtttatttttatttatttattttcatatgtataatcaaactgaaccttattatcacttgatataccaaaatacattttgcatctcaacatacttcggtatatagtgctaccttcagtggtcacatattatcccatattataaatgcactgaaatttatttataaaatccattatatgggttcttcttcactactagtttaagcagtgctgagaaaaccaaattgcatttatctctaattattttataatatattttagtataatgtaattgatcagtaaagggcatatactttttttaaacttcttaaaatttttgtgggtacatagtaggtgtacatatttataggttatgtgagctattttaatataagcatgcaatgcatagtaatcacatcagctaaatagggtccacctcacagttgataaactgaaatgtctcttagggtttcagattacattttattgggcaattattgcttttctttctttctttttttctttctttcttttttttttttttttttttttttttgagatagagtctcactctgttgccaggctggagcgcagtggccgtggcacgatctcggctcactgcaatctccacctcccagattcaagccattttcctgcctcagcctcccgagtagagctgggattacaagtgcgtgccaccacatccagctaatttttgtattttttgtaaagacggggtttcaacatgttggccaggatggtctcgatcttctgaccttgtgatccacccactcagcctcccaaaagactgggattaaaggagtgagccaccatgcccagcccaattattgcttttcatagcaaaatttgcttcaaaatttttgagcgaattttcttggaatgtatcatttctccgtggcactgtttatttctatgatcttattctgtaacatgctttgacaagatgtcaacatttcaatggtaaatcatccaatcatcttaccttaaaaaactcttcagtgattttttttatgaaaaatgccagtggaatgtttgtagggattctattgaatatttagattgctttggatagtatggatattttaacactattgattcttccagtccttgaacatagggtatcttatcacttacttgtgctttcttcaatttctttaattcatgttttataattttcagtatacaggtctttcacctccttggttaaatttatcgctaagtgtttatttttatgctactgtaagtgagattaactctttgatttcttttttggataattttttgttaatttatagaaacatcactaatttttgcatgtgaattttgtatcctgcagctttattgaatacatttattctaactgttctgttttttggtggaggcttccgagtttcctacatataatatggtatctacagagtctatttaactttttctttctgatttgggtgcttttatttctttttcttcctaattaatctggctagggcttccagtactatgtggagtaaaaatgaggagagtgggcatccttgtcttgttcttaatattagaagaaaagctttcaacttttcactattgactgtgatgttagctgcatgcttgtgatatatggcctttactgtactgaagtacattccctgtatatctaattttttgagagtttttattaagaaagatgttcaattttgtcggatgatttttctgcatctattaagattatcgtatggtttttgtgattcattctcttaatgtgttgttatatttattggtttgcataggtttaatcattctcacatctctaagatgactgctatttgatcatggtgaatgattcttttaatgtgctgttgaattcagtttgttattactttggtgaagatttttgcaaccatgtttatcagagatacggcctatactttttttcctatagtacccttttctgggtttggcttcagcgtaatactgggctcagctgaaactcaaactcaaaatgaattaaagacttaaacataagacctgaaatcataaaactcctggaagaaaacacaggggaaaagctcctagacattggccttggctatgattgtttgaataggacatcaaaggacatgcaacaaaagaaaaataaacaagtaggactacatcaaactgaaaacttctatacaaaaaaggaagcaatcaacaagatgaaaagacttcctatggatttggaaaaatattttcaaaccatatgtcttttaaggggttaatatttaaaatatataaggagctctcacaattcaaaagcaaaaaaaaaaaaamaacaacctgatttcaaaawtttttactcaggatctttgaagaaaaaaaatgtgaaatcatagaaaaatgaatgagagttatgtgtcttgagtgtagacgttaatattctttgartaaagaacccgagtaaatatctttgagtaaagaacctgagtaaataatggaccaaaggagacataaatggcacagatatttgaatagatgcttaacatcactgatcttcaggaaaatgcaaatcaaaactacaatgagatattatcttacacctgttagaataactattatcaaacaagataaaaatagcaaatgttgatgagggtgtaaagaaagggcaacttttgttcattgttggggaaaatgtaaattggtgcagccattatggaaaacaatatggaggttcctcaaaaaattaaaaacagaactacgatgtgacctagcgatccttcttctgggtaaatccccaaaggaaatgaaatcagcactacatatagatagatgatagacagatagatagatagatagatagatagatagatagatagatagatagatagacagacagacagatagttagatagatctgtactcccatattctgtgcagtattattcacaatagccaagatatggaagcaaccttaagtgtctatcaatagatgaatgatgaagaaattgcagcatatatacgcaatggagttttgttcagctgtaaaaaagatcctgccatttgtgtcaaaataaatgaacctagagaatactatgccaaatgaaataagccaaacacagaaaggaaaatgttgtatgatctctcttatatgtggaatctaaaaaaaaaaaaagttgactacttagagagtagaactgtagttatcatatgtgggtgcatgaagtaggaaggttacaaagagatgcagttcaaggatacaaaattgcagtcatgtcagatgagtaagtctggagatctaaagcacagcacaagtaatctagttaataatattgtattttatactagatatttgctaagagagtagattttagacactcttaccaccagaaaaaaaatgttgctgtgtaaaatgagagatgtgttaattggcttgactgtagtgatcatttgagtgtgtatatgtataacaaaacatcatgcagtacacttaaatctgtataattttaaaatggataaaatgcttcaatgaatcctgaatataaaaactaaggaattagctagagagtaatctgggtactccagatcattttcctagtacaactttggagtgaaaatgactattacaacagaaccagatgtaacaccgtggcctagaaataagattcaaaaccgattacaggcttgccttcctgggtaaatgctcttataagttmttcagtcaacccaactgacttctaatttatttaagtgaacttcagtgtctttgaaatccctgattttttaatcttatttgacaggatttcattagttagaatatgcaaattagaaatatgaaaaggacagatgaaaattatcagtaaatttcaggtactgatatttataaaaaccttcctgttaaattatattctcaaattattcataaactcttgaggtcttgaaatctttttgagggctactctgaaaaaaagaagtttgcttctgactgccaattatttcttcatgaagagaaaaataaataaataactagtaattcaccttcaaaacagtttgaagggagaactttaataaattaacattggcttttttaagttttgatttcactgttagtcccagatcttatcttcccaatgagtcctgtatcttctttctagtattcaagtactagactataatttctgttgaaaaactatttagggatttgtattacaaccaaagctcagactgagtcagttgctttcagtgataggtttcattataaaatgttcaccttcctctatagataaaaaatatacatactatatgacttttttcactgaatgactgtaggtttctataatttaatttaatttaatgatactgccattacaattcattaccttaaggactttgattcagaaagtcaaaacttatcagttaattcacaaacaattatgacctgtgccttcattgagattgtatggatgtgtgtgtgtttgtgtgtgtgtgtgtgtgtgtgtgtgtgtgtttaattctatcttttctgcgtgggtttgtcactaaagttaatagaaaatcctgaaatataacggaaagatgaagcatagtgggcatttgctgtggaaagtcatggtcacatgacggccactcgctgaactcagataaccaaatcaatttttaacaataatcaaagctgctctgatggagctagttcaagctaaatggaattttttaatgtgatcaggaaatgtattattttattaaaattagagaaaaagaagtaattgaagcagcacgatgacactgtttccacttgagtgcagatggatgcattacccatattatctcttggtcataatatacacagaggcttcattgcttcaactttactgacgggtgtctttaggtgataaaaattttgcaccctatattacaaattttcattgggtaggtggaaaatatttattcaataacttctaattttttatttcatcatcattcagtttcaggccagagggtaacaaatgtagtaaaaatacttgacagcattcaaaattattttaaatggaatcagaactatttcacataactggttaaaagagaaatattttttctttccattatgcaatttcttgtgtcctggctttaatgaatgtttcacttacaactttaagaataatatgtaagtagatatttttaaaaatggaaactcaatattctcacaataatatataagaaaaaaatgcttttagtttatccattcaatgatgttctaattgctgtgtcagttatcacattattttaaattactttaatgaaaggttattttcaagaggttttcatatttaaaaagcatcttgattctagtgcaacaaatgttgtttataagcaaagagaataaattaaatggaaacttattacgtctttgagtgactacacattctccacttgatagaaagattaacatctagattcaagagaaattaattgaaactcaagctaatatttttgaaagacagttttactatagaaaaaaataatagcattgcacaatgactatttcaagttagagaataatcatgagttagctaagatgtttgcaggcgtatagctacagaaaattcctcaccttatataaatgtccttgcctaaattttttcttgtccctgacaaatcctttctactgtccgttcctatttgaattgtatgcagagatgtgactaattaacggtctgacttctttttcaaagagtcttcatatgcttgaccaaagtcttaaactactatttttattcttcattttgaaagaaaatctcagttgtttagatattcttatttcacatattactttctaaacattgtatatctttgttcctttcctctatttctggtttatcagtgtcacttgaaatgagttgtgattggatgggtaactgattttttaataactgtgtcttgttcatccaaatgactattagaaatagttatttggggaggtaatgtagtaactactctttatatattgggaatggatttcattcccattttaaaaagctaaagagagccaagatgaatgaacaaagttggttgttgagtgaattaggtatccaaagtcatgagtcttttttctgttagttcataaattgattttaattaccagtttacagagaaatgttccaaaattgttctgagtagtgcgaacatcttcccaggtgattattttgaaaagaccacttcattttgatgtatacactttgatatttgttttaaaattktttcaatgttttatagactttggtactaagttagagatctagaaaacctggactgtactgggaatttagagagctcttagaccatagcaaaatatattataaagagtattaatgatctattgaatattatcttctattttttcaaaaagccttttccatatgttaatttatataattcttatraagctgtgggtatatcaataagcatttttaaccccatttatagatttgcatattcacagtttgtaatttccttgggttcattttatcagttgactttccagtaggactaggaaccatgttacmtgatttmtattmtataatttgtctctgcatcccccaccctccctgttactgtactcaagaaatgtgctagcaaaatgaaagaggaattcaaaataataaacgtgtgaaagcttgctctttcacttattaattgctgattcttcttagttcttgagctctatctgtgagtagtttgtttatacccaatcatataattttataagtgagatatttgtttttgtctttattaagtaatttatccctgacttcttcagtttccaaaattattttgaattctgaacattctttccacgtgctgagtaaagaaaactttgagatttctagaagactggctactctggggctcctgggctctacttgggggaagcacagmaatccatttgatcacatttttggataacatgaaatttggagtaaacttggggtaaagagtaaatcacaaagtagactcagaaaaatcagaagatgcatgtgtgattgatctaatatgagaagacacagttaattagtgacaaaagtaaggttctattcttgggtacaaaaacttaagtatacatctgaagtggagacaaccatggcaaagagaagattttgtggaaaaaccatagagggatataattgacagtaagataaacagtatagcttcttttaaaaagtttatcttagttacatttgaaatgtggtatctaggaaaatgaaaataatgtcctcaatgaactatcataaaatggcatctttatcactgaatgagccccactatatcccaggcagagctcaagcatcaaggatacaaggatattctcagacacctgagacctgccctcaggaagcttgcatgctagaagctccctcacargagtgatgtcttagtccattttctgttacttagaatactcaaakctgggcaatttttaaagaaagggaatgtatttcttacagttatggatgctgagaggtccaaggttgaggggctgcatctggtgtgagttttcttgctggcagagactctctggagagtcctgaggtggggcaggacatcacatgatgaggggcctgtgcttgctaatgcgctagttcaggtctttctttctcttcgtataaagccatgaatcccactcccatgatagtgcattaatctgtgaatggaataatccattcataagggcagagctgtcatgatccaatcacctcttacagaccccacctctcaatactgccacattggagattgagtttcaacatgagttttggaggggacattcaaaccatagcaatgataaaataattgagccattcagagaccccgagagaagagtgtcctcctggccagagaaagagcaacagtataaatatcaaggcgtagttatacaagtgagcaaatatggcctatttcaggcatggcaagrcrtactgaacagaggtgagaatgataggaaatgaagagaaagacataggcagagatgaaycttgtggagtacttcaggtcatgataacgattttagatgttattctgcacttgaggagtgaagtgtctccaaagagtggcaaggtctttacattttcacaggccaacaccacaccagctgtcgctttcctcagatcctggagtgaatgctcagtaggccttttctactttgtacttccatggcatcttgttcatttttaaataatggtttttatccttcataattttaattctcctctcttctagggctactttttgcctccttcacccttggttagctgcttataaataatttttactactctcaagggtgacaggccccaaaaatgtgcctttatcaactcaaattcatcacttctagaggaaacgtgtctccaaagcacatgttctgttaatggtaggacatcatcattaactttctatacaagggaaaacattattaaatattaatgcaaaaatcagactaacacacatctctttccagaatcattcagttctatcatgtgcttaatatatttaaaaattttcccaagggttcagatgagaatagattttgccactctatttatcttgcaacaaaaaatgaaaatacagaccacaaaaatacatttcacagttggtccctcaaaagcatctacctctctaagagtttccattcatgacattcagttttgtaccccactgttttgctttgtgtgtactgtcccaattctttataacttttcttcattacattttctaaataacactgaattataagcttattataaaatgaaactcatgggttatggccactctcctttttaaaggacttctctctctacctgatgattactatctttcttctaaagggttcaaaacaaatttagatttttctgggcttttttcagactggtacctttaattttttaggcacctttgccttttcaaaaggcaatttctctttgcagtactaacaaaccaaactttaaaatctcttatcctcctaacacctacactcatgtttatataggcctatttacaattagtctcatgtttggtcaccatattttcaatgtgttcacaacaaactagaccctctgatgttatcttcttctcrgaaagcccactcatcacttttgatttggcatatcattattttattcttgttttccttttttccttgtgttgatgtacttctgatttcttctgagtttattgcttatggagtagatttgaaaaggtcccattcctaaccatcgtccaagattagaaaatttgaggatttatttattgactttttgggtttgatctaggatgtctaaaggctgaggcagaacagaaaagaggaaaagggaggaagacaatgttagacagtagctagacgggaatgactccagctctagaccaaaaatataaccaagctctgagaacctctgtataaaggcggrtgggtagctcttattagtgagatgaaattaaagctgaattgctctaccttatacctgtatatacctaataccaagtatgtttttggtcattttttgttttttcttcataaatcagtacattcagtttcctcattcttaatgcattcatttttttctttgtgtaaatttaaggattacaagtgcagttttgttacatggattcatagtgaactctggacttttaatgtatattgtaatgtaaccctgttgttagttttaacatttttcaaaaatctcagttcatcctaagcttgaagattctttacagtatttgtgtgctatcattatgtakacagatgtggttctgttgtcatgtatactatggtagttaagagaaggagctttgaagttttataatactttgctcaacatttactagctggataaatttgggctaattatttaacctctataaaccttggtttatttatctataaaatggaagttatagtacctatctcattggattgtaataagacagaaatgatatttaatatgataaagcgagtatcacaattcagagtctcagtcctccgagtatctccctcctgctccagccaccctggtgttgccccgcttttcattatccaacaatgattggcacatcagggagccatcagcactctggtccagccctaagactgcttgtaaaatgaatatcaactgtaattgtatctgtctctagttataaactgataaaagaaagagtaccagacttatataattctagccatgcggttgacagttattacttttttttttttttggtacagataatcatgacttaggaataaaaaataagcaaacaatttgggcacacatttattttgatggtatttaattgtgactagctgmaaataatgattgtaaaagaaattacagtaaaatatcaaagttcttacaggcctgaaaacacttagaaatcacaactatgtctcttatttagaaatacagaaaatcaatgataagcttaaagtttacaaatagtagtgaaggaaattactgtcagactatctctccatttcaggtgatttctagaccacagttcakaaaccagatttaggatgaatgacctctgtctaaacagggagcatgatcaagtacaacactgaaatacaaacgtgtgttaatttccaccagatagaataattattatcaattaacgtgttttttgtttttgtttgtttgttttttgagacagagtcttgctctgtcgccgaggctggagtgcagtggcatgatctcggctcactgcaacctccgcctcccgtgttcaagcgattctcctgcctcagcctcccaagtacttgggattacaggcacccaccaccatgtccagctaatttttgtgtttttagtagagacggagtttcaccatcttggtcaggctggtctcgaactcctgacctcaggtgatccactcacctcggcctcccaaagtgctgggattacaggcatgagccacggtgccagatcctcaattaaggttttgacacaaacatgagaaaatttaacattgtcaaaagtatgctgtgaagatgtgtataaatatttactcaattggaaatctgcatcctcttctcaaacacttttttgttgttgttgtttgagacgagtgtcgctctgtcacccaggctggggtgcagtggcgtgatctcaagtcactgcaacctctgcctcccaggttcaaacaattctcctgcctcagtcttctgagtaggtgggactacaggtgcccgccaccacatctggctataatttttgtatttttagtagatacgggtttcaccatgttggccaggctggtctcgaactcctgacctcaagtgatttgcctgcctcggcctcccaaagtactgggattacaggtgtgagccactgtgccccgcttctctcacacacttaaaaataaaaattatcttgtaataaacygtttactcatattttaaaagtttgctcttggaaagaaaaacacgtcatcaatgttctccaagtaaaatgcttttaggggaaacttttgaatgttttactgcagactactcaacaaattgctattttggatagagggccaaatggatttctgttttatctgagtattaataaaaaaaaaattcgaaagcttggctctctcaaactatgtatctgtgcatcatatatgtggtttatggcatcaaagttacagttcagtagatttctaaaaggcttttgagacagagacatgaatttttacagattctaattacaagttagaagtcatctcactgtgggaaattaaaaatggagacaattagagaaaattccagttgaaagaaaaatgcattatggaaaaagcaataaaagcacacacaaaaaagcaggaaagtaaaaatcacttatcagtagcctctagtattcaattgtagatcaatagtgtgtagttagtgcattaccaggagaacattaatttgcaattaccgcaggtgatctgatcctctcttctgtccattgacacaaatgaccctttgttgaaagagagtctgtagtcattattttaaatagagcaacagaaaggcaaaaagaatgcttaggtcactttcagtcacaagtatcttataccacacaaaatgggaacgtttrtattttagcgccagtcacgtgatggagtgtcatgggcctaagcatgggcgtgcctgtttgtgcgcaggaggaatgtggtatgcactatgtgatggtgggtaaaaatgattcaaggatgaaactacaagtgccctcagttaaatataaaataacgtagacctttcataaacctctactacaaggaaaggtatgagagattttagttgaactaagtgtgtgtttttcattgcctccttttgaacatacaatttgaatagcctgggaggtagagaatcagatgcctcaacaaccatacattcttgaaagaaagtggacttcggctctctagagacgctattgtaatcataaataatatggcaaggactcagatgaccttttccagaagctactggacaggtagtgatatcagtctcagaatcaccaaataagaacaggaagtcactgagaactccaccttattcatgaatgcttcaacccaaatgaaaatgcatcaaattgtttgggttgaaatcccagctctgttgctcattagctatatgaccttgggcttactagacgtgtgaacattttatacttcaattttgttatctgtaaagtggagataataatactacctacctcrtagtatggttgtgaggattcacaaccatatgcaaagcacctcatacagtatctgaagcaaagtatgtgtaccacagatgcaagctattaattatcatcatcagccatcatcatcatccagtctgctagtagttttatgcatttatgccaaattttaaaataaaatgtacagccctctattctagcttttgactagtatgtatcttagctcagggtggtagaaagcagaacccaaggaaagggtcaagtgttaatgttttgttgggagataaaattctagggtagcaagagtaaaagaagatggaaatgagacagagaaagatgagacttgaatacaaggtaatgcattactgagttagccactgcttcacaagcttcagtgagacaagacagccaactggccacgtggaacaactccagatagactagctagaaagcaatgccttggggtaatccatcacaggaaaaaatggagaggaaatgtatcttctattcccttctgccttctgtcatgcattggttgaagttcatccttctggagagtccactacccagtccttctggattttatcacctggtgaaagcttcttcaacaccctgtggtttggcccagtatggcacttaatccactatattactctcttctacacttgtgattatccaacgtggttgaatattcataaagttatacacaatttctgccttattttggaggatgtgccttcatatatcttttattcattggcctacttctttttaaaactagatagaatctatccatgctattttcatagaaacagagactttcagaaatggagaaaaccttgacaatccataaatagttgaatcttatattcatatgactatgagtggtacacaggtgagtgaaaatagtgtgcaattttataatagttttaccatatcataacctaaatcaagtcactcccaggatgcaatacagaaggctaagttggatggtctcaagtaaaatttggctgctgttagggaattctattggtacccccaaggcttgctggaacctggagaaattagtacagcagtgacctaagcatggagaagtgatccctgcttgttgctggaaacccaggagaagtgctctgaaatgctttcagtaatgtgctttaaaaactggcaagcatgcatgcaaaacatcttctaaagctattaatcagaaagggatttgacaagcagacggcacatgtgcctttctagaaaagtgtctaaaatgggcattttagtaactcgagagggggaatatcatccttttgccgtttctccatttattccttggtcaaagcagcagtgatccattaatcacccacgtagtcaagtgaaggaggaagaagacaaggaaacaaataaatgggataaagaaaacagaggacgaaggtccttatggtcaaacaattgacaattttgtaaaggaaaacagcttacctacagcagtttccttttttatccccatggacaggtacattttattagtaaaataaaccactggttcaatcattcattcaaagtcccgtatttgactgaagtagtctggcaggtcaatctgaccatttagaagttttaaccattctaattgtcatttaaaatctgtgatttgattttcacagtacctagcattctagtgcctggacattgtgataaccatcttaactatcttaagctgacatcatgtaaggaagcgatcattaagagaacataaacagcttcccaaagcctaactataatccacagccaggttaagtatgttgtcactttgcaaattatgataataaaaaaattatcatggttaacttgtatgtgaaatttactatgagacacaccttttgtaagctaaaagttgtaataatttatttatacctccagtaatcctgtgagatagttattgttatagattgaatgtttgtgtccccccaaaatgtatatgttggaatactaaccccaatctggtagtattaagagataggcctttggtaagtcaaaggtttgataggtcagagggtggtgcccttataaatgagattggtgcttttattcaagagactccagagagcccctattctttctgccacttgaaaacagcaaaaagatggccatctattaacctggaagcaagtcttcaccagacaccttgatcttggtcttcctagcctccaaaactgtgagaaatgaatgtttgttattgaagctacccagtctatggcatttttgttatagcatgttcaaacaggctaagacaggtgttattactgtcctcattctatagacaggaatgttaagttacaggatggcaagttgtgatatgaatttacacaatttggcccagaatctgttattttaaccggtacactatgttgacatttctgcccactaaaatggctagtatcaaaagacagataatacttaatgacggtgaggatgtggagaaactggaatcctcacacattgcttgttggaatataaaacggtgcaactgctttggaaaacagtttggcagtttcttataatgttacaaaaatgtaccatacaatccggaaattccactccacatcatctatctcagacaaataaatatatatatccagaaaaaaagacttgcatacagatggtcatagcagcattgtttctaataccccaaaactggacacagtctaaatccctagcaggttgatgaatggtaaacaaaatgtggtggtacatccatacaatgagatattattcagcaataaaatagactgacaccataatagcacagaatattttgacatgtataaaaacatgctaartgaagataaaaagacacaaaatactaatatttgttattataaaattccatttttatgaaatgattggatgtgacaaaattatgaggacaacgaatcagtagtttcttgaagcttggggaggtggtgaacagtggctgctaaaggatgcaagaaaacttttgggtaattggaatatcgtaaaaccaggttgtggtgatgctgcacaactctataaatttacaaaaatatcattgccttgcacacgtatagtgggcgagttttatgctatgtaaattataccataataatgtttttaaaaacccacatacttaaagatagcttaaataatatgtgtaatgaagttattaaatactgaattttgaaatctgaattgggagcgattcatagtggagaaaaatctgtaggcaagtaagggggatttcactcatgcttaggagttctatttcttcaaagtcttacgggaaaatgacataatacctttatttaagatatgtatactattattagtatcagcaatgtaacaaaattaatgtttgtgaaccttgccaaatttaaaaataagcacgtttaaataagtctgcctaattaaggcatcctgggtaggaagcatttctatatttctcaagtgtgttccatgtattaaagtattaaaattagagtatttccttacaaataagcactaatcatactttgtataaatgtttatgaatgttgcaagttatttaaattttaaaactgtatattatttaagaaaagttaaatatatcaaggagagattggctttgaagctgtcaataactaatatctgctgagaaactcagtcataaggttcatattatcaaacagtgtattatgtagtggtcataatttctattcattcagcaaatagttactgagtgtctgatgggtaccaggcacattagtaagaaacagatatataagaaaaatgtcagatagtggtaagtactttacattaacttagaatttaaattagactgtgtgatagtgactgggaggataccttgtctggctggggagtcgtctctagagcagtgatgtttaagctgagaactgaatgagaagattcatccagctatgggaaagtatggagaaaggcattgcagaaagacagagcaaagctcctaaggcagaaataagcttgacatactgaaggaaggccaacgaggcaggaccagatcatgcagtactttgtagaaagtgttcccatttttgcaaagtgaggcaagacattgttggtcttatgcagtggcaaattatgatctaattaatatttttaaataatcatcttagctgtcgtgtagataattaatttaggagggtcaagagtgaataaagaaagtattgcagtgaggcaagtgagagacyatgattgattccagttgcaagaagctgtgsttatggcaacaaatagattcacgatatatacttgaagtagtgctacaagatttgctgagagattgaatggttgtggacatgaaaagaaagggacagagatgatttctagactttggactggtggagtagtaggctgcagtgagtggaaaaactaggaatggtattctggctatagttaagatgcctaggaaacacctccgtgaaaatgtcagataggcactagtatctctttgtttctatcctactttctagacatgtctcaagcctgaaaatgcatgtacaagccaatgcagataaatgaatgtatgtcttatctcctagctaggatgtatgtgcattttcacttcttaagaatgcctcatagtaattgaaataatattaggcacaaagcagatatgtgcatacttgcttgtggacagatgctaaggggagagaggaatgccttactgtaagtctcgaccaatgaatgtttaaaaatggacaataagcaactgtgttttgaatagttcagaggccagtttcagtaagctcttgtcattctcagaaatatgttcctgaagctaaattttagaagattatgaatctttgaggaaagagtaaaagaaatgaaattcatatcaaatgtacattttaaaataaaataagtaaatggtctataaaacatttccctccaagggggagggaaaaaaacgctctacatttattagctttaaacacatgctcatccaattctataacttgccttctttgaatattcaggaaacattccttcttcattttgtttaactggtcagatttcctacacatttaatatttttgtggctcatcagtcttttgaaaacttttaaaccagattctcctggcctgaaatataaatgctccaagttaaacatttctcttcccctattctatggtcatgccccacataatcagaagaaagaacaatgtttgctcttagcttcgtttggcagatatgaaccaggaggaccttaacagtttgtggaattaaagatgtaggcatgcaaatataaactgccattatctccaaatcaacaattctgtgtttgtaagacgaaagaagataatatgtctaaagatcaaaatatcaaacctttgtttcagatagctggcttaatcccacagtgatagacctgtcagatattataatatttagcatatttcctcatgtggaaaatgatgggatttcagttgtcatgctttaagggcataagcaataatctcattatcatcttcctaaatcaatcagtacatcgtggatattaactctggatgacaccagatgtagcaatgaatatgaggtgagaggaaagtttcacgactcatcattgagcctaaaaacaatgacacaagcaaaaaatcagtttaatcactggtgaatttgtatggccaaatacatcacacattacacatgcctggtcttacacagctacagtaagaatactgttgcacatttataaggcctgatgtctctaaaacacaaaaaataaatgtgagtaatctggagggagtttaaaaaaagccaattctattgcatgtctgagcattatttaattaggtaatgttgattataagcagattcaaaatataagcaatggtttaaagtgtgacattttatagacaaaaatgaaatataaaacacataaaatccaacttacctgtatttatttaccttatttaccttttctttgacctaattcatattcaataattgatttaaaacctgtagtatattgatttatgggtaggcggtggtaatatgattctggtttatactctcaaagcataacaattgaaagtcaggtcatttccttgtctcaaaattcgatcttatatgtttatctgtgtgtgattaagttaattgtttacaacaaagatatgatcattttggtcctggagctcaatggagcaactcatcttagaaattagtcaatatggaacacacacacacacacctcagaagacaccagttgcacattcagatacaaaattcagaacttgaataattattcttacctctgaatcaaacgcattgtgtcacacctataccaacaagggaggccttcctagtaaacagtacttaataattcttatctcatttggtcctcacaacagctctgcatggaaagttcattctgacagaaaacaaacagcataacctcaggctgcttcagtcaacaattttgtttgataattgaatgtgaaaagaaaccggaagattagtccataaattaacatgtgctgaatgaaagaataaattaattagtaggtagtttttgagtaatagagaaagtttttgaagaaatgatgagtttgaatatagctcccttggcgaagtgcagtgtgtcacacctatagtcccaatccttgggaggctgaggcaggaggatcgcttaagcccaggagttcaagatcagcctgggcaacatagcaagaccctgtctctacaaaaaaattaagaaattagccaagcatggtggcatgcgcctgtagtcccagctacccaggaggctgaaggaggaggattgcatgtgcccaggagtttgagactgcagtgagctatgatcatgccactgcattcagcctaggcaacagagtgagaccctgtcaaaaaaaaaaaagaaagagagagagaaagaagaaagaaaaagaaagaaagaaagaaagagaaagaagaaagagaaagaaaagaaacaaagagaaagaagaaagaggaagaaaaaaaagtaaaagaaagaaagaaaagaaaagaaaaaagaaagagaggaaaaaaacaaaaacaattgctctcttctggtaaaaattcagaataatctattaaacactcctggctacattcccagcaaacagagagaaggcctttactgggcatgtgcagtggttttgcaggacctgtattagaggaagcaaatcatttacaatggcaataatatttgtacaaatttgctcaataatacattttatcatttactttgaactatttcaaagtaatttgatgaagtgttgaactttatgaacttgaaataattaaagatagagagggaattctttaaaatgaaaacattagtcctgacccaagaatgctggactgacctctattggtgcgtgatgcagaaacccaaaaaaattagataagagagtctagacacaaaacaagatagaagaccttttccttagcgtctctgggctctgttttatctgtcctttattagagttagaatccagattgctttaatatatatgtgtgaaaattagaacattgtatatattggatttgatagtgtgaattcagtcattgttaaatgagatcttttatagggttcttaattatacattccttcagttagtgttaaaggggactatcataagagaaaacataatcaaatgacaattgctgrtaagactcaggcatccagactgggaacaccagagatgcaaaaatctatacacaggctttgtccagtttgtctgtgacaaatagtactttgaatatgaagaaaaatgctgaagaagtagagttactccctgcatccttgaaatacattggcatatccaaagaagagttaagtaataatgcaaagatattaatgtataaatgatgcaatgagtgatatagagtgcagcaaaagttgrgagaaaagtattctcttgtggattgrtgtgagttcttaattatgatatattcgtataattggagagaaaaatgtattctggacagggaatgaaagggaattgtgtttgtcactgactgatactattacaatatttttattttgcttcatgtattcatccattgaataagtcatatgccaggcaaagatctttatgtggtaagtactgggtgtacaatggtaaccaaaagaaatatagtctctgccctttttgctgtgtctctgaaatctggtgaatgagatccaaatgatgatacctattgtgcagttatttaggcactgaagtagataattatgtatgttttatttgatataatacttacaagaaatctatactacatatacataggtatatatgtgtatatatgtgtctatgtataaatatatgtacatatattgtatatcatacatacaatattgtgtgtatatagatgcttgtgtgtatatgtatgtgtatgcataaacctaaaaacatatacacacatacatataaaacatacattaacataaacatataaacatgtatacgcacatatgcattatmagcatatagattatatatatatatatatatatatatatatatatatatatatatatatataaaatctccctgttttcacatgaaagccagttgccttcgtagtagtggtcagaacagaaagcaggactgcactgtggttacaagaaaggatcctgtgggcaaactgagccagaattttaatctttgttctgccatttagtagctgtgtgatcttaatcaaggcctgtaatttctgaccccatatttacccatctgctaactgaagaaaataataatacttacccaaggtgctattgtgagtttcaatgtggtgctacatgtagacatattttgaacagggtttaaaacataataagtaacctaagtaaatttcaaaatgctgtaatcataagggaatttgggtaaagcataaagaaataagttacaaaaggacagaatattaagtttgttaaaatacaccaaacttttccacccttaaaggatatggattttgagtagctccttgcctcccctgtcccctttgagttttttttttaggctgaaagacccttggaggagtgtctggagaagacatggaagctccgtacccctccctcataccttgccctatgcatcttttctgtttggctgtttctgagttgtatcttttatcataaaagggttaaactgaagtccagtgggacagcagagcaagcccatgattacaggcaatgtccaccattcattccctgccaccccattcccattaagcgctggagatgccctgtgaggacccaattctagtgaaccacattgtgtgagagttcaacaagattcaagacaagtacaagtttccaggagatgcaagggttagaggaaagaaatgtaaagaacactgtggcaaagcagccagactccagcagtagggtttctacaacaggctggtgcaatgaaaaagaggctgtgccagataaaaggaaccttgaaggacagagcaactggatgcaacatgcagtcctggattgaacctaggcttggataaactagctataaaaatattatggaaattgtactatggatatcagattacactaaggaattatttattttattaactgttaaaatattatttggctatatagaaaaatggttttatattttaaaatatatgaagttcttactaaagttgaaaaaaactgtgataatttttcaataggtgaatggattctgttgctacagaacaacctggagcaaccttaaatgcatactgctaagtgaaataagtcaatctgaaaaagctacatatatgtgatttcaattatacgacatattggaaaaggcaaaactatggagacagtaaaaaagatcagtggttgccaggggatgggggaggtgagggtgagggggatgaatacgtacagcatagtagatttttagggcagtgaagctattctgtataaaactctaatgatgaatacatgtcattatacatttgtcaaaaaccatagaaaggtacaatgcaaagagtgaatcttaatataaactatgaattttaataatagcatatcaatattggtgctttaactgtaacagatgtaccatctaatgcaagatattaataatggggaaggtgccragtttgggggtggtgtgggcgtatgaaactctatgtactatctgcccaattattctgtaaatctaaaagtgtactaaaaagcaaagtctattaattattttttttaaagttggaggccaaaagggaccctttaaatctaggattatctgggtcaataacaggatcaagtcgggtcctcttattggatcaagtcaggtctccaggattccaaatccccacctaagtaataaaagcctggtgaattagatccaatgttaatgctctgaggcctgcataagtatctgaaagaccagaatgttaaactaaaccaaaagtgacggagcattttggaatgcattccacagggacaagtgaaagtctccctccaatataaagacaggaatgaaaaaaaccctctgagtaagggaatcacagatcctagtggtacaggacaatcccagtttatactgctggtcctggtattttcactaatagtttcctgtttactctcaagtgtcacagtttggatggtaaattatatggtcatctctaagcatcctcctaaaaccctcagcctagaacttttactggtgtttgtaatctttcttcaggttgtcagagtcacaaatcataaaatatgtgcccttttagtgagaaggcataaataaaactacttctttggacattgcatttgtttgtctgtaaccatgttccagtagatccatcttttgtagctgaagaccaggcattttacttttaggttcttggccttcattaaaacaaaaagccaaaaaaaactagcatacaatttattttcctggtctttctgcaaaaccacaaactttgtgagcttttatttttccatatacacagtaaagggattaaaaatgagtttagtatttttaaaagttccttttaacaaatgcaaaccttattgctttgcttctctagccctcccataaatatgcaccgtgtttaccatatattaacttcaacattggtaaggttgttttgtttttcctataacgcttaactcttacatagtttattcactcttaatcaactgaactttaacttttgtgtcccagaatatattggcaactcagtcaaaattgttgactcactgataacagccaagttgtactctctcacaaatttgtgtttttatcaattatagattaactatcacaccaactactgaattgtgaatgctttcagaggtagtcaggactatttgagatgttattttcatgttaacwaatgtttctcattgtaggtgagttgttctttttttttttttttttttttttttggaatgtgaatgtctgcttagttattgagtgaccacataactttcatccatcttcagagttcagaaaaaaattccatgcgttaattttccctatagactttttctcttttttttttttggggggggggggtctgaactcatcctttattattttttttattttttttattatactttaagttttagggtacatgtgcttgtgcaggttagttacatatgtatacatgtgccatgctggtgcgctgcacccactaactcgtcatctagcattaggtatatctcccaatgctatcccgcccacctccccccaccccacaacagtccccagagtgtgatattccccttcctgaactttttctctctaggcattatgacttctcctctgtgatcaaactctatctggtattttagtgaatgatatgataaatcaagttttcccagctgtgttkactctgttgaaaaagaaagattgcctaaaattaaggatttgagtcttctgacagctattgtttggatgtttagtttccttttcttaccccacttttatcatgagaggtgctgagcatgcacaatgctacatgcaaacccttacaccaccacctgtgttactgcagagtaattgaaaattgctgtggtaactgatgcagcaccaaagcctgatggtgagaaacgatgttagtagaaaaatcctactgcctctgaagagcagtggccaagcttcctcaaactgcagccacagttcctaaccaaagaatgggctgcataggatcctggtgtgtagaagactccagttgttacctcagtcttttgagtcttgtatttatgcccgttgggaagcagagccatcaacagcaatatctttgaagagacagaacagtaatcaccattctttggccctacatgttgtacctgtctcacccattttatctctagtgtcacataaaaggcagacagaggtgctgtgtctctgtatggttcttattattatttcttggttgcagtcattattgagatctgagtccagttagagctcactttgtaaaggacagatacaaggaagggggcagggcagtctcgcctgcagggcacagccctttgactaatcagcgcaggccatcttcagtgaarctgtgtcatcaacaaagtgcaacagagaagatcagtctcacaaatgctcttctgaatagtagtcgagtgggtggcccatcatatgctgcctttgagaaaatacttggagaattgatgattatattctggctggcaaaatgtggtttggatctcagtataatataccttgaaaacatattattctcttcagtctgtctttagctgatcttgggttaagaaattaattaaagaatgaccacagagttacactgaaaaatagactttcaggctacataaagttccttcctaattggaggaaaagggggaaatttttatacttaaaatttatcagagaatttatcgtttcagaggataagtaatgtactgagaagaaatatatgatttacaaaataaatgactcctataccatttggactgatcaatgagtggcaattaaaaacaactttgaaaatatttaataagcagaactacttatccatttcggcaatttttctgaactgaacttttgaaaaacaacatctccggggctattcgtttgttgttctttttttcccaatcctatttgctgtggtcagaacatagacaactgaactcaaagccagatttcttagtagaatgacatttggacagctattttacttagtgatcctgtgcagtttcgtagcaaagctgaaataagccctctccttttgggggaaacaagatggtattctgctgaatgctggaattttatcactttgggaaaaaaaaaaaaaaagctgcttgagagacctaagaatataaaagcatttgagatctcagaaggagtttaaatcaatgcactgccacagttacagagcagatgagagagcctgctgtctcaattgccaggaaactacttagaaactctcactttgatttcttcacgtagtccgttacattactgctaaatgcaatatatagggacatcatgactttgatgttgtacagctccaacaratagaaactaatatgatagaacaactaagatttgtggttttatgtgaatatacaaatacatccccatctagttccctatttactatgtatctccaggggctgtcttttaacctatatttttataaaattataattttggtgttttattcatgaattccagtaagcaatgccatgtttatgtagtaccaaaagctcataggcggatattgttattctgaattcttaccttatctatatgtattgtacatccatttttaaagtacaatgtagttttatacatctgtttgttagtactggtcagaactcaattccgtgagtaattattgattccatgccttcagaaaatctgatttttttaatcagtaggtgtggacagatagaattagaaactgcataacatccgaaaacaggagaaatttagtttccagttaaagtaagaaattttaagtgggtcatccaaatattaaaaccttaaatgttaaaaatctgtggatttctgtcataataattaactaataaatgtgaaatcacttcgcttctttttatgaaaattatacatatatgcttgtttatatatgtaagactttcatctcatttaaggctttgaaatttatggaaataataataaaaagaaaagataaaaagctctgcagaggtcagaaattctgagtcttactgttggccctcccagttactaatcttgattttgggcactgcattcaatgtttggtttcaatttcctcacttactgaacaattcatagcaccttctctgtctttctcttagaactgctgtacgatgatattgacagacagtgttgtagcagaaagagcttcaaaccaggcgggtctgccagcactgcctccaactagctgtgtaccatgcacagatcatttagccagtctggactcctgatctctgaaatgaggaagctggtctgaaaaaaagtctaaattccctttaatcttgtttgtcaccatgctttgaaaactataaatcattgtatagatatttctttttgacagcatgctttgaaaactataaagtgctatataaaatattgcagatgttttgcatagtttaaacaaaatatgtgcttatcaaaataggttagtaagaagagataatataaccttctttttcctgagaaagctttaagaattggatgaacaacccttcttattcagtgtttcatatatgaaccacattcatgggaggcttcttgaacctcttccagatacataactcagttattaatgcaatttgtgatgtgataaccattgcagaagaatttccgtttttgcttaaatgtagtaattctccaatagaacttttactaatgaatttacagtaaatttgagacaactttagacttaaattgtaagcatatattttacttgcatataacctggaggcacatacttctaagtcctgaagtgtagtttatccacctgtatgataagaaatgaaaagggataattatggtcatgggtttatctgagttgtgtttaatagatcaagatctctatttttaaactttgttatattttaaaatagcatttgaaaaatgtgctatttgattacacaaaagcatgtgccagtctcagggtgttcctgcttttgtagaactcttctctgccaaattatttacctgggataaatatttttaatctaatttagattttatttgatagcttccttgtaaatttattttacttttcagatgaagtgagcttttttttaataggcaaaacttcccattttggcctctgccaggcacttgaaattctagattacgtgaaattctacaatacctatgaggtttagtaccattctgtctaagctttataatttccacagtacttccaccttcatggtataatttaatcttcacaacaataagatgttatcatcctcctttttcagatgtaaaggagggagaagggaatcaacaagctaaatgactagccctagttacacagctgccagatgacaagagttgggtctcagacctgagtcttctgacaacaaaaccaaagctttttttttttggagatcattatttaatgcaaataaaaataaggtccatgcctttcctctgcagtatttgaccaaaaatgtattacattaaaaaaattatatcctgcctaattcatgccctaatgatttattcatagtatgaaatttaattttggtgccaatgtagctgagtataagctactattttaagcacttaagtatgttgccttttagtttcctatgtgctaagtatttaatctccatttttaagtgaaaaaaatgctcatgattacacagctaagatgtaattggaactctattctgcttgacttctgtgtgcatgctctcagcctcttaacttaatatggcatagaaaccacaagattgactttaagaaacaggacttcaagtccaagctctttccattttacaagtaagaatattactccctctcctgactaagtcagstttgagtactgaaagaaataatgtatgtaaagaagattttgaagacgtaaatctccataaataggtaatttactgataatctagttaatctcattttatgagaaataatgagaaaagaatagctccccacaaccctctgttaccatccaggtatttgtacagttgttctgcacaggtcggcctctattaaatgcgtctgcacctaaagtaaaaattcagggcactgtgtcagacccctggaggaggctatttggtgctttatggaacacgtcaaatcacgctgcacgggggccaccacctactctgctcctgtgtagggctggtcctgctgagaatctaggggcctctctttaaaatagctcactatagggatattcacacatatagaaataattaatggtggcaacgatccttataatggcacctgatgccctgctgtgaagaaagataaaccagccttcaccataaagaacttacaaattatactaagcaaacatgttaacagctattaagagtcctaatcagagctgttaaacaaacaattaagagatgtcatataaaatgcacccatttaggcatagcagctacatgtttggagttttaacaagaacgatttacctttgagatagcgataaggccctcaatggagtatataagttaggcaaggacaaggcatctttctaagcaattccatttcctgagatcaaatccatgggcaaagctgttctcaatggtgcacttgcatcctaagttttatttttagtcttattagtatttaatcagcaaattattcttgtttcttcaaacatgacttcttattataagtagtgcattctttgaaaggctaggaaaatgttgatataatctaatagtaaaaattaagaagaaacctatttgtttagaagaaatttttttttgcagtcagcatttcagttgagatgagattcacccctgccagtgcttaagactttgctgttctaagtgtggtccagcagcagcagcagcatcccccgaaaatttggccaatgcaggatctcactccaggatcccactctaaagctacaaaaccagaatctgcattttaaaaagatccccacctgatttgtatgtgcaacaaaattttaaaagaaaatatcaatgtgcaaagttcctactatcaaaaattctatcaggaaaattagtaggtttaatcttattggaagtaaaaattaaactactcattttgkaaaggtacgtaagtggtgtgacatttgccatatgattaagtatatctgaagtggtcccctccagcactcgtgtctcatggtggattccagggcttccagcattgcacactatcccagtcttgctcagtaagtatcttgtagtctctccttcctcttaaggttttgtgttcagttcacattctcagtatagctcccaattatgtgaaacaccaaccctgtatgataaagagtctagaagtgggtgggaaagaggaagttttcttagccttgggacctaccatgttcttctacagttaaaagatcccaagtctacattctgatcactccactccttgtctgagtctactgtatacaaattgtgccatgtttgaggattgagataactcatagcttttgtatcttcttcctggaaacatcagggatgatttagattatactttactgttcatcccttgcagtgtatttctagattcattttagcagcaggattttacaataatcatgaaaatcccataaagtacatgacattatgtgattttcaaaatctgatttcttatgttcacatggtgaactattttaagactatagtaaagtatacccataagcatatactacaaaaaaatagaatctcagagtgagcaaagaggattaagtaaagcatcagttgacttttatagtcaaaagaaaaaaaatacccctgtggaggaaatgataatgatgttccttataattgttgtgagaaaaaaacaccaccaactctaagaaggttataacaggcctaattaatgttcaaattgttcctcctgagaaacagatttttttaatctgatgtaaatgggcttcctagaaaatgttcttgttcatatttagtagttattctatactcttttctacattgtactaacatgcagcacttcagaatagaaaatgaaggggtttttgtttctgctttttggttttggcttgttactattcttactcatactgtacaagtaagaaggtaaattgaaaacattgacaatttttgtctaaaagtgtggattttttcaaaaccagagctatatttcagttgaagataacttgattaaatttttaaaaacgtatgcatttggtccatgcaatagttgtaggaaagtatttgtagttatattaaaagtttttcctctgttaatgtctatatctaggtcatattctattgtatggccaggaattctggtgccaccactttctaaccatggggcctggagcaagtcatttaactttcctaagactcactttcctcacctgtaaaatggggctgaaaattaaacctatcttttaggkttatcttgaggactaaagaagataatatatttaaaagtgctaacaaagtgcctggcccctaagaagagcccgcatcatgttagatattgcattgttttattctcatcgcataatcattcagccaattttgacagaaatctcatacacagaaatcagtctgtcctattctgaaatgtaaaataactgtatctccttaaaacataattattttcattctttaaaaaaataaaatgcaggccaagcatggtggtccatgcctgtaatcccagcatttgtgggaggccaggtgggcggattgcttgagctcaggagtttgagcaatatggcaaaacctcatctctataagaataaataaaaaaataaataaataaataccaaaaacaattacccaagcatggtggtgtgtgcctgtagtcctagctacttgggaagctgaggtgagaggattgcttgagctcaggaggttgaggctacactgagctatgattgtgccactgcactccagcctgggtgacagagcaagactctgtctcaaaaataaaagtaaaaagcaaaatgcaaaaccctataacctataaccccagctcgcctcttcctcttacaggagccaaacttcttagaaatgtgacctggctgcatatctttagttcatcatccctcatccattcctcaacctaccaaaaaaaccggcatctactccattgcagatctctcctataaaggcaaatgttatccggtatattgccgagtgttacatccagtcatcgcttccagctctgatattcctgacctttctgcagcgcctgacttaactctcttggatctcttctgctcggtgtccctcacgatcatcttccttagccttccttttaagtgctagcattcccagaatttcacacctggcatttttttaggtacacatcatggaatcactaccactgcttgctgagaactcctaggcatatatatatatatatatatatatatatatatatatatatatatatatatatatacacatacatatacacatacatatatatacacacacacacatatatatatatatatatatatatatgagagttctgtctctctctctctctctctctctctctctctctctctctccttatcccattccccattctggaacctcctagtatgttttcaataaattctctcaaccaacctagcaacaatgaggtatcaggtagcatgctaggcacgaggcttacaataaaatgtatttaatcaaagacccaaaaggctttaagagtctttgaaatagaatcttattattctgttttcaggcatttccttcattttctttttcattcatgcatgacatgatttttctttgttggctgccattgccagacaccctgatatactaggtattcaacatctgggaaaacaggatagaaatgagtttttctttgctcagttttgtyttaatggttgtttcattgtttgaagttgaaatataaattgggaagtatgttgaattcatgytgtaaattttgaatttgatgtaatgttgggccatgttggtgaagaggttctacaggaagttgtaaatgactctctggagtctacatgtgatatcaaaattggagggatatctttggaaataagcaacctagaagcagtatctaaatccacattcttcaagctttaactcaaatcccagccacactcacagaatccccagggtttttttagtggaagaactttaatttctctgattcaaacttccttaactccagaattttttattttagttctcttttctttttaatcttttgtaatagtccattctcatgctgctaataaagatatacctgaggccgggcacagtgggtcacgcctgtaatcccagcactttgggaggctgaggcgggtggatcacaaagtcaagagattgagrccatcctagccagcatggtgaaaccccgttcctactaaaaatacaaaaattagctggacatggtggtgtgtccctgtagtcccagctactcgagaggcagaggcaggagaattgcttgaacccgggaggtggaggtcacagtgagccgagatcgcgctgctgcactccagcctggtgacagggtgagactccaaaaataaataaataaataaataaataaaaagatatacctgagactgggtaatttataaaggaaagaggtttgattgactcacagttcaacatttctgggggaggcctcgggaaacttacaatcatggcagaaggggaagcaggcatatccttcatcacatggtggtaggaaggagaagtgcaaaggaaaaggggaaaagccccttataaaaccatcagattgtgtgagagctcactcatcatcacgagaacagcatggagataaccatccccatgattcagttacccccaccaggtccctcctactgcacgtggggattatgggaactacaattcaagatgagatttgtgtggggacacagccaaaccatatcatcattattcattcatcttatatttgtggagagcagactaacagacaaacagtgtcctagtcactgcagataatatagtgaccaaaataaatgcagttcttcccttctgaaactttggtctaattgggaagtgagttgtcaactaaataataatgcaataattagaagttaaaaatgtctgattaaaagaaggccataacctattctgggctcctggaagcctccttgaagaagggacatttaccatgagcctgaggaatggttggtagttagccatgtgtggaaaagaaaggccttctagccagtgagaaggtcttgtgaaaagatcctaaggcaaagaaagactatggcatttttttgaggaagaaaggaaagacctgggtaactggatcatagttgacaacaaggagaacaatagcagatgaggagggagacagaggcaggggtaagtgatggttgagttaacgtaataaacagcactccaacctcagtttgaccactttcagacgtgagaactgcctgcaggcagcacatcccaatagagtgacaatgagaatttaaatgtcctttattatgttgtgccaaattcgactccttaagcctgacatataataaactgtagctatttaaactatacaacttaataagttttggaacatgtatatacytgtgacaccattaccattgcaaktttatgawaaatgttcattgtccctggaaatttccttgtgttctttgcagtccattcctccccaccacccccatctccagacggctactgatccatcatgcctcaaacagtgcctggcacataaaataaatatttgttgactcaaagaaaagtgaatttgtttggagaattatctcttggtttgacacttggttgactgctctgtcttttctaggtatgcagtgccattcagaatcaggatttcactgtgatcgaagactactgcactggcctcaaagccctgctttatctgaaaagcattgaagaactacaagactgggatggacagagtccagctactgtgagtcaccagaragggaaaccagttccacgtatagctgaactcatggacaaggtatgtgcttaaatctcctgtgttattcttgagaactcagccttggtttctatttcagatcttatttaccatctcacattctcactaacaaaggaaacacagtgcctcctggatgtgatttcttcagtggactctttctgaaggagacttgattacagccatatgatgggtctgtgagttacctttttataaaccaatacaacacaagattatataaaaggaaaagaccratgtttgcagtgtaaagtgcctccaaattcttgcttactgtggtgatgactggcattcttcccagtgggagtctggagatttctttatgctttctggaaattataacattacctttctattttcaagacaatcaaatcactgtagtcttgaataatataaggaagtttttaaaattaaaatctaatcagtatcttttgtaactgcttctgctgtgtggttaaacccggtctcaaacggttatggtcccagctttctcactaactgctattttccaagaaatatacactacatttacgttttctataatacagtgattttagcaacactgctaaaacaacattcagcattttgcctttgtatttcctttgtattattctaaatagataaccattgtcagaagacatttcttgagccctcaatgaggggaggaaaaaattataattcttagtcttttcagcttgtcactacatcaataattaactttaaaaaaaagagaggcagtataaaaagattctttaaggaagcatttaataattcaaatgaatcttaacttgaagcaggtcacatgaaaaagaatggaaaacaaaagccctgggtactctgccttggatgactgggttagggactcagaaagaataagagaaacatcatataattgacttatatttggctagttttagtagaaaatatcactgtccctctcctaatagatagccaaaaaaaacccttcttcaagagtaatgtgtatggttgcaagtccagtaatgaaaaaagaaaaggaggaaagaaataaaatcttacaatgtgggttccaggaaaatgtcatgatgaatgactccatgagtggcaatcaaacagaaagactgtgacattaatatttataatattgtaattagcaagataatgcctaagcagcattattagtgtaactaatcatattatcataaactgactctgcagtatttagacagtgagtgttcttgcctttatcaatgactatcaatatcctaaggttgcttataactaaaaaaaattcacaaatgactttacaatcattcgatgtaaatatctcaaggaaattgtctctgacatgatagtttatgaccatctataaaatcattgtctcaaatttgggtggttgccatgtgagcggaaatggaagtagctgcattgcactgtcatgttttgtctttaaaggattttcacactcgtttcaaaacttacatattcaaataaaagatgggtaatgatgaagacaacttgtgtcaatgacataaatggaaactgatttggtaatagtttgaatcragattcagactttattttgttaagctcagctttcatcaaaatcgtaagtgtaattttcagcattatcattcgtttaaaaaaaggaagatttttctatgtgattatattagtgattcatttctcaacactaacttgaggaataagcagatggtctggtaatagatttgtgcttctggattctcctgtgcaggctgacatgactaaaacaataggtgattatccctttagatttatatccccagtagtgaatcaaagtactctggatctagggtacaggtgatttcctaatcgttcttttttttggtcctataatttttttatttttctttttattatgtttatattttttattatactttaagttctagggtacatgtgcatcattctcagcaaactaatcattctttcttaatgttgctgctgcttttgtgtgtgtgtgtgtttgtatgtacgtgtgtatgtgtgtgtatgtgtgtgtgtgtctttgcatataactcacattgtcctatcattagccaaagaatagtatgctggtcctcacagtgtccgcatactataggaagatgagagaaaatgtagaccctttgtagaaagacactctagaagtatctggcttctttacacaggaaaattttgtttggaaagtacaatggctactctgatattcactcataggtcaggctagaataaaccagaatagatatttagaagaaacccattacagtgcagtgtttgacaatggagagaaaatgagacttgggctatggaaacaaggatttggccaagtatgtcatgttatctttcaagtaattagcatattaatatactttccttatgcttaccttacttattaactgatcaaactgcctaaccagcatttcttcaggtggctgttgaagggcaggtagttgggtgttagtacacttactgtgcaagccattaaaatctgtgcctgcaagaagagcaaattcctgagaagaacagtcatcagctttggcacaacacagagctgttgatgtcaaactcttggtgcttaaaaaccatgcagcatgcttgtgagaaatgtaggttcccaggccccactagcattgatcctgagtcagtgggtaagaggtgtgttgagaatctgcattttaacatcataattctcatggagggatccaaaaatctgcattgccaaaagggacaaaaaagagaatagcaatagaacagtgagagattgagaagtcagcaatgagcagaacacaagcttctcttgatggagaaagtaaacaataaataattttgagctgaaaaagaagtgaaataaaagaggcaggagaggaatgccagagaagcatcacattaggttccaaatggccagaggttggaaatacccaatgaagaaactgcatgtaggacagcagttattagcaaatagtaagactgctggatttatgtgaagcttccttgttagctagacaacttgggcaagttacttaatctctgtaaacctttttataaaactgtacaatgaaaataattacaatacagttccataatccctcattaacaattctgaaatccaaaacatactgaaaccaaatggttttacataattcattcagcagaaaacctggcctgaactgatgtgagacttgctataatctttattcctctcagagaacatcagattaacgtgtttgattccaggttgctaccccacaccttgctggggctggagagggagtgtttattaaaattaggtgtatgtaccattttacatttctaaaatccaaaagatatttctaaatccatacatctggctccaaaggttttaactatgggcttgtgaagattaccaaaatgaaaatataattgcaaatataacttcatccagaaattcatctatagagttggaggcaatgtatatattttagtgatttcagaaaagaaaacattactatttggcacttttaattatgggaaataagagttatgttgacattcttcgttaagaaacatgaaagaaattggacagtccgatatttgaacaacaaattttgcaactggaaaagcatgaaagaaaatgtcttcactttttggtgcttgggatgagaacaggactcctaaataccagtcatgaaagaaaaacagtagaggccaaaaactaatgatcacttgggatctgcatgcatttccacatgctgttcccgacatctggaatggccttccagttctcaagcatcactttttgagctattccctgacctttgctrtagaattaatgtctccttcctttttgaaccttrgctgtaaccagtatcacatcgcagttgtatttttgtaagtctgcttcctttactagaaaataacctcacttttcttacccatctttgtatctaagttctctagacatgcactgaacatggtaatgccttaataaatgttgactgaagaagtgaactgatgactaaatgaatgttgaaagaaaaaagcttattggtaacattaagaattagtaatcacttgacttaccaagccattactttttccattacatcagaaaagaaaagaatatgtaaagaaataacctttgaacttaaagttcctttttatgtgtgaattgagtttggtaaaaataacatggaaaaagccagaatagaaggagtgagatagacaggtgagcaacctttatgccttcttgacttggcaaaatatgcctagattataagcttcttgacggcctagaacacagactgtgtgccagtgcctaatgcaatgtctaccatgtaggagtaatggcatggtagctgaattgaacatactgatcaatcattaatatatttttagaatctatcttaaatgtcacttcttttgtgagtctgtctatgaccctcttccttggcctccaagaaagtcaaatcactcctttttattttattacagcccatggttcctacaactagtattgcaagtactgcattttctttaattgtatatcttcttgtccagtgctgcaggtcattacaagcattttgaaggaaagataatatcttattcatactggagtttgcaagcacctagcacaatgctacatgtttatagaattaaattgcacgaattatctgttgtgtccttatttaggaggaaaaaagaaagtcaatgtataattaaaattccagctagatccttttaagaacagcagcagtcattttagaagaaaacaataaacctgccaaattactgtactttcagtaggtttcaaaaatgatgaaatacatattggtgatattaataaatgaacataatctgtgctcattaaaaggctctcattaggataaaatcagaaattctgtcatggtggttgtacagcaactctgaaaacaaggatttgttttgataatagaaaccaaaattgtatccatatgaccagatacatcattctcagttattgataaaacaattctaaaattcatatgcaaccaaaaaagagtccaaatagccaaagcaaatttgacaaaaagttcaaagctggagtcatcacattacctgacctcaaattatacaattaggctgtggtaataaaaacagcatggtactggtacaaaaatagacacatggatcaatggaacagaataaagaacccagaaagaaagccacatatctacagtcaactgacctttgacaaagttgacaaaaagtatacactaggacaaggacacctttttcaataaatagtgctgggatgattggattgccatatgcataaaaattgaattatacttctacctctaaccatatttaaaaatcccctcaaaayccatcaaagacttaaatgtaagatctgaaactataaaagtactagaaaaaaatctaaggaaaactcttctggacatgagtctaggcaaaaataattatgacaaagacctcaaaaacaaatgcaacaaaaccaaaaatagacaaatgggacttaaaataaaaagcttctgcacagcaaatgaaataatcgagataacagaaggcctacagaataggagaaaatatattcaaactacgtatccaacagggactgtcacccagaatttacaaagaactcaaacaactcaacaacaacaacaaacaagtaacccctattaaaaagtacgcaaaggacgtgaacagacatttttcaaaagaagacaaaccccatcaagcatataaaaaactgttcaacatcactaatcatcagagaaatgtaaattaaaaccacaatgagatattatcttataccagtcagaatggctcttactaaaaagtcaaaaaataacagatataggtgaggatgtgggaaaaaaaagggaatgcttatacatttttggtgggaatgtaaatagttcaaaccctgtggaaaagagtatagagatttctcagagaactgaaaataaaactaccattcacctcagcaatcctactattgggtttatatccaaaggaaaagacatcattacatcaaaaaaatacattcatatgtttatggcagcactattcacgatagcaaagatatggaataaagctaaatgtactttgacagataataaagaaaatgtagaatactattcagccataaaaaaagaatgaaatcatgtattttatagcaacatcgatggatctggaagccattttcttttttatttttttaatttatttttatttatttatttgagacacagtcttgctctgtcacccaggctggagtgcagtggcacgttctcggctcactgcaaccctgcctctcagattcaagcgattctcatgsctgagcctccccagtagctgggattacaggcgtctgccaccacgcccagctaatttttgtatttttagtagagacagcgttcctccatgttgtccaggctgttctcgaactcctcacctcaagtgatccacccacctcagcctcccagagttctgggcttacaagcatgagccactgtgccctctggaggccattattttaagtgaaacaactcagaaaaagaaagtcaaatactgcatgttcccacttgtgagtggaagttaattaatgtgtacacatgcacatagagtgtggaataatagtcattggagtctcaaaacggtgggagggtagaagcagggtgtaggatgaggaattgggtagaagcaggatatgggatgaggaattgcttaacgggtacaatgtacattactcgtgtgatggttacactaaaagctcaaacttcaccactatgcaatatatccatgtaacaaaactgcacttgtaccccttaattttatactaataaaaaaaactgaaataacacaatttcataaaactattgctatttggttgtggtaatattatatgtagatgtctaattatctatttttttcctttctggaaagttattcaacacagagaataaagcagtgtccaaagaaatgtrtaratgtcaacagcaagacccttaccaaaagcataatgacagtttcaaaagaggatactataatttcctatttacaactttaaaagttttktrtcttctatgccacttattttcccttattgaaatataaattacttggaggaaaaatacagaggtcttaaatgaaccatttgacaagttgtgacaaacacatatatccgtgaaatcctcacctctgccaaagcatgcaacattgccaacaccttagaagctgccttgtgcacttttccagccattacatcttcctttaccaccaccagaagcaaacaccatctagcacctgccaccatagattagtttgttcatgttttttagcattcacataaatggaattctacagaatatgtatttttgtatgtgttgcaactttcactcactataatattacagagattttttcatattattgtaggtattagttcatttttgttggtaaataatactatattttattaaaataccacaatttatttactctaagttgtatttaggctgttttcacttttttggtgttataaatatttttgctataaacatacttgcataactccttttgtgaacatgttttcatttctcttggctagtacatagaagtataatttctcagtcataaggtggatgcataagttttacaagaaacttccaaacagagttccaaagtggctttactctttcacagtcctaccagctgtgggtgggtgtttggttcttctatgttccagccaccttttgatattctcagtctttttagtttcagctattctagtacatatgtgttgatatctcattgtgattttaattttcttctccctaataagaagatgttaactcttctttatgttcttattggccttccatgtatcttactctgtgaactgtctattcaaatattttgtccattttttaattttttaattgatttcttggagttcttaatcattctagttataagtccttagatcagcaaaagcatttgacaaaatccaacatccaatcataataatggccttcagcaattcattaatagaaggaaacgtctacaaaaatcctatacctagtatcatacttaatgttgaaaggataaattattttctcttaagatcaagagctgggcaagaatgtccattctttctacttctattcaatattgtactggaagtcctaaccagcgcaataaggtcataaaaataaataaatgatatttacattggaaaaaaatgggcttgcactgtctttatttgcagatggtaagattgtgtgcatagaaaatcctaaagaacctataaatacactattaaaataataagtgaatttaacaaagtttcataatacaaaaacaatgtacaataatagttctgtttctacatgaacaattggaacaatgaactggaaattaaaattttaaaatgtcatttacaatggcatgtaaaaactataaaatacttaggaacaaattaaaatatatgtagtatctgcactgaaagaattgctttcacagcgacgtggatacatgcagccaacaagcgtatgaaaaaaagctcagtgtcactgatcattagagaaatgcaaataaaagcacactaaaataccatctctcaccaatcagaatggttattaataaaaactcaaaaaataatagatgctggtgaggttgcagagaaaacagaatgcttgtacactgtcaatggaagtgcaaattagttcaaccattgtggaaagcagtgtgttgattcctcaaagagcaaaaaaaagaactgctattctacccagcaatcccattgccaaatatatacccaaaggaacataaatcattctaccatgaagacacatgaacacatatgtttattgcagcactattcacaatagcaaagacattaaatcaacctaaatggccatcagtgacagattggataaagaaaatgtggtacatatacactatggaatactatgcaaccataaaaaggaacgagatgtgtcttttatggaaacatggatggagctggaggccattatttttagcaaactaatgcaggaacagaaaactaaacactccattttgtcactcataagtgggagctaaataatgagaatacaaggacacaaaatagggaacaacaaacactggggcctacttgaggatggaaggtgcaaggagggagaggatcaggaaaaaaataactactgggcactatgcttaatacctgagtgacaaaataacctgtataatgaacccccatgacacgagtttacctttattacaaacctgcatatgtacccttgcatctaaaataaaagttaagaagaactgctgaagaaaaattaaagaagacttaaaataatggtaagatatattaagatgttatttctccctggattgatctgtatatacatcataatcccaatcaaactcccaacatgtgttttttagaagttggcaagctatgctaaaatttacactggaattcagacaaactagaatagccaaaacaatcttgaaaaaggagaacaaagtgggaagtgggagaatttgtactatctgccttcaagattttctataaatctrcagtaatcaagcaagtgtgtttgggtgtcagggtagacaaatagatcaatgtaatggatagaaagtccagaaatagacccacacatatacactcaattgatttttgacaggggtgcaaaagcaatccaatggagaaaagaaagccctttcaacaaatagtactggaattattggatacctatattaaaaaataaacctcatgtctacctcacacaggacaaaaaagtaattttaaatatrtgatataaaaaagtaaacagtaaggtaagactataagactttctttttagagttttagattcacagcaaaattgaacagaaggcatatactccttgccttcaaactgtacatttttaaaagcaaacattaagtaaatatctttataaccttggggaaaggaaaaatgtcttggacaggataccaaaaaaacactaaccatacaagaaaaaatagatgaattatgcttcatcgcaattaacatactcatcaaaagatacaattaagaaaatraaaactcaagtcacagattgggagaaaatattcctatacttgtatctcatgaagaasttgtgcccagaataaatgtatataatattttcaaaatgtaaactgtaataattagaaaatttaattttattgatgagtatatagaatcttaaaatggaaaatctataataaggacctgctggtaggctcttgcagcttactcctgtccatctatgataacatttttgggggacttttttatactgtaatgaccattcttggagctaacccataaaagaggagaagggaagggaatgaaagccatttttcttcaagttcattgtatggccctgtacttcttgtccatgttatcttctcccattacagctttgtccccacagttattctccctgggactgccagacagttacattatgttgttagaaaagttccagatgatatttgcatttctatcagtcacttgggtaatgattgatataaaatatattattgaggtcactttctatgattgtagtcagatcacatgaggctaaatattttttattgttttagttcatttcatagggcatgaggaaggaaaataaaaaacaaaacaccagtccctgaaagttcaaaggttcaaaattatcagatcagaatgtactgcataaatgttatgaagacttaatctacatctgaatatcgtcagatggtttgagtgatatcttaagtagaatgctggagtgtcaagtatcctgtaaaaataagacagacacctgttttataaattgtgattattcctccttagaagcaaaaaatgttggataaaatttgttagccccatcttgttctgagcttctgatcatctcatcagtgtgtgatgatcccacaaataagtcaatgtgctgtagtcaaaagcttaccacagaagagagagtgcttgaaacccagaaggtctgagtttaaatccaggcatgatgccttactactgggtgagcttggaacagctacatggatcccacaatcctccatttatgtaaaggcaaactgagatgatgatagctattttgcagtactttgtaaagattagaaatcatatatgtacacagaagtcttctgtgataaaaaagagaaatcctctatctaaagtgtatagcatgtagttgtaagcaatcaatacatggtggttgttattataactattcgtaacatggagaggcatagatagataggcaatttgggataatactgaatatgtgatatatccatttccaaaatatatgggtaatattggggtagatagaaacatttgagcaatactttatgagttgattccttctctgctttgtgcagatttttcagatggtacttacaaattgtttttagaagttaccttaacctattgacaccatgattttactagcttagttttgtttgatctggtcaaaagctagcatctttgtcttttgaagcacctcctatcccaaaaagcttctaaataattgagaagtgttcactttccaggtaaaatggagataaattaattaacttcaagtttgggcagtaaattgtcatgagtagtccatcattcttcctaaaataggcagaagggaggtgtctactgctgttgccaaaagttaacatctgaatttaacgtgaaccattaggggaggggctgataagagtccctcaagttatgggaagaggtagttttgcattgcttgtaaccagagtagtttgtgaagtcctgtaagcctccccaacttggtttctctcatcccagaggtaagttggttcattttacaaggcaactctaatcatttggtagtacctgctgggagccctgtatagaggaagctcgtgattcaaagcctagcccagcagaggtgtgtgatcaattgtcagtgcctgcatggacattgagatataggatgagatagtacagaacatggatttccacttccatgtctgagtgtggagtaccaacaggtcaccaattctaggaatttgggcagcaatgtgctttttgaatctgtagctgctacaactgccttatcacaatccaccattgcatgcctgaaataaaatgtaaactatactacattttcattgtgttgtcattctcccataagttcctttctcttgtccatcgtgcttatacagattatgattccccatttctccttactacatcaaattgccaaacacaaatgcagttacttcttttgtcacattcatgggagtggttaagtataattcctcatacttcatcaaatataactaatcagaatgcaccttatttaattatatacttaaaacttgtataataatgcttttcatattcaacacaagttgtccagattaattctgatgttgcttttaaaccatgaaaaaaaatgaggattgttcttgttctgggtggagattgaggatttaaaatgaaatcattactatatccatgtaagttaaaacttgaattcaaattctagccttgaattcatgccctacctttccttctatgatctctacacaatcagtggacatttatagcaaaccagttagctttgttcccaatcctcattttatggagtraagaaaatacctctctgcaattttgagctatgcccctgatactcttcctgagaaaaacatgtatttgttatatctcccgttaagcccatctgctcacttgaataaagggaatattagtttgaagatacaattttctggtaattataggagacaaaggagtcattttgataatgtaaagagtcaacagaaattataattatattgagctttatgccaatttgtcctcatctaagatttcaggggaaaaaattgaaatgtctgctgtttggaataataaaagggggatttaatttaccaaaaaaaaaagtcaaacaaaacaaaccataattaaatttatttttagcttcaagatgatatggatattgaacagcrttaccaaaaccctgggagcttaggaaggataggtgaggatatcttcagttgccctgaataattggcagtctcacacttaaccaaatcagtttagacattcagatgaaatatccatctcctttccttttcttcttagaaacctggttactctgtttggttacccatattgatctagttaaccacctaattatcaaatatccactctattttatgctgtataatcttaaaaagcaatgttattggtagctcaaatccatgccctataatagttctgtgcttcatagtcacaggtggcccctcgaaatgtgtctgagaagatgtgactacaacgcgcacagaaaatgtgactaatgctgcactgagaagcctttgatttgcagcttcaggcactgtttatgaagtgccttatagactggaagtgccctgaagccttcactcccagccccttacaccatgctggccagtctgctgtggattgtttcactgtcaagaccatgccttttgaagatttgttgccatacatctttaaagcatttcgtttgtcttccctacttatcaattttataccatttcatctcaaactatagagccttttctaggtcctgtgctggctgttagtctcttcatttgctcagcccagcccagctgagctgaagaatgtcacccacccatcatcaggctatcaatctgggcacctttcaaaccctaaatgttaccaagtctttatttccacttaatgtaggtcccaagtgaaacaaacaaaagcaaacacatagcatttgtggtaatccagtcctcctaggaaaataaaattattcctgtgctactgtatataatctttattgagatacagagtaaggctggaatgccatctgactttgcrtgcttttggcatttgtggtagatattgctagtgctcgctaatattttctattctttgtcccctctggttttataagaggcaaacctccctgccccttggatgttccatatgagtgagcgacttactttagtcaatgaaatgtgagcaaagtgtggtgtatgactcttttggctggaagcgtttaagcactagcactcaattctccctactccctttctctgccacgatgaacactgaagtctcatgctgagatagtggcaacataaaatggatggcctagatggtcagataccacgtattagcacagctagagacacagcagactttttctgagtaagaaaggaacttttattttgttaagccactaagatttaagggtctattattaccacagtacaaccagcctatgaggattaatatagaattccagataacttgtaactgtttccaaaggggtagctggctctttagccctgtgaaaaattatgaaatggaaaagttcatttatatggttagattttgtgcccccacccaaatctcatcttgaattgtaatccccaaaatccctatgtgtcaagggtggaacctggtgagaggtgactggatcatgggggcagtttcctctgtgctgtcctcatgagaatgagtgagttctcacgagatctgatagtttcataaggggctcttccctcttcactcatctcttgcctgccaccatgtaaggtatgcctttgcttccctctcgccttttgccacgattgtaagtttcctgagccctcctcagcagtgcagaattgtgagtcaactaaacctcttttgtaaattacccagtctctgttatgtctttatagcagtctgagaatggactaatacactcattttttgtgttcttcacttccttttctgcactccttcccatctgcaagtagctagtgctgtagtgcagtttcccattatatcactccactagtagtctgacctctcctgtcagagtgctccaggctaccacatagcctttctttccataacatacagctaagatgtttatttccccattgtgcctatgctatggtctgaatgtttgtgtcccttcaaaattcatatgttaaaatcttaactgccaaggtgatgctattaggaggtggggcctttggaaggcaataaaattagcgtccttataaaagggaccccagagagatcccttgccccttccaccatgtgaagatacagtgagaagttgccatctgtatggaagcaggccrcccccagataccaaatctcccagcgtctcaatcttgaacttcccagcgtccagaatggtgagaaataaatgtatgttgtttataagccaccaagtttatggtattttattatagcagcctgaacagactaagacagcctgactttaaataagttaggaggatatccagcaattggcctcctccaactgtggaaccaagaagagtgtgcaccttactcatggtttctgtcttgtaagcagtaagccttggacaatatacatactttctcttagcccctatttcctgatccaaaaagttaggatatatatatcttataggaatgtcaaaaaaaaaaaaaaagaaagaaagaatggtctgaatttctttatcccttcacagttcaggttctagaaaatgtcatccgtactcactgcccttcgtttcttacttgcttttctgtcttcagctactcaaggttagatttctacccactggcaacctccaaaatcactaaacatgctctcactaaagttgagttatttactactgatcactcaatccagtagatacttcccagtctttattttgcaaaatctgtgtgacattcaacaactgactactccttcatacttgaaatgtattctttgacttttaaacacatttttctcatatttctctattatttctttcaaggaaacaaccgttcgtacctagtatttgctggtcattatagatgcaaacattaacagtaatataattgtgcccttaaaaggatcacagactgtgtggaaatwgaacgcttaaacagttattaataatatagtgtgataattgcaattatagagatatacacagacaacaggggatgagtttcagaatgttttcctagataacctgaaacaaagtctagtaggagtgggaaaaatactctaggataaggcataaagcgtggcaaaggcctggagataaacaatatttctgtgtgtgaagagaaacttcttagagttaatcttttaggacaccccccctacacacacacacacacacacacacacacatttttttgtcccttgaatactggtattcccttgttccatctctggctctcatattgttgtatggtcatttgacccctgaagcmaatattcctctctttattgttatcttccaaatctgtactctcaccaaagacctccctgtggaccctacacattcctatattcagctttctggtggactttgatacccaacatcccagttcagtgctttttctgcaacctcagaataaaacaacagtagtgattatccctgacaattatataagcactttataatttagaaagcactttggcatacattatctcaccagctgcttccttaatgtaatagcagcagtgggcaaaaaaccgtgtcactcccgacagctcttttctgaccttggtctcccagccccacctactaaaaacatgakagcatctggatgagagctgattagagcctggaagctgaccttgtgtggggaccaggggagcatgacagcagtagttgccacctccacaccttctccatctccataggggcaatagagcaagccagagatttcatggcagaatgcaggaggctacacagagcagcaaggcttcycatggcctgcctaagcagaggctgatgatggcaggcatcagcttgtgggaggttaagcacttatccactctccccccacttttctgatttctcatttcttccatgcattaactaccactttgaaagtttcagtgggttaattaaattcttctagtgttgatgctaagaaagctgaaacattttcaactgagattgacactactcaagacataggcttcactgatgtttgttcagtaacactccaatatgtcacaggattgccgagagaacatctgagagctataatgagctaaaagtcaagtacaggggaaaatgtgttccagactgctgcagatgttctcaaatcaaatcttatttctgtgaaatgccatatagaatattcagctgttgaaagatgcaacaygaaaggacagttcaattgatttgyactgtatttaaaaattttatgtagcctaaattatatgaaatggtttttcccacttttgaatcaattaataagagatgcacttgattctaatgagcttcaaggatgattttttggactaagaggtatgcattaggtggtttaggtaggagctaaggcttatagaacgtggcagttgaataagggaaataaggtatagttgagaaacagacattctctagacccactcccttgccyttattcttcctttatcgctttggcaccaaaatggagaagacttctgttgaatgaattcaccaagattctgataagtctatctgtgatactatgttgatagtgaatcattctgcccctcctgagaaacccaaaggaagcttacaggaggagatcaaggaaatgttttggcagatgcatctgttgtcataatcaacttatatgtcatcacacaggtgaccttgcacatcaccataattttggtagtctgtcctttgattgggaatagtattctcttacataaaggaaagcactgaacaagaactgacaacctaggtaaaagagagaaaaatgcttaggtgagattagaaagtacagtagaacactacaatgagatattacttcacaccccctagaatagctaatgttcaaaatactgaaaacataaatgttggcaaagatattgagcagcttgaaaattcatacattgctaatgagtatataaaatggtacaactactttggaaaaytctccagcaatttcttgtaagacccaacaattctacttctaggtatctttccaggagaaatgaaagcacatatccataaggttttgaggtaattgaatctcacaaacatrtaaggaaaagaaaccagacacaaaagagcagttaccaaatgatttcatttatgtggagtttaaaatgggagtaacaaatccatattatttgaaatcaagacagaaattttctccagtaatatttttatcctatatctcaactggggtggtagttttgtgaatgtgtatatttgtctaaagtgtaactgtatacttaaaatgtgtgtatattataaatcctacatattataaatacattgttaatttttttaagaaatgcaaactcactctgaaagaaactataggataagcatttggtaatatttctatgacaaaataagatatatcatataagaaatactaaagacattttttatgcccaaattacttttaatcaggtagcctttgggaactaaaaaccttatgaagttaaccactggaaaagaatagctggtacctagataaaaatcttggctggaaaccagcttaaagaaaatgaatggctaggggcataaacaaatgcatttcactctgccaacttgccagcagctgggtgtggagttggaagacttccggcctttcacatcagggaggctggctaggacttagaaacagagaaggggcacatctgctccttgaggagtggagtaggtagtggatgtggtgtcacaactcaaaggagaagctgcttcttaaagatggaaaatttgattaggtcttttggtaggccttccatgtgctttgctttgtaggatcagccagtgcctgcagcctccgttaacaaaagctggccttgcctgaggccaaagcttccagaacagaaccttaaattgattgccgataggatattacatgcagggctggactcttttgccctaacgtcctacctacccttatacaaacaaacccagtgggaaatttgtctggaaactttaaatcaaatacatttctagtgttttaatatatgcattgacattttgtcttgtaatagcattattattaatggataataaaattataacatttatagaactgaaracaaaacacttgaggttgaatttccattcactctgggtacactttgtgcattttgtagggcattagtattgcaaattggaaaagagtcaaaactgtactttcattctgctatttttgcattcaggatttctgcctttgtacttcctattatctaggatgcctctcctagaaaattgtgactggaaacaagtatcgcacatcttttctgaactcacataattctgacagattttgatttttggtactaattagaatttattttacatatccctgcctcagaaactttagtgtttggattttaatcatttaaataaacatctatgcatttaacatatattgagtattccatgccaggcactgcagtagttaattgagattgagtgattaataagataaactctttatcattgatgatcaattgtaaaaaaaaaaatagtaataaactctaaatacttcacataattgtatataccttttgtgtgtgtattttatatatgcgtgtatatatatacacattatgtgtgtatatatatactcattttacatatatatgtacgtatatacacacatatatgtacgtacgtatatacacacatatatgtacgtatatacacacatatatgtatatatgtacatatatgtgtgcatatatacacatatatgtgtatatatgtgtgcatatatatgtacatatgtgtacatatatgtgtacatatatatgtacatatgtgtgcatatatatgtacatatgtgtgcatatatgtacatgtatgtgtacgcatatatgtacgtatatgtgtatatatgtacacatatatacacatatatatgtatacatgtgtacacatatacgtacatatgtgtatatatactcattttacaaaggtgaaaactgaggttaaagaggtttagatatttattagtggaagccggacgcaaacccaattctgtttattacaaacattgtgcccgtaaccattcaattaccactcctcaacataactgctattatgctatcggagttatggaattagaaggaaacaagtgtccatctcaacctagggcatcaggagcagttgggaggcaacagatgaactgagtcttgagggatgaaaacactgtaaggtttatgtaaatgtcctcattaattccattctataggcaatggctggctctggctaaatgatcatttgtgaaaattgctacatttttatttatagtagagaaagagttacaaatctgttggataattaattccttctcccgatagggcacaggcttcattcttagtttgtgcttttgggtgtcgttgtcatttagcataaakcctatcaaatctttgtgagtttcgcttttacatttccttcatctgtgacgagaagattctattagcaaccctggcaccttccattaaagtctacaacttccaactgccaggaarggataatgaagtgataaatttaatttgataccaaaatatggaaggcagagatatctaagtgaatttatagcattagctatgtctttcttcttagcattaacaaaagttttatggcaggttatcaaaatcagtgcaataaaaacaaattcatatgaattcccatacacagaaatcagatctatactttgtatcaaatcatgtctttccctcctcttagcatttttgggctcgtcagaacctaatatgagttttaagtattttattacttgaaggatgacaaaaaatactgttgatcagcttatgaagcattttttactcattaatgtatgtgtcctggagtttataaaatcgaaatctccttctccccactggctagagaccagagagcctacgaagaaagataacaccatcaccgatgcctacagttgtgacaatgagggcrgttcaaattctgtgggatggaaaacccactttcacctggatttcttaactgtttgtatcatggtcgtaaacacaaaaattctttttgctcatttgcgtccttatactttgtctaaatactaacatttccacatcaagatccctttgttttagtgagctttatcttacacctttatctttatctttccatatgttagcattacaattaatattgctattctagttgcaggtgatgcctataaactgcacccatgaaatgcacagccaggctaagttctgctttttccatgcaatgatgtatgtgttcatcctataaaacagacacaactgttagaatcagtttatgagtacaaggttatttgcccaaggaaaagtagaattgataatcatgataatgacaatacaaattaaaaaccttcaatggttgttatttaacattttgagggctttttgtgttatctactttaatcttacaatgatttatgtaaggtatgaattattattctctatcctgttgagaaaaggaaggcttggagggattaggaagttgtcctaggtcccatgctggaaagagcagaggcagcattctggtcctggtctgtgtgctcacaaaacctccgcacttgcctactacattctaccacctctacttgttatcctgtccagagagaatcattgtttttaatgcttgggatttgattctgagttggcagagagcasattaagattttgctaatctgtgggcaagattgttgaacgttttacctctttcccagtgacctgtggcagtcagttgtagtagaaataatacaatacttactcacctgtattcagtgaacttaggataaattattgcttttgcaggcatgccaccttctttcctcaacctttcatcattggcatcaagccacattgccatcgtgggctgatccttaccatggaccttccgtttattggcaaagatcacaggtccaactcttcctccttctattctgcccatgtatgttatattacttgacttttagcttttctacaacaaatccaacttgggttatgactccatgtatttatttacatgcatatattttccctaccaatgccttaattaaactagtttttctagtctgttgattatgtctttgaaagtatttaagataggccatgcacggtggctcatgcctgtaatcccagcactctgggaggccgaggtttgtggatcatgaggtcaggagctcgaaccagcctgaccaacatggtgaaaccccatctctactaaaaatacaaaaattaactgggtgtggtggcttgagcctgtaatcccagctactcaggaggctgaggcaggagaatagcttgaacccaggaggcggaggttgcagtgagccaagatcacgccactgcactccagcctgggtgacagagcgggactctatctcaaaaaaaaaaaaaagaaatggaaagaagaaagtatttaagatagagacagccagagaataatgaagaagagaagaccttcagggaatggggagaaacctgatcctgaggtctgcatagatccctgcaaattgccttgttctccccagctttgggccttcccttcatcagctgcattgcctatgtagatgtgtatggttgcctggctgcatgcccagcaaactgttgatgtgaacattgccttctgtgtctcttcagtcgtgtcaatttcatataaaatcagctatctaggcagtaactgagtactcgaatgggcttcagattcccctgtggtaagcaaccttcaattggcttataattcttattactgtccagggtaccaggcaatgactgatttacacttaatagcaaggaaaaccctagatatacctgccaaggaccttagagtgtcctcatcacaactgcaggtgaagtttccattcatacagtccttactcaagcattgtaatgtatgcagttctgcagaggaccaagagaaaacttatgagggccatctgaaagtattctagatctgtatgtgggttatttcccctgcctttgtgatgctaatatattttctgtatgtatgcctgcatatttctccctggaagttccctagaggatacctagcctcatactcttgcaccaaagaagaattcccaggataatgatctaaatatttatctattccttagttatttattgagtgtcacaaggtataaataccatggttggggtgaagtgagatgaggcagtagaagggatgcaggtggakatggagagctccaaggatgtttctgagtgattccagtgtcatgagcatagaatgtcaacaatccaaggcagagcataagtgtgcatacagcaagagttacactaccagtcatcaacagggaggatttttgaagttttcatttattatgctaaatatgtatagaatgcagattaaaacaacatggctagttcagtagtgattaaatgtgacaggttgctagtagagtctattaaaagaggaaagtgtggaagtatttttgcagtgagctgagatcgcaccattgcactccaccctgggcaacaagagcaaaactccataacaaataaaataaaataaaataaaataaaataaaataaaataaaataaaataaaaattaattaacccaatatatcaaaaaaatctaatcaattatcataggcatctggaagcacatcttcctactaagggcattttctctcaagtatttcgccttggaaagaaatgctccttctaagacaaaatgtaaagagaatgccaatttgtaaacatttggagttggaaagaaaagaatacattatggattactgatatcatcrgtaaatattgactttttagaacactctgaagaaaatggtaatgattagaccattccatagagaagtaaatgtaaaactgtaaaatgtttataggtaacacaaagtaggtagaactattaatatttcaccaagaagaatcatcagtttgattattcttcttgagcaaaacagaatcactgctgggtgtagtggctcatgcctgtaatcccaacactttgagaggctgaggtgggtggatcacttgaggtcaggagttcgagactagcctggccagcatggtgaaaccccatctctacaaaaaaatacaaaaattaactgggcatggtggtgggtgcctgtaatcccagctacccaagagactgaggcaggagaattgcttgaacctgtgaggtggaggttgcagtgagctgcgatcatgccaatgcactgcagcctgggtgacagagtgagactctgtctcaaaaaaaaaaaaaaaattactaagtgggaattgaagccccttctctatatgagcaagcatagtcaggtgtagtgcctaatcacgttaaattcatttttatcaaagggtgaaaatgtgaattctgaaaatttctgaatattaaagttcaatttggtcatctaraatatatctaaactcattggtyaaaaaaatctaaataaggaaaagtagcagtgttcctctggaagcaagatttgtctaaagcaatgtatgtgaatagggatagggagaatgaaaattcaatgagaataactcataccagatgaacatactgtcctcttttaatatgtttccaggcaatggataacaattttcacccaactcttactaaatattaataccttgcagtgggctttacttcagttacctcatttaaccctcagagcaatctgtgaagtaggtcttcctgatacctgtgctttaactgatgataaaacaagtggctcagctgagatttgaacccagacaacaggaaatgaaagcccaaattccaaaccattctacatccctcaatagagtgaagagctgctgccagcaaggcatatcttgctttctggaaggcatttgacagctgagtatgatagcctgttacacattgtggagaagattgttacttggatcacagagctagaaagcctcataatattctgatttccctaagaaaagcttaacttgtttggagaatatcacgcttaaaaaaagattttatgttcttagagttcctcagatttataattagaatctgtgaatatatgactggaataaaaactttaggtttatcatccactatagaaatctgtcatccaaactagaaaacattactccatcaggatatgttattttattaaaaataatgtacttatgactattaaatgagagtagttgacctctgaaagaaaggtctagaagttttcccaagattggtaataaagagctacaaacttgtgaattttagaaataactactttaaaatgcaggctctttactctttctaggctataatatacctttatgctatcagacaaaaagccctactttactaagtgaattattaatataaacacatttcaagaaattgtttaacctacttaagataattaacagctttcaagtacgctatcaaaactcacatgaaaatcaacaatgaatatgctgttttaaatgaatgtttgttagcaattcttcccattggatgtacctgaaaaaaatgcatttctttcccaataatctgtaattcagtcttttcaccaattcaaaatgactcttcacacaattcatccacgttagtgcatttttgctgtagacttttgtagaatatagaaagcatcctactccctgtggatataatttgatctcagttatatagtcattttctcattctrtctgcctctaccaggaatttttcattagttgcttactgatcttactctagagactcaaagtaattatgtccaagaattgtacagtgtcaagaagtggtaactttcaggaaaaggagtgatatgtgctttaatttttaaatctaatgccagcacactaaataaaatcgagagagtatatgaatatgaggtagctattccatggaagtatatattgtgctcttcctatgtccaaaataattttaaactacactaaaacttttgaaaaatgtacacttttaatgggatatcttctgaaaggctttgaaagaacaagatttcccaccaggaaaactgaaatataaatctattcatgaagaatctcttctaaagcagaatctcatattttttataaatctaaactttggctataaaaaaaattcctatttctgaatttagcattaatatactctctgaagtgattaacaacattagtggtaatacaaactattgaaaataaaataaaaatattttccaaaatgctcaaataatatggtactttgataatattcctgtatctgcattaaattctgcttttttaaactttgaaatataagtatagggccatctggcaagtttggcaattcttgcttatgtctggagaactcataacataaaatataatttctggcacataaaagcatttatacctctgaattaagagamggggaagtgtggaaggaataggtagctgtgtcggtcagctgccaagggctgaagggaaggtaaagataaaccattagttgtcttaaggaaatcttaaaagaaaagttaatttttcccatttgtatgacacctaagctttactgtacagtgttacttttttcatgttaatgtttttaaaacttttattttagtacatgtgcaggtttgtcatataggtaaactcatgtcatgggggccccttttacagattattttgtcacacaggtactagtcctagtacccaatagttattttttctgattatctgttttctcccacccctcactctcagtaggtcccagtgtgtctgttcccttctttgtgttcctgtgttctcattctttagctcccacttatgagtgagaacatgcagtgtttagttttctaaagataacggcctccagctccatccatgttcctgcacaggacatgatctcattctttgttatggctacatagtattccatggtgtatatgtaccatattttctttatctaatctgccattgatgggcatttaggttgatttaatgactttgctattgtaaatagtgttgtaatgaacataccttatgtggacacgtatctttatggtaggtagaataatttatattcttttgggtataaacccagtaatgggattgctgggttgaatggtagttcttttttaagccctttgaagaatttccacattgctttccacaatggttaaactaattgacactcacaccaacagtgtataagtgttctcttttctctgcaacttggccagtgtctgctattttttttttaactttttaatagtagtcattctgactgatgtgagatggtttctcaatgtggttttgatttgcatttatctaatgatcagaaatattgagctttgttttcatatacttgttggccacatgtgtgtcttcttttgtgaagtgtttgttcatgtattttgcccacttattaaggggttgttacttctttcttgtaatttgtttaagttccttattgattcaggatattagatctttgttcgatacatagtttgcaaatattttctcccattctgtaggttttctgtttactctgttgacattctctttttctgtgcagaagctcttaagtttaattagttcccatttgtcagttcttgcttttgttgcaattgcttttggaagcttcgtcatgaaatctttgcccattcctgtatctagaatggtgttgtctaggttgtcatccagcgtttttatagagttttacatttaagtcttcaatccatcttaagttgatttttgtatatggtaaggaaggggtccaattttaatcttctgcatatggctagccatttatctcagcatcatttatcgaacagggagtcttttccccattgcttgtttttgtcagctttgttgatgattagttggttgtaggtgtgcagccttatttctgggcttatattccattttattggtctgtgtgtctgtttttgtaccagtaccatgctgttttggttactgtagcccctgtagtatagtttagagtcaggtaacttgatgcttccagctttgttctttttgcttaggattgccttggctaattgggctctttttcagttccatatgaactttgaaatagttttctctagttctgtgaagaatatcattgataatttaataggaatagcattgaatctgtacattgtggctgggcgcagtggctcacacctgtaatcccagcactttgggaggcctaggcaggtggatcacgaggtcagcagatcgagaccatcctggctaacatggtgaaaccgcatctctactaaaaatacaaaaaaaaaaaaagaatctgtacgttgttttgggcacttggtcattttaataacattgattcctcctgtccacgagcatggaatgttttcccgtttgtttgtgtcatctctgatttatttgagcagtgttttataatcctcattgtagcgatctttcacgtccatggttagctattcctaggtattttattctttttgtgacaattgtgaatgggattgccttcctgatatggctcttggcttggctgttgttggtgtgtaggaatgcttgtgatttttgtgcattaattttgtattccaaaactttgcagaagakgtttatcagctgaaggaacttttggggcaagactatgaggttttctagatatagaatcatgtcatctgcaaacagtgatagtttcacttcctctcttcccatctgggtgcccagtatttctttctcttgcctaattgctctggccgggtattccagtaccatgttgaataggagtggtgagagggggcatccttgacttgtgctggttttcaaggggaatgctgtcagcttttgccctttcagtatgatattggctgtgggtttgtcatatatggatcttattattttgagctgtgttccttcaatacctagtttattgagagttttaaacataaagggaagtagaattttatcaaagaccttttctgcatctattgagataatcatgtggtttttatctttagttctgtttatgtgatgaatcacatttattgatttacatatgttgaaacaaccttgcaccccagggataaagcctacttggtcatggtgaattaacttcttgatgcacttctgaatttggtttgccagtattttgttgaagaatttagcatcagtgttcatcaaggatattggcctgaagttttctttattttttactacacaacttttcaacttgccatttttccttaatgattgaactctatgaaccaaaaataagtgaataccagaaagttgtctctcaatcttgtttctaaaagagggtgctgtggtttgaatgaccacatcccctgtaaaactgatgtcaaaacttaatccccagagcatcagtagtaagagatgtggtctttggaaggtaattaagtcatgagggctccaaactcatgaatgagattagcacccttatgaaagggtttgagggtgaagggaacactttcttgcccttctgacccttccacaaagtgaggacagagcattcatttctctggaggatgcagcaacaaggcgctatctagaaagcagaaaccaaactcccaataccaaacctgccagcactttgatcttggacttcacagcctccagaactgagacaaaaacattctgttgtttagaaattacccagtctgtaccattttttatagcagcacaaatggactaagacagaggatcatcctattagtttctgatattgttcacaggaaactatgtgttgatttgggtagtagattgttttctttccatttggaaaagcacctcaactacatatagtttaaacttcatgttgaaaagtgtctgttcatgtccttcacccactttttgatggggttgtttgtttttttcttgtaamtttgttggagttcattgtagattctggatattagccctttgtmagataagtaggttgcgaaaattttctcccattttgtaggtcgcctgtttactctgatggtagtttcttttgctgtgcagaagctctttagtttaattagatcccatttgtcaattttggcttttgttgccattgcttttggtgttttagacatgaagtccttgcccatgcctatgtcctgaatggtaatgcctaggttttcttctagggtttttatggttttaggtctaacgtttaagtctttaatccatcttgaattaatttttgtataaggtgtaaggaagagatccagtttcagctttctacatatggctagccagttttcccagcaccatttattaaatagggaatcctttccccattgcttgtttttctcaggtttgtcaaagatcagatagttgtagatatgtggcgttatttctgagggttctgttctgttccattgatctatatctctgttttggtaccagtaccatgctgttttggttactgtagccttgtactatagtttgaagtcaggtagcatgatgcctccagctttgttcttttggcttaggattgacttggtgatgcgggctcttttttggttccatatgaactttaaagtagwtttttccaattctgtgaagaaagtcattggtagcttgatggggatggcattgaatctataaattaccttgggcagtatggccattttcatgatactaattcttcctacccatgagcatggaatgttcttccatctctttgtatcctcttttatttcattgagcagtggtttgtagttctccttgaagaggtccttcacgtcccttgtaagttggattcctaggtatttttttctctttgaagcaattgtgaatgggagttcactcatgatttggctctctgtttgtctgttattggtgtataagaatgcatcagagaaatgcaaatcaaaaccacaatgagataccatctcacaccagttagaatggcaatcattaaaaagtcagtaaacaacaggtgctggagaggatgtggacaaataggaacacttttacactgttggtgggactgtaaactagttcaaccactgtggaagtcagtgtggcgattcctcagggayctagaactagaaataccatttgacccagccatcccattactgggtatatacccaaaggactataaatcatgctgctataaagacacatgcacacgtatgtttattgcggctctattcacaatagcaaagacttggaaccaacccaaatgtccaacaatgatagactggattaaaaaaatgtggcacatatacaccatggaatactatgtagccataaaaaatggtgagttcatgtcctttgtagggacatggatgaaattggaaatcatcattctcagtaaactatcrcaaggacaaaaaaccaaacaccccatgttctcactcataggtgggaattgaacaatgagaacacatggacacaggaaggggaacatcacactctggggactgttgtggggtggggggaggggggagggatagcattaggagatatacctaatgctaaatgacragttaatgggtgcagcacaccagcatggcacatgtatacatatgtaactaacctgtacattgtgcacatgtaccctraaacttaaagtataataataataaaattaaattaaatttaaaaaagacttcatgttgaattaaaagtgaagtaggataatgtctctgtatattccaagtatatttatggctgtttgttgattggcttagaaatacccacagctccgttatgattgctgatgcttttagacggtgagaactctttataaagggtcctaatgtattagaacattgatattgttgttttacttgtatcagtatggtagaatgatgggttgcattgccccacagagtttccaggctgttttctgtgacagagcttttaacattaaaaatgaaaacattcaacaatagtggtatatatagtcaggctgtttgagacattccctgtaactgtgtaagacactttatttaagggaaaaatccttgaagaaattaattggtatgagccagaagttgtttggccgatttaatcgctaatctgctgttgtttctaaattgaatgagatccagaaggaagtctgcctgcttccaaatcagccaattcaagatatgtgtgcaggatggagttagaccactgtatgctaaaacgccggctcaaaattaagcaggctttgctatggttggggatgagggagtgattagccaagttttaaacatgctaattcacttttcagggcattttgccaagttaactaaggctatcctgaaactacttgaaaaattaactcaagaataaatagtgaccaggcctgaatttctgttttcaaaatttgttaagaactgaactttgaaaaataaatcagtaagtaaagtaaggcttttattcagatatcacattatggaatcccagtcatagtacagtctcttgtggatgaagtaaacaatttaggttgtacactttctgctccccactgactagttctatgtgtaaggctgtcctgttctctttgaaattcaatctatgtgacaataagagaaattttaagtaccaatgaaattgtaattgattttaaaccctgggaactagaggggggctaatagcagagggtaaatctcttacaatccttctattcaaagagttgcttatctctcatcatcgaacacccccttacttggccttcaaaattctgctggactctctaatctcacatttttcaggtagtatattaacgagttgttcattttcaattttcttatcagtactacagaaaagatacagtgttagtttagttaaggatgtataaccaacattctattatggagagcttagggaaaatattccatcttgcatttcaagtgtagcttcccattctactgaaatattctgaaaggataagaaagaaaagttgtctttgttgttgtttttctttttcacctatttttataaaataattttctgctttaattccatgtcctttaaataagaattgttctaaaattatcttggaaggcccaccacaacactatatagaaattgttggtgaattagttgaatatataacactgtaaatataaaactattggttattacaatgactcttgacccaaacagtaaaacactatgtcttcctaatgatgattgtatcctaatgataatagtatcagtaagaaagattttatccttcatctttctctacgataaaagaaaagaaggacaggagagagggaaggagggagagaagaagacaaggaaggagggagataagggaggaagatgaaatcataggatttatttagcggcatagtaactgaataatcatatgtctgttttgttatttaatggataaatttattcctttaatattcctatttaacattctaataataagattaaaaggaacagaatgtatttctaattaatttttgttattttcccattttttcatatctccttagctacagttttctacaaacataccacaaattcagtctcaaaattgccccctgaatagtttctgcaacttacttcctacrtattattaaaatgttagaaacctttatttatctaccttaagcttctgtgggtttcttaaactggtaaatgtatggtttgtgggtttatttttttaccaagtttaggaaatatttagtcattatttctctaaatagtttttctgtttcattctttcttcctcttttctgagactccaaatgaatatatattagaacttcaaagattgttccacaagtcccagatgttcttttaatttttttaatagtttctctgtttttcagattggacaatttctatttatccatgttcaagttcactgagtctttcctctcataccatctccattatgctgttaagcctacctaatgaactttttattttagtatcacatcttttaaatctagaatttctttttgcttcatttttctcatttattactttgccatatttattatctcatcattcattatcagagtattttactttatattctgagcacagttataataactgacttaaaatccttgacctctaattctaatatctggatcatctcaggactgatccctgttgattgcccttcattttgagagcagtcaaaatgctctttcctatgtctgacaattttatattgtatctggactgtgtaaatgatacattatacagagactctggactctccacacctaagagtcccgatttttgtttgctttagcagacaattaacttatcttaatgcaaaccccaaaactctgccccttctgcagttagcaactgactgaaatatctgtacagttatttcaatcttagctgtgctgcttggcatctgccaagcacatgcatagctcagatgtcagccagtgatttgggtagaatacatatgcagaatctggtgctccctctctgtagctttctttcttggatatctccccagtttctagatgttttgatggccccaactctgatttctcagccagttagaagacgaatttctctctgaattttaacctccctgcttggtaccaccccctgagcctgttctcaggcaaaaagaatagtgtcattcccttcttccaggtgccaattcccctttagtttctgccctcttttggacattcttcagtgcatttggatagagtgtgtgtgtgtgtgtgtgtgtgtgtgtgtgtgtgtgtgtgtgtgtgtgtgtctggtgagttatctgcaggagaagcccaaaggaggtattctgccattaccagaagttgaaatcttcaaaaatcatctatcataaataaaaatatgaagaatccttctagaaagagcattcacctagatataaaactttttcatattgcaaactagtaaaatttgaagacttaaatgttttttgctgttgtttttaaattcccatcctgtgtactgccatcgctaaatcagagtaatgaattcactggttgtgagcaacttgacatgatttgtagaagcacaaaaagccctggggaattggacttggtactgctcacttttaagctaataaagagaaaaccctacaatcaaatgcagtgaagggtataattggtgcaatactacttgctatcagtgtacttttcagggtcatttttgttaactgaggaatgaagtwaaacatttttaagcacccagtacttcaacaagaatatatatggttaccctaagcagtcaagtccaaatatgtgatgcctgattattatagaagtacctattcagcattgctcattgtaaagaatcttattctttagttgcagatatatatcacctgaaatcaagccacatctggaaaatatatcacttttagctccatgtaccattaagggtgaataaaagtgtcaaaagtaaaggagagcttatacacatattacaggtatgggaatgtcggtacaacttgaaaatatatccatcaagagttgtattccacagaaattgaaatatttcagaagcaatactctattgtgtgccatggaatacatatttcctgagtctagagaaatttcaagcctccttttttctgtcgcatatgttctggctgatgccttataatcattgcttccccattcagtcaccatggaaatgagaaggactttgttgtcttggatagagaactgacttaataataggaaactccatatagggataactgggcatttgtgttcctcaggggtcggtaataaaacccatcttatttgaggaataaaatcccacataagtagataagtcttcccaataagaaaaaggcaagatgatggtaatacactgaaaagggatctctaaaactgtgtgcatgggcagaaaaggtgatgtgtgtatgagtgtgtgcaaacactaggtgatataacttattaccaagaaggggtttttttwattttattttattattattatactttaagttttagggtacatgtgcacaatgtgcaggttagttacatatgtatacatgtgccatgctggtgtgctgcacccattaactcgtcatttagcattaggtatatctcctaatgctatcctcccccctccccccaccccacaacagtccccagagtgtgatgttccccttcctgtgtccatgtgttctcattgttcaattcccacctatgagtgagaatatgcggtgtttggttttttgttcttgcgatagtttactgagaatratgatttccaatttcatccatgtccctacaaaggacatgaactcatcattttttatggctgcatagtattccatggtgtatatgtgccacatttttttaatccagtctatcattgttggacatttgggttggttccaagtctttgctattgtgaatagagccacaataaacatacgtgtgcatgtgtctttatagcagcatgatttatagtcctttgggtatatacccagtaatgggatggctgggtcaaatggtatttctagttctaggtccctgaggaatmgccacactgacttccacartggttgaactagtttacagtcccaccaacagtgtaaaagtgtacctatttgtccacatcctctccagcacctgttgtttactgactttttaatgattgccattctaactggtgtgggatggtatctcattgtggttttgatttgcatttctcckatggccagtgatggtgagcattttttcatgtgctttttggctgcataaatgtcttcttttgagaagtgtctgttcatgtcctttgcccactttttgatggggttgtttgtttttttcttgtaaatttgtttgagttcattgtagattctggatattagccctttgtcagatgagtaggttgcgaaaattttctcccattttgtaggttgcctgtttactctgatggtagtttctttaaagaatgcagtttgtatttttctatcagaatggaaccctggaggctaaagaagggaaaatcaagctcctgtctccttcttaggtattattaaagtgagattctctaatccaaggtaaaaaaaatttattcatttcaaataactacagatttaaaaattttccatcactaaaaatataaacattttatttaaaacattatttgaaatcaatcaagttatttatttgtaccaactggaattatctagatcartgctactcacaacatggtacccaaaccagcaacatcagcatchccagaggttgttgaaaaatgcagaatctcaggcccaactccacagctatggaatcacaatctgcattttaaaaagatccccaggtgattgatatgtaggtttaagtttgagaagtactagaayagataatacaataaaataaaatctcaatgtaagaagcatctcatctgtcttatttagtgagaccgttggaaagtgagrtcaaaagaacactaaggaaatttgtagttggctataatttgggaactactttcaattctcagaaaaaagataactagcacaaaagaatctaaagaggttacaaagaagaaagaagaaatgaaatgaaacttgggtaaatgtaagatatgaatctktgaaataataatatcaaataaggcatttaatagacacaatttagaaagcagtattatcaggagacctagggctgggatgaaagtgaagaacaaattatagtaaaatcaggctttcagtgtattaggataataaaaacaactaatgcaatttggggcttcctatccagagacaaatcatggaagagtcagataatagttcttttttaatgactcgagkgaaaattcagagagaatatttggacacaaaagcagaagagctctggtttcatacagaatccagggaacaacaggttataacatttgatagatgaaaagaactatgaatagtgtaaatgatgattccaaagtcagacttatgacaacacttggaaatatgaaatgtgaaaagcctttgattttaggaggcatgaaatttgaagtatagtagtgaaatcaaatagaaaaaatatgtcctgaatattaacacacattccacatatttaatagcagcaagcccaagtctgtctgctcaactattcaggccacatatacgttccctgcaaagaggaaataaccagttgtaactgactcctcaccccaccaccgggtcttgagaaaagttcagacagcctttatagctctaccttgcttcatttttgcaatgacacaagtaaaacacattaacttacttagggtgagtacacctatcatgtatgctacctagacacgtgtttttgtttttatttttaatttattttttatttcaataggttttgggaggacaggtggtgtttggttacaagaataagttctttagtggtgatttctgagatgttggtgtgtccatcacccaagcagtgtacacttaccaatgtgtacccaacgtgtagtcatttatccctcacccccstctcaccccttcccctaagcccacattatatcaatcttttttttttttttttgagatggagtctcactttgttgcccaggagggcagtggcgcaatctttgctgactgcaacatcaacccctcagtagctgggactacaggagtgcgctactatgcctggctaataacatggctaatggtttcgcctgttgaccaggctggtcttcaaccctggcctccagtaatgtacccacctcaacctcccaaagtgctgggattacagtcgtgagccactgtgcctggccccactgtatcattcttattcctttgcatcatcatagcttagcccccaattatcagtgagaacataagatgtttggttttccattcctgaattatttcacttagaataatagtcagttccatctggcttgctacaaatgccattatttcattcctttttatggctgagtagtattccatgatgtatatttaccacgttttctttatccactcattgattgatgggcatttgggctggctctgtatttttgcaattgcaaattctgctgctataaacatggttgtgcaagtatctttttcgtatgatgacttcttttcttctgggtagatacccattagtgggattgctggatcaaatggtagatctacttttagttctttaaggaatctacacactgttttccatagtcgttgtactagtttacattcctaccaacagtgcaaaagtgttcccttttcatcacatcacgatatccacgccaacatcttttttttttttttttgatcatggccattcttgcaggagtgaggtggttttgtgttatggttttgatttgcatttccctgataattaatgatgctgagcatttttccatatgcttgttggccatttgttttcagaattgtcttttcatgtccttagcccacttttggatgggattgtttatttttttcttgatgatttgtttcagttctttgtagcttctggacattagtccttcgttggatgtatagatcatgaagattttctcccattctgtgggttgtctgttaactctgctgattatttcttttgctrtacaggaagtttttagtctaattaagtctcatctattatctttgtttttgttgcatttgcttttgggtgcttggtcatgaagtctttgcctaagccaatgtctagaaggttttttttaatgtcaccttctagaacttatatggcttcaggtcttagatttaagtctttgatccatcttgagttgatttttgtgtaaggtgagagatgaagatccagtttccttcttctacatgtggcttgccaattatcccagcaccatttgttgaataggatagacacgtttttaatactgtcctcgccatgttctcctggggctatagagccagacctaaagttgcacgtcatgccaggtcatcatattgctcatgaacaagatcatgtggaagggagtgtggatgcagctgttattctctttttccccatctgaacctaaatcctgttcctttggatagcaattcagctcattaggttctagactagtttcagtatagtagtaatggaaaaaagtatgatgttatcagctatactcatattaagctacagagaatactgcagttttgccttgaccaaagaatgcctctactagatgaaaatcagaacttaaagtacaagtaaataaataggtgattacaaaagactcttacattttagaaggcttctccatagagccccttttaaaaaaatgaactcctctagtgtttttaagtgttttacagaccattaactacatggcagaggggcaatgagaagggatttctaaatttaatgaactaggacacactcaaattgaggacagataaaaataagacaagttatatttaaaattctactttatcagtgggaaaacgcaaccatgaaaaccatctaaacataaacttgaaaagtattcagttctcaggtatgctatacctgagagagtgacaacttgatgaaaacattgatgatgataatattgtataaatatgataattatatatatcaatatattagtctacagaatatatacagcaatatctacatgtgtgccttgcatatatatgttatatacaatagatataagtactatatatggtatattttaaaaattattaaatatgggtatctgtgtatttttacgtgacattaatattataatttaatagatatatttatagatattaactatatctgcatgtatttgtgtatatattcaatgtgtttatgtaagtgtgtgtgtgtgtgtgtgtgtgtgtgtgtgtatgtgattcagccatcacctaacaaagtggaggcatcattcaaacttcgcacctttgcattttacacctagatttaatactgacattgactgcaaatctcactccacagaatacaaaataacccaattgtccattcattcccagctcttgaactcttaaatctcrtttagatatggtttaaaccaggaaataaatyagccacatccrtagaaactttggctataattgcctagtgtatttttccactagtagtgtttgaaatgcttcctatgaagtaaatgctttacaaaggtagcagaaggagattcctgaaaatagtagtgtaaatggccttgactgcattttgataggaaacttcaagccatgttgattaatacattatccataaaattaaaccagcctagaaaaggttaatttttaaataactgtaatgttaatgtaatacttatttttgatgaggacaggctgaagagagcttaataaaatatactagacaaattcagataatatactacttcaaaactgttccatgaataactttccatttttaaattcttctatggaatagtagagtatgaccattagtatgtttttaatttaaaatgcattttggaacatattaacagtaaaattgaaagaacagggatttgaagatttggattctgtctgtattaatagctgattgcatagtaccagataatctttctttttctcttcttttctttcattttttaatttttttatttttttatttttttatttttgagacagactttcactcttgtagcccaggctggagtgcaatggcacaatctcggctcactgcaaattccgcctcccaggttcaatcgattgtcctgcctcagcctgccgagtagctgggattacaggcgcccaccaccatgcctggctaatttttgtatttttagtagagacggggatttcaccatgttgaccaggttggtctcgaactcctgacctcaggtgatctgcctgcctcggcctcccaaagtgctgggattacaggcatgagccactgcacccagccccactgcacccagccccagataatctttctgattcttgattttctcatctagagactggagataattcagtcttcccagttgacttcacagcactgttgtaaagaatcaaaagagctcatatatatgtacgattatatctgtataatctctatatatgttctcaaatacagtaaggtatatgtaaatatatgtaaagtattttaatgtttctacagttttaatgttttaaaaggaacacatttcatagaagaatgttacgagaaggtaatgatttctcattttgaacataagatagctggatttgatatcagtattaatttttattgggtattgacttagctttgcttatcttataacaagaggccataatccaagcatagtttattccattgactttattactttatcaaagctagtaattacacttctggtgtttccagaccaacaacaaaaacaattgaacataatgcaatgaatattgcaatgaaaaacatttgtcattataatgtactagaattccaggaagatgcaatatattctatttgtgtgtagtttcttataaacagccttagttctatttgaagctaaagaagaacaggatggttagtttcaatatgttaacagctccttctctttaagtaaaatasaaaatggaaaagagaaggacctagaaagaagcatgtctcactccatccagaagtcatgaaagcagatgatgcagtgatgtacctagctctgaggtcctcttttgtataagagaaataaatattcatatatacagtatatctgagaagagggcttcttcagaggagaacccagagagagcccagtgcccacaagaaaatgcctgggtgagcttattatagttctggttgcccaagcaaattayattttacctacgtgaaaataatagtaatagtgagaaaaatgttcttgaacatttgaatggtgctttcattcattcatttattcatccatccagcaaatgtttattaagcacctactgtgaagtaggcaatgtgctaaacattgtcatactgtagcgaagaagagagactggtccttgttctcttggagattacaagctaatcatggacagaaactattttagttttttttttttaagatacagtgtgtactaaacatttgcaggaggaaaaggcatgcttagaagaaaaatagagaatgtggagctactttaatttgggtatcagggaagcgttctgtgagaaagagatatttggaatgatatgtgaaggatgaggagccagggaacagcgttccactggtgagagtagcatttgtgaaggtgtgcaaaaacctgaaggacggcctttgtggcacaagttagagaaaaaaagaggaagtaacgccacatggtattagaaaggttgacaatggccacattatgtggaggctcgttgaccatgacaaagaatttggattttattaaatgtgcaaagggaaactgccaaatggttttacacagaaatggtgaaaatatacaaatacatcgtaatgttactatgtgaaaatatataggaaatgtgatgcaatgaagttacagacatcattatgaggtggttagcagaattggctttgtgggtatgcaatctgtgccatagcacaaagcttccctctcagaaggtcctgctcttggattaatgctctgacaactccatcttgaaattcataayaatttttaaactgggaggcttggatttttacttttcattgggtccccaaattatgtagctaatactgtctactatagaaatcgagttgcaagatgatgttataaactaggataatgacactggagaaagacaaaagttatcagctggacgcrgtgagtcaggcttgtaatcctagcactttgggaggctgagatgggcagatcacctgaggtcaggagtttgaggccagcctggccaacatggtgaaaccctgtctctactaaaaatacaaaaattagctgggcgtggcagtgcatgcctgtaatcccagctacttgggatgttgaggcaggagaatccacttgaacccaggaggcagagtttgcagtgagccaagatcatgccactgcactccagcgtgggtgacagagcgagactctgttacaaaaaaataaaaaaagttatctctatttcacaagtgaaacacagctataattctgtatcagattgccagtaatatgggctttcaatttggtccaagtagagcattttaattgtttactcaatcctaacttatgataatcaacacatattacatccatttagtaaatactagttttcaaaagattgctaatttttgtcatcttctgttagtgcatctgcatgttatrtatgtacaatagagattaattccaaagggcgtgaaacatttacctttacctttccatttcattaatatctatcaagcccaaagcgtacaaaagactctgttgtaaacttagagtgatgcaggtattttctattaagagcttataactgagttgaaagttaagatctaaatagctataatacaagaaaggatatacttgtaaaggagatacaaacaatgaactgtaagatttttcgtttctttagaagaatcattagaagttttatcaagtgtttctgcttatttaatcacaggagttcaaagatgtttgtcgtgacaccagaatgtgggatgacattattatgacatttcattttaattaaaactagatattgccagggattccatagtaggtatctcccaatatgtagtaatccataagattgtcatggtatgtatgaaaatcccatttagaagataaatattattgaggtctttaaagaaaaaaacttcaaaatgcctctccttatttcctgcagaatgaaatagatctataattaaaataattcttagtattcatcatcagagttgaaaaataaaatcagacttttgattcctagatggaaatctattaagagataaatgaaaatattgtggttgctgcacaagacatctgtcttcagtttaagctgcacaaactgcaagcaaatgtggatgttttctctatagtatggaactttcatcagggaaaagcctagtttgatgatgaaatttcaaagcagatatcccaaaagaacacacacaccccccccacacacacacacacaccctacacatacaccaaacagaagaacacatgggcaatggagggatataccagtgccccagagacagagacctctggcactaaagagctgttcttgtcatgcatgacagcttaaggctccagacatttcatcccaggacatttgttacagttgcaggcttccataattcaggctgtgggcagagtttctagcttatatctcccgagacctactcagggatctggtttgccttgcacttatctcccttctcaaacctgtgcctctacaataaagtagtcatgtatctatccaaagtgcacacactttgtaacttagggtaaaagaaaatgcttaccaacttaggctataccaagttgtataaaccaatattgcactcaccctcttgattctacccattctcaaagtacagtaaaagagagctattactcgctccacaatcactgagcctgacatgatgcacagaagagtttaacatgaaaataagatggactgatgggctaaggaygtagaggacattgagaagattttatacaacttgagaaatatgtgtaagtcttacagttgggatatttaggaaaaggaaggagcattttggatagtcttatctttatctcaaatatcaatatcctggtttaggcttttaggaccactcttctgcgctataactgtagactttcttctcccagcttctccttctccagaccctttacatatcactgccagtttattttttccaaagcttattttctgattcagagcattcagtgatacttcttgaccaacaaatgtaagggattctttcatctggcattcaaggctgtttgtgatctccctgcaacctattttgccagttttttgtttgttygttcgtttgtttgtttgtttkttttttgagacagagtctcactctgtcaccaggctggagtcagtggcgcgatctcagctcactgcaatctctgcctcctgagttcaggcgattcttctcctgcctcagcctcctgagtagctgggactacgagcatgcccccatgcccagctaatttttgtagtttcagaagagacagcgtttcaccatgttggccaggatggtctccatctcttgacctcatggtccactggcctcggcctcccaaagtgctgggattacaggcgtgagccactgcacctggcctattttgtcagtcttacttttgttacttccttccatgtaaattatctttcagtaaagtggttttcaaacatgctctcctccttcctataacagcctcaatacattggctcatggcatgcagttcttctgactctttattttccttgccattgaaattctactaattctcacctaccccaggaagctttgtttatttttcccactggatatatttatctcctctaaactaagaaagcatctattttatacatatattcatatttaccatccaaatccacatttatttgagtaattgtacttggttttacccatctttctactgcagccccaattataaataccatatggaccatacttttatatgtctctgtctcacatcatgcctcctgatcacacacacaaaaaaggttccgtaaggtttaaaaaatggctagaaaagaatggaagagtattctccgtattcttagatttaacaatcattttatttccatccagaccttatggaaagtccattggctgaaaacagaacagacaaacaaacaaacaaataaccctgaatgtttcatagagactgcccagaataacaggatgtattgtatggcctttggacatggtgtgcttcctttacatttgccaattcaagagcttatggttgggatgatcatataggccagtttgtctctgacagtcttgctttttgtgcctgtaattatcgataatatcttcccttcactctcaaaagagttctggtttagatgagaaagtatatggtcactctccctaaggaccatttttatgggcaagtgaaaatactctctctacttgtcaacattgtattagttttcttatacaaactattaatattatagaactgggatagattagcatctcacccatttcttcccaaagctttaggttcatctaaaaagcaaataaatcaacagacagacaaaaaagcaaaaataaacaaacagaaaaacaaacaacaaaacaagtcccaaaggctaagccatttgaagtagaaaaggataaaacataaggcttaggatcattgggagagatatttttttctcctcctttttcccttttctctcccaggaattcttcartagactcaattgaagccttgagtttgaggttttgtattctcagatggtaagcacacctattaaaaaagcaatgtattcatgttaactccctggcaccagcagggcctgtgtattcactgctagcagtggacaccatgccaggagaacctgactcctggtgcaaaaggattaggaaaaaaaaaaaagtcaaacaatgccaaaaaaaaaraaaaaaacccacacaattcttttctgtactctgtggtttgttttacttaggaaaacggcctggttataccctgcagcacgcattcattacagtgatctttgactggcagatgcagagtaataggatgcatattttagtgcttattataataccctgtccaaaaacaacttgacaaatttgtgatttcgacaatatctcattttgctggctgcagtgctctgtgattgtctggcccacgtggcttccagattatgcataccaccaatacttctcattaaaatggccacagttcaccagtttcggtagcttggaacgaacttggaatgaattattatacaacaaagaggctgctgtcatgcagaacaaaagacaagcaaaagagagctttggcttaatgaggctaagtgagtgtctcccctgcatcacagctacttgacggcctttgagcatggattttttttctccacaggccaaaacctttggtctattattttgtgtttatgcaccttgaggctaatatacattttaatatgctgcacatggagaaaaaaaatcaaccattagattagaacatgtgcactccctgttaaattaatgacaaccgaacatagagataaatttaggttttcatatttaattatagcacactgcagtacgtttagcaaggataaattgcactattattatgcttcattttttttgacatcttctcctattagtagtgcacacttgccccagcaccaccaccaccatcaccctgtggccatgctaacatctctgcatatcttccttttctccacatcacacaatctcagccaccacgttgaaaggtatactgttttatttgcaagatttagtgagagaactgatgccattttggcagttctgtgtgcataagaaagtgatttgtaagaaaaaaataaatcagctaagaataattgttatcactcttccttgctgcatcagattatagtgatgggatcaagttcactgcttttctgatcaaccaaaagcacaaagcacagcatgtgactctgaatagttggtgtttcattatgactcagatgacctgtgtataaagaaggagtcataacaatcccaagaaaaattccaacaaccctgtcactttttgaagcttttctctgttgattttaatctatttattgtagaaatgggaacacttcaagtagtgaaagttacagggtaataaagatggtctttggggaaaaaatttagcaaagttgatagtagagattatgaatattgctgttcattctttcmagaccaccaaagcaggaacagattgttaatataactgaaatgtcaaaatgaacttttcgtgtagaatgaccagagaacttgtagttctttccatttggggactgtaattttaccttccattaattgagtatatttgtttcatgttacatctgagcttatagtttagcttgcttcatacaccaattaatagagttccagatggttgcccagaatgtaagagattcttcttctatctttgcgtaaagctgaaagaaaggcatttgcctatgtctctgcattaaggaagcgtacccatttgttgtctttttgctttaaaaagtcacttgaatcagcaaatgtcttaaaatcagagaatactttttcaggatctgagcattgaaatccagttctggggttttcctgagacttatcctttatttgatatttgtttcatggtgatgcatagcagggtttgatgaccagagaatcatggcaagaataataatttccttgttcggaaggtctgtaactggggataaagagtcagaagagtcagttaccattggctggtgaacaactcttcttgatgacacataaaagcagccgttacaaatgtattaagaataattctctttgcccaaattctggtcaaatgaaatttgaaagatgagatataagaaatggccttacgaagatgggctgtaaaatccattttcaaaaygcttttttgtttaaagttgactcacctcagacactaaaagtgtgaggtaataaatagctaagtagcctggcaatatggcaatttcttgtgactcagagctattttttatagtgtttgccaaacttaaattctaagaaactcctgtgtgaaaagaggtgaggattatatttactattttatagaggttgacactgagtctgtaggtagaagggtctatctaattggtacagtcactgggtaatactaaatttccttactcaggaatctagattcacttatcttggaggctctttccacctgtggacaagtggtttcgatatctcaatcagcattagatagtggttatcaagtcatttttgtgggttaattcacttagaagttcaaataatttgctctgagtggtcagatgttctcagtcctaaatactcttgccrttgaacatttcagtgtgcctaaagcagatgtcaagatgccctacaggattccaatatagccattctagcaagaaggaattccaaaacacaccttgttccaaacatccctggtagaatgaaagtgacttattttcaaaataatcataataatattaaaaatagtatattatggcccttagaaatgctcatgttattaagttaaaaaaacaagaaaccttgctatatctaaatataattcctgtttttgttatttaaaaaaagcatgcatttgtggacaggaaaaaaaagctatgataatacccatatattaccagacatttctgaaagcagaaattcttggtaatttttctttctttttcttttctatatttcctcagttttctttaaggaacatgtattttatactgagaaaaactaaaaatgaaagcaatagcttttgaaagttttctataagtctctaaagaattattgatcaaatatttcatcaaaatatttcatcaaatttcatcagaaaatcttagaagaaccaaatttaaaagaatcaagactattcaagtgccaagcaggaaagtcaggaagggcataaagagctggcattatttagcttacagaataaattaaattagtttagccaacaaagaatggctgaggaggaattgctatttttctgtaaaaaaaaataacagattattatgtaaagttttataaagagagtaacagtgttttaagtctactactgatgaaggaaagtgaaacaagtatgaagaatgaaatctgacggagatatgctttccaaagaatgagctgtttgaaagagactgacaacatctctggaatcttttgtttcttttttcttgtttttcttttcatttctcttctttggtccttgagaaaaagagagattcgcatgtatttataattctatatgtgtagtagaaccatatgaaggaaactagtttctttttcttttctaatgttacatgaagttttctataaaatatatttgtcagaattttcaagttggcttttcacatttaaaagcagaaatgcttgcsaaagtctaactgaagatagatttacttatccctaatgtacaatatgattatttgcaccataaaaggcccaatactctttgagtgcaagttgacttgaagaactatctagattgattctgttaatttattttaatttttactagggtttacatttctattctctctgcattctatggggataaagctcaaagtataaaccttgagtgcttccaaatctaattagtacatcctactccaaacagcctaacaaagagtcaatcaaaggagttctttgacctgctacttgatttgagagttcctaagcagttttcgtgtgtggttctagaatacccagaatgctgattttggtaggaggctgtggatatgtactgcggctacttggcaaaggagtcagtaactcctcccctgaccccggagggttctgtaatgcctcaaatggaatccagttaacacgacacagaggcctctgggcatctattgccatccattcattcagctaagatgactgaaattcctaccatgtgtcagccactgttctagacacttgggatttatccatttaaaaaaggaacctacccttgtagaacttatatttaagtaaaagagataaaaatgarcaaacagtaaagataataaatgatagtatattcggtgataagggctatgtaaacaggaagggtggagaaggcaagggagctcaaaagtatggaagtcaggagacaggttgcattttaaaggttagacagcagtgagtatggaccttttagagaaagtctcatatgagcaaaatgtgaaggaaatgagaaataagcctcgtggatgtctgtgagaagagatttccaggcagaaggaatagcgagtaaaaaagccttaaggatcagccaagagtagggtgtctggagtagagtagatagggggagtaataagagacaaagtcagggaggtaagtaaggtagagtagaggaatagtggccatgctcatgctctaacttagttcccttctaattcaagaacctgttagtcaccttctatgcacctcgtgcctcgcttggtcttcccagcttcccagttcagtctggcatacacttattaagcttccattatatgccagggactgtgttagaaaatgcaagcacaatcctacatgaagcgagatcactatacatcttcagtacttcccattccattttggatcactatgacaaggtttgcagatgtgatatgtactcagaagtgaactttccctacctcctcatgtttacagatctattagacgtatgatccactcagctcacacttacatttggcttcatgtcatcacacaaaaattaattacttgattattgggaaaaaacartattatagtgtaccaaatgagctgcactttcaaaacaagccagaaacatctttattctcttaaaacccactaagctcctcttcttggctatggataaaatcccagagtttttctgatcacttccagacattagaacaccctcagataataaagagtccagccaggaaacttgtggctctcctcttatttaaacaatctctgctttaacctgcactaggccctatagcatcagtagagaaaaggccggatgcttaggtcgtctgtgattatcttctgcctccctctcccatccttcttctccacttctccatgtcacctgtgattcctccattgtgctgggaaaggatgaagcatatgaggctaaaagatgattgtgtagtgctcttatggcatggttgtgatattgatgcaatcagggcaggtgccaactctttttcttaaaggatacctctgtgggatcttcagagcctcccattctgtctccctggtgataccttctgctctgcccattatgatttcctatgcttcggcatttcacccctgaagtctctttctactgggattacctctccttggcagggctttcaatgtagttatattgcagcagctttccagagtgtccccaaaamaaactcctgtctctgtcatcataagcaaacacctctactggccctactatcagggaaccctcacaaccaacctctgacatacaggcctttctcagcagtagtcagacaccagcctccttactttaaccctccacagctacccacccaagcacccaggggcatgtccatgttcaggttgctaagactggtatcactacagtcagcaagtgtcccataaaggcagattttttccaagtagcaaataggtagcccagagtaaaaaaaaaaaaaaatgtcagttgcctctttgggcaagtaccccactcttgattgtatttagagtgtcttctgtcacttggcttgaggtagcggaaacagaacattctacaggagagagcagagaaaattacagcactttttctgggctatcaatacataatcttttctccagtgtcttctctgcctctccttagagctatgggtgacagggaaagatcccagacctacagagtaaatttgaatcacatctcaccaagtcctgcctgatccacctttagaaagaaggagatttgccaacattcctttcatagttggggcctcatctaagactgagaaacatcttatgacatcctattacaataatgctgcctttgcctttaatctgttgttcgtaaacataaaaaatcttttcagtctagaaatatctggtagtgtggtaatgacgtttaaaaccaaggatgtaatgatacttcagttggttaaactcaagttttgtaaagacaggtccaagattttttaaatccatgaatagaacccagtcttggggtttaatactgtttcattttcttttgcatatctaaacttatgagtgttattaggtttttcataatgttttgatttttctttaaaagattcatcttgtgaagccattttcagaatacataaatttttttttatttttataacttgtttctcagaagaacaaaaaacactttgcagttttctaaaaatcccactggcgtgatccaattataattagagaaatccagctacagcatcagaaatgagatggaaggaatctgaggcaccatgactgacttgttcatcaccgatgaaccgaatctggcatcgatcagaataggatcaacagaattgtagaattcttaatttggagctattataggaaattaatttacattttggataagatttactaatccaaaaacttaaaaaagaaatatccaattctggcagacttctttttcgaaaggaccaaactcaatgacaaaattttagaattcctgaaaagagttaactggaattaccttggtgttttatttrataggtaatatttactacccacaagcctttgttatgagggtggaatacatctacccaagtcagtcatgtgactggaatcagtgaaagctcgtcactggtgctgcacagtaactcataagcagacagaaagccagaggagagctcttccttctccaaatccctggaaaatgcattgccttaattagcaaacactatcttgagtgactcctctagagactcccaattaactaagcttctagactaacatgaattcttctctcttattagttcatatttatgttttttaaatcaacaaaatttcccaacactttgtcaccctagaacccaacctttatgaacattttttgcgagaaaaatgcaaaagaatgaaactaatgcagtttattaagcaaataatcttaaaagcagcccacaacacaactgctcaccagctcgcaagctcaccggattatatttcctgctgttttcagttacttctatttatacttctaaccggatgaactcaccatgccccctactgcttaagagcaatactaccacagtgtagcacaacacagcacatcctagtattctccagagatttccttctggccatatggtagctttcagaatgcttgttgaacaacattgtttgtctccccttggtcaccaatgccaggataaatctgtggagtcatgctggcagaagaaatggcctccaatcagcaacaacaaacaagttctttattactgaccccaccatctgtccctgtttccacatgccattctcatatagaaacaggtttccgccaggccaggttcagtgtgcatccagcatctaccattaggtcagcttgaatatccagattacaactgtgcttatcctcttacctagctaacatcctttatccagaatggaaagtggttggtggacactgaaaaaagcctgtgaaagccgtactgctgataagagatatgtttgctaacgtcttggattagggatgtgtacttagtggagatatcagcctcggtgtgacaaaagcaagatgtaagtattacttcctttatgttaaggtgtgcacccaccaagaccactctgcttataaacagtgaatatggaaggagtgttccctggtactttaattatcagcccatttttacaattgtgtagccagagatgttcccaagatgaagttgtttcctaaaggctcatttcagagaggtagatcatcctacatgctttgccattgtagtttcaatataaatactttaggcctgcttgcagcgcatcttgagtgctcaaaatatcacatttagtgacaaggataaaaaagacagtgctctcaaaccagcaatattaaagtaagtgtgccaagagcacattatgaaaaaactgatggagatacagagccgacagaatgtctgcagagaagcgcaatgagagaaattgtctttccctgttaataccattatgagaaagctcatggaaagttattttattaagtgtttgtgttattaaaacctattcccctgtctgaaatttaatgctacacaatgyactaaatagtcaggtttcaagagagatgataaacctggaagaattacattactacccaaagtattggtcattgtacagggatttaaaatttaacaaccacattaaacaccaagccaaatcaatagtaatattttcagtctctccgaggcagatgactgaatatgctgaaagcattgtggggttgtgtggcactgtgttagctggtccatgcatcattgaggcccgtgtctggtgtaatcagctctgggaagacactgtattcttagcrttcccggaaggcctgctgttccacagcaacaaaagacacaagcacggcacagtaccacagcaccagccgatgaacaataaacctggttcagattgaactatttacttggcatttgctatatccttaggctccactggaaaaattaataggtggtcagctttagcaaatatcacagtgatggaataaggagatttgttagccaacaatttctgatttgtgtcacttgtaaatatgatggttttagttgtccattttaacgattctttctagtcgacaaatacctagctgactactctttaccagtgtcaaggatggcattgaaaaaaacaaaaaagatctagctgattttggctcagaagttctttcttcttgtcataaatttgcgttcttgccttctttaaaggtgtcatttaatggcagcaccttatttttactgacagtgtttttggggaagttcagactattcgttcgtgattcatccaaatacgtgattctcccttggattccagcacaatttgtgaccttctaatactgaagcactaaatatcattcctgctttgatggcaggaagtttccagggaaaaacctaggtgggtaggaattgagaattccatgagagagatactaagataccccagtctggcatgggaaaaaaaatctcattacgtgtccaaaaggaaaaacacacacatgtgtatacatgactggattcgcgaggcagtccacacagtgtaggagagtgccactgaatcccagtgctaaacatgagacatgcctctcattttctcgtctttaaaacaggaataataacagtactgacctcatagggtgattgcgaagactatatggaaaaaagaaacatgtttagcacaaagcatagcacaatgagtgctcaggattttatttgtgtaatgattcctagcatttttaaagcttagagttttatgaatggagactctgatttaggatcatgctggatttccaacctttaaaattatgcaagtcattcttgtgtggaagcagaaagtgaataaatggattggcatcaaacaacatcagactggcaacagggaggcctaaatttcagtcttaacgttatattgactcagctcgctacttctgggaatgatagtaactcctcgggccttggtttcctcatttgaactgagggaactggactctatcaaagtcctttctgatttaaagaacggtgatcctggctgtgttcttccttgcatgcagaaaatggccatagtccattgtagaggaattttgaaaaataacagaaacactctctcagcctagtatttccactattagtccatcattttttaacaaggtccatcattaaaaatcctgtctagacatctgcttttaaaagacagctatcaatcaatcaatttagctattgagtacccatgtggggtgagtatagaggatagaaaacaagaaatcctgttctaccataaaaccttgaaatctacttggaaagaaaaaagacactattttttaaaaattaatatttagtaagggtcaaatgaggaacacaggcaacaactattccactcatgttcctacatgtcttttaaagtagtttaccaatttaaaacattaaaggtaataaaatttttaaaatttaagacacagcagaaattatttagaaagcaagaagtgcttgtatgggaaacaaaagataagctatattattaaaacaggacatcatgttttgctgtaaacttattggtagccaagaaactaaagaaattcatgagttttatagctctcatggtctgataaaaggggatgtctaggtttgtcttaagagacaacactttgctcctggcagtaaatattgggaaaattttgttacatggatccatatttaatgaacacttaataatttactgtacaatgcctatagccggggttttgtgaaaaatacaaaagtgtctttcaaatacctataccatatcaatttttagtgaaagctaaggattagctaaatcaactcaaaagaagtatgctcgagtgaacctaagctaataaaatctaagaacgttgcttcttggtgaccaaacttaatgcttagggaaactcagaaaaatggtggattaagctgtcttttaggctgattttttaaartatcaattatctccaaaacactttttaaataaaaaaaatatatatawaagaccccacctggaaagagtaacccactaggtactgttcacctttgcgtaaattattttatcagatctttttctatttaaactcccaacactgaggtactttcaaatccataccttggtttcactgagaggaggttaagtgtcaaaggcaacgttaacttacttcatcattatgccgagggctactaataagaagcaacatctcacgtggccctgcagagctgcgctgaacctttaaaagtatgtagtaaaaattctctgctaactgggccaccaccaacttcagaaagtcgtgtcaaaatagaacattcaaatagtgaaaatctactgatattttaagatttaaccaaatggtcaccctctttaaggaagcctttgttgacacgtttcctcctcttcctccccaaacttggtaaaatggcataaatgttaattcaattcatttaattcttatcacaactgcaagaaatcatgactattattaccatcctgtcaygtatgaggaaagtagcatacaaaggtggtatataatttgccaaactatccagcctgtcggtagcagaccagagagctagactcaggcaatctgtttcagaactcatgctcatacatacgatgtgagaataccaaattctggcttattttaatctgatcatttttcagaggaaagcaaatatttatactcaggtttaatagggttattttcgctatggaaatacattaataactcaatttaaatgttgaaagtgatgttcttcccattttttgaaaacttatggtcagcctagagccagctatataaaaccctagcttggccataagtctttacctaaaagataaagacattattatcagcttattattgctgctcacacttacaccttaacagtctctacctaatataattagaatatatatatatatatatatatatatattttttttttttttttttttgaaacagagtctggctctgtsacccaggctggagtacagtggcgtgatctcagctcactgcaacctccacctcccgggtttcagcgattcccccacctcagcctcctgagtagctgggactacaggcgcatgccrtaacacctggctaattttttgtatttttagtagagacgggatttcaccatgttggccaggctggtctcgaactcctgacttcaagtgatctgcccacctcagcttcccaaagtgctgagattacaggtgtgaaccaccgcaccaggcctacaatataattttaaataaaaaatgtaacctaataggtcaatgtgtatcatagaagttttcatacaacaatgggaaaggattttttaaattgcagtgtgctctgtgatatggtatagcaattacagaagaaaaagatcaaaagtgtctcataccatataccaaaacaaatttcaaaggattagatagttagatataaaaacaaaccaaagtacatgtagaagaaaataaaactgaatatttaccaagcttctataggtaatcaatttttaaaagcaacaaaaaggaaaaagacactaacaagcagattcccctgcataagttagagaaaaaagttattttttcaaataaaaaaagtagaataaaataaagctatgataccattgtatgttatcactatcagaaagcaattaaaaaaggagaagaccaaaaatatatttatctgctttaataaattgtaaaatttatgtatgtaatatataacccaaatccaaaaaggctagcaacagatttcgggaaaaatataataagtgtggcagaattaatgcttttattttataaaaggctaagctaaatttttttaaaaaatatcttagtactctatagtcagtttacaaaacaagaaatacatctaaaaaagaacctagaaaatgttcaagctaactagttttttaaaaaattgaaaggaaaactaaggccttactttttcatcacataccaacggagcaaaaaaaataatattcatgttatattaagaaatatcaagtattggtttgaaactgttgatgtcataaatattgatgactttagaaataggttcagctctttggaaaagaaattctttaaagtatttgaattaactctaagtaaataatccaaaatatattttaatgtgcatatagaagttctcttcatcattgcttactaatgaaatagtagtcattataaaaacttgggagcaatatagaaaataattgattaaattacagtaaatttattggatcaggtgttttaatgataaaatgcaaaatgatcaaacatatgcaagtcatttttcatcttgatgatttgcacatgaaaaagatggaagaaggacctataagaatgatagaatttatgatagaatttttagagtgctaaatttatgtagtagttgttgtttacatttctccmtttgtcaaatgttctatagttattattgttatatttgaaaaatataaagacaaaatgtttatgcacaattcctattttatattagaaatatggagctgtgaagatttcctccatctgattcatttcctaacccaatacactgtaccgtagctatgttaatgaatgtggggtagaatagattagtgataagatacaacattgtatttatctgtagaggcatttgtatatcacttgaggaaaaaattcttagtatataaaattttattattagtaacagttcttacactgaagtattaacgccaggaacgatgttcctgttggtgaaagctttagcgatgatttgactgactgacctaaagaatgctgagatgtaggaaagtctgatgaggatcataaaggaattacattgtgtatgtgtgtttttaaaaatatgtttgtggtttgtttttgctttttcaaaatcaacattttcctaggcttctttctgcatattcttcaaatttttagttgtgtttacttttaatagctcagtaattgggactgccacagaaaccttttcagacatattttaaattgtaggcaccctggcaaccatttgtcttcatttcaaaatcatttaagtaaaggaaaataagtgacaaaaaagtttttgttatgtgaaaaatacaaaaaaaggtaaccctagaaactaaaattattccattttgaatgatctttttttcttcattgctggttttgttcatggattttcttcctgttaggacctggatgccttggcgtattgcactcttcattcttcggagtctctactttgaactcctcagtaggagcaccttgatttcacctctgtattgagtcatatgtgatcaggtcatgaagactgacgtttgtgctcaggtttcttcagatcctataaacattcacacacacacacaaatagttatctcttcagcttccactgctcttgaccttctcagtgtatttcagttgtcttgctctgacatatagcagggaccagcaatgcatgctctttgatcttcttcttgtgcacatcccatagcactaacctttctcaggtggaggtaagagagatattaatggcctttttgtgactgctatctagcaaagttagctgatatagtggtgcctgggtattattacatgcatgaaaagtaccattctctttcagatattctgtatgaggattatagcagggaaaaataccacacattacctcactttttacctcaagttagggaatataactcactaagaatagatgaaagccaataaggatgagtaccatattgttgtgctcaactttgaccaaaagccaatttaggttatttcaaatgactagttacctctgacctgtagcgttccttttttttttctttttgatatattttagtgctttgaaattttgggaatccaatcaggaaattcttgagcatcttctatgtgtaaagtgctgcctttacaggaaatagaacttactagcatattcatttattcccaaacactgttcatacttaaaacttgtcataatgattttcagtaattaagtaataactgggcatgcagaagttagatagatagatagatagatagagagagagaaagagggagggagggagtgagggagggagggaggaaagaaggaaggaaggaaggaaggaaggaaggaaggaaggaaggaagggagaaagaagaaagaaaggaagaaagaaagaaagagagagggagagagggaaggagggaaggaaaggaaggaaggaaggaaaaaagaaaaggatagaggagaggaaaggaaaggaaaagatcagatggtaggaattagagtgaaaaagataaaatggagatggaatagagttagtatctatgtgtatgtaagtcataagctaaatattatcagtagtagggatgatatccctaataaagggagtttaaaaataatactctgagcagcctagtaactaatgcaaaaagtggagcaatcacatatagatcacatgcagaccacaggacctacaggtataaaccaatagaagaggtaaagagcatctccttctggtaggattccctcaagaaatgtctgatgtgtccatacaaagaagatactttgttctagaaccacatctctgatacaaatgcaacaacaggttccataatgtagcattttatactttcttttctcactcgtaaccatggaaagaattttgcaaaggactctccagctaaccagatctctaaagatctagcttaaatttagaacacctagaaataaaatttagagaattcagaaaagtggatccttcaaagtattctccttaaatattttattttcacatctatgtttgctcaagactcggtggtggacaacatgagagtagcagtgaaattttcctgtattgctatttaaaggcagtgagtgcctttttattttaccttctaatagaatatcaacaggaaaggctggacatttagaaatgtcagggtatggaccaggagaatcctcgtgagcaaaaccaacattctgtgtaaagataatcctgagtctatttaaaacacactgtgaaatgggtaacggagatgttgaagatgacatgaagatgcagtttacagtcactgggtgcaaacaggagttaaaactgcaaagtataataaaaagcagaataaaaatgctacaataggatgcaatgacagtagactttctaaaagaaataaccatcttgtggtggcatgttagagggtaatttgagtgaggaagcctagcattaaaagagactgactaagaaactattggaataggccatgtgagatcagttcaagggcctgaaacctgcggaagagccacggaaatgaaggggaagagtgagtgagagagatgggagaggaaaatgactgtgcttggtgaccaactaggggcaacagcaaagaagtcagaggtcacacgaagctttctagtctctgcagytgtgttactatatatcaatgatcgtgacaaggaagaccragatggaatatatgaggcaactgaaaatttgaatctagcactcagcaaatgaccattttaagaatacagcaggaccgggtgtggtggctcacacctgtaatcccagcactttgggaggccaaggcaggaggatcacctgaggttaggagttcgagaccagcctggccaacatggtgaaaccctgtctatactaaaaratacaaaaaattagctgggtgtggtggcacgtgcctgtagtcccagctacttgcaargctgaggcaggagaatctcttgaactgggaggtggaggttgcagtgatccaaaatcatgccattgcactccatcctgggtgacagagcaagactccataaaaaaaaaaaaaaaagaatacagcaggaccttttagaatgagtatttgcatgtttccaagaataactacagataagctctgtaaggaacaatgttgcaagctccggcttggacaaagtttgggtgggcttcagtgggagaggacagaaaaatggtattttttgtcactcctccatccacactctacttttctctccttccctccatctcagttgatactatcctacaacatacagtattcaaatattgtttcaggaaatatttactttaatctttaggagagaaaaaagcaaaaaacaaaaataccctaatagcatcaaagttagcatagcacaattccagacttctgctcattgttgaaatagaagggcttctgttcagtctgcaagagtcttgatatactgcagtgttcctgctacacaggcaggcagcaatccctccccgagtcccgtaagagcattttacattttcttcccatctttcagctcataaacatgtttctcttcagaacacacaccatatgccattggaaaagggctgtaaagttttatagatatatttgaaagtattataagggtataataaagcaaaactaatgcaaaggaattggaattattgaacaatggaattaaaatattaggcacggataactctaaccacactcagcttgtttgtttgtataagtcataaaaacccggaactcttgtttagttcaaagacatgaagcctttgagtcaggcttaaaaaaaaatcagcaatggctatactttattgaaagcatatatgccaggcatcagtaaatgagaactcaagaatatgtatgtttctgtaatagcctaaataatatatatgatgctctacatattttggggtgagaaaacttattgcattgcatcttgtttgcaattccttgggatttttctgcaggcatcctttttctgaagggattaatgcattcatttaatcagaattatttagtgcctgtttcagtgagagtgttcaaggatacagaatagaaatactaatacttgatactgaggaacctgcactccagcatgaaccaacacttattcattcacacatttattaagcactcaacaaatttattgagtgccgactgctatgtacttggtctgtgcaagattagcaatacatacatggtttgttattgcagtacatggaaccgtgtgtggaagataatggcctctgtttaatatactcttcccataatccaagaagatgctcagtggagtttagccatgagttggtgtttcaaaaaagaaacaatacaggagctgtaagacaaggaaatggctccagaaatggaaatgttgatgtcaaaggtctcaaaataactaaaaaaatatataatctgtagcaagtaaattagtactggaaagatgccagtaggggactactgcagaaactaattgttgggattttgagcctgatgtaagtaatagagcttaatgaggatgggggaaaatgagttgatgaatacctttctagcaaccttcaagttggaatttctagaattatttagaatgtcataaaataataggaaaaggaggtggaatgggatacgaggggtttctgtagcttcatagaaaaaggagttaggtacagaaatgctgcgtaggaagatgaagcaagagtcagccaatgagagatgtacaactctgcacagaagcttttactagtctcctttgcctacaaaaatgtaacttccaagaccctcccctacctggaccaacccaggctcccttttcaacataccatcagcattgctacccttcttcataaacactgaggtccagtcaggctttgatctgtagtttccatgttctgttttcctctttgtcacaarcatcatctcacggcttggaatgtcttttctctttatgctgtaatgtccagactttgcatatgctgtcaggccttgttcgtgtccaagaaggcctgccttatcctccaattgaatgtgtcacttcccttgtatgaagcttgccatttgctacgtttatacttgtcttcccttttcaattagactgtaagccctttgtgagcaacatccaagtactatttatctttgggttccttagaaaaccttgtaaagtactttgtacataaacacaactcaaaaatatttgttgaatgaataaaggactgcccaggcagagcaaggtacaaaagtcctaaagaaaatataaaatttgagaaaatttcaagatgctgttcccagggaattttaagaaaaactgaaatgtggaaatcatgtgcaaaagacacgctaaagagaaaatgaagttttagctaccattcacctgttcatttactcaacgaatgtatttgaacagttgtctgtgacagacagcatgctattaatattacaagattctgtcctaggcctgagggaaagtcaggtactcagtatagtgtagtaaatactaagaatgagttaatctcagatgtgatagaagtgagtgtcatcagggagtgcttcctggagaaggccatatcaaggtgggacctaggacatagtaaggattcacctattagattatgttggaggaagggtatatgagacccagcatgcacgtgcatagactgaggggcatgatatgtaatggaacattaggggcctgcaaggaatttgatttggtacaagcttgagtgtgaacaagtggagaaaggggccagggaggcaaatccaagcaagtgcttgctttgttaagatccagagctttcaataaaacatgtatataaaaatgccttataatctataggtaattaaaaaacaagtaggatgggaacaagtgtcagatacatctagaagttctacttgagcaaatttatcaaatactcatgtgtggaggttggattcaccactgaataccacatccataagaatgagggccaaaagagcagttctggaaagagcctcacacgcacagcaaatctcacttgtttttaaaaattgggaatttctgacaagtcagacaagagcatggctgaagtttatcattgtactattaatctcaaaagttttacttttgaaattactttttgtacttagccagtaatgatctcaaaagaaaggaatgatataaattatttctaaactaaaccgaattaaccattttaaactatcttaaaagtacctattcatataaaaataattttttgcttagtagtttagactgctwtgtcaaaatattataaatcaggcttataaaccacagaaatttattccaaaatataggtgctagcaggtttggtgtctggtgagggcctattatctggttcctaaacagccatcttttcactataacttcacatggtagaaagaggaaggggtctttctaagatcttttttatgaaggcattaatttcagtttttaggacttcaccctcatgacctaatcacttcccaaagtccctacctcctactaccatcactttggaggttggggtttcaatatatgaattgggggaggacacagtcagaccatagcaattgcttctctggcttattctggcctgttgagtaaactgagtctcattctccaggcctttgcaagtattcagcatagttacaataattataagtactagaaagtcataaaactggaatttcttttttatacctttttactcaaatctacttaattttctataacaaatgagatgttggatatgagtgagaaaaaatgcatcagaacatctatggtgtaatactttttctgtttttttgttgagaaaaacgatctcatgtgatcaagatagtcttttgaaaacaagattcatccacataaataggagacatgttatacatgttgagtctccattcacaagcaaacagtcttatcttagtcaaaaatgggggattattttaaaatatttcttcttttctgaaaatccagttgccactgcaaggtcctgaaaccactgataacttcccaaaagaagtggcttatttcttccccacttgttagtttatctaaaaagaatcctttaagccttttaaaaaggtttcaaaattaaattracattctaaaaaaagagttttgaagttgcagttttactgtattaattcagtccctccagatgctattcagggtgaacctagagtttttctttcatacccactaggaaaagtacgtactctctaacttcccatgttagagcccacaggtttttagagaatatttatgaacctcttggttagcagataaaaagaagtaagtgactttcttaaattcataaagcaaaggtaatccagaaaatcactatgaggagatcagataaactattcactgtgtggatgcacaaatatttggggtgggatagatcatccggggtgtgcaaagatgcaggaaaattttagtagcatctaactttcctcagtggacttatatccactgaacccaaacattttgtgcctagtagctggccaaataggaaggttaaattccaagtggacaatggagtctatattctttcatcctttgtagacactaaagcatgttaaaagaaataatggaaaatacaaagcacagattattatgtggacactgacctactgaacctgtgcttggaataaatctagtccttttgtttccttgaactgtttttttgggtaactgtagctctccatgtttttaaaattactcagaaaagttactaaagtcataatgttgaagcattgcagctcagttagcatgtctttctgccttatctcacaacaaagtattaagaaataaataacctaagagttaggagaattattttattagggactaaaatctgtctggtcaaactaatgacacattaaaataccagaaatctgtgctatttagagcagggcgggggtggagggcatttgctttggtaaaatcaggaagaagtccattaggaaattttcctctggttcctacagatcaggccttgcatcatttcaaaccataaattcaccagttaatcagtgactttcacgcaaaaattgagagtgcaaaatactccttccaaagttgtttaatgaagcaaaatccatggaaaagtgaaatgcaaaaaaccatcatgatttaaaatgcagagagatagaacttcacaatggcagaccatatttggcagggacccagattcattattgcacattgacctgaatcacccaggctactctgtatgctgcagggctcagaacctgcacagtcctctgataactcaataaaggtgtctgccgaaacacagcagcaactatagaggaaattggatatttcagatgttgtaatgaagctaacaacaacaamaaaaaatctgttaaagattagatagactataaaataaatttgggaaagataaatgagagaattaaaaccaaaagtaaatgttgatatgcattcatatatatgtgtccatgtatattttcttacttaataaatgttctcatccattttttaagcatctagattgtggattttcttacattcaaaggaccaataaagaaaaattttgtaaataagctagtgtataaatgtgatgccaaggagcatatatatttttcttcatatatttactttgtttatcagattcaaaagtaagtgagtcctctgggctattgaaggtactatatttcaaaccctactcagatgaatttttactgtttttcttatatttatttgatagcataataccaatttcagaggacaataaagaacaaagtctcaatraactagttaaatttaaccttaatgttagaagcagagtttattagaaaaaaataaattttgtctacaggaagtgtggtaaactgtttgtgtgtatatcttagtactgaccgacatatagagtaaatatgtttcttctatgtaaagatacccaatttttggaattcaaatgagaacctacaatgttatggttagcattaggattttcagcctatgtttcatcagctgaaaactgaggtttttcctttaaaactgaaataaatgtgtcagcatcatgttttactattccctggccacatggtagttaacctttactttaaagataatagaggatggtctgatctaacgagatccaagtatagaagaaaaatatctgagagtataggcaaccttatatttaatttgactaatcagagcagtgcaattgagaactaaaaagtcaattgcataaaagagtcaagaaatgatcatccactagtctctccagtagtcacattcttctcaggtccacatacagttttattgtcaatattcaggaaaaaaaaataaagatagcaaggagtaaagagaagagtttctttttttaactgaagggatagagtaagtgatataaggaaagattaaagcaacatttttttaaagaacagtagacttgcttagtatcatcaggcatgtaacaggctgacttttcgcaatgccatgtggtaattatctgcgtacatatatgaggaaataagatgaaattgkttataattaagttaaagagatttcatttgaagaattcttaaccattcagattaagaatactagaaagaataaggagcaaaattgcaaagtctctgatgggaagtctttgaaatgtaagtgtatgactctttattctagaatattctacatttactgctttacagttataagttggatagattccatagttcttaagctttatagcctagtacttctaaatacttatttacttgactaagcatatttatccctagccccatcactgccacaaaaccaaaatagagcatccttcctacagcacaggcttctgaatgaagtctgtctcctctttaagagctattcctggttacccaataaaataatacaacatgtaaaacccagcctctatatgatagtcacctatctttctagaattatctctcttttcatccgtactccagcaaacatctacaaaggaagtaggctacatgaggctaattgctactcctcaaatgcattctgcttcccttaacagcattctcattgccttgaatgccatttatctcatctctggtactgaaaacatttccatccttcaagattcaagaatcttggacaaaccctccttgatttcccatgataatacattccatgccctgctctagactgaaacatgtatgtaaacttccctagatcataatctacttgcagacccaggccaggatgttgtctgtcttacagtgccaagcatggtacctatgctataatggccctcattgaattactttgcttacagcatgctggactaatagctgaagccttttttcgagcccaaaccaacwaggtttattttttatttcagccacacataagtcccaggatctgactctgtttataagcccacctttgggctaattccttaccctggatttggagtttggctccttctcccgtaccaagttcagctcttgtagagttcaaaagcaccctgaaagcaagaggtggttttctttccaacagagttgttacatgcatcaacctatataatgcagccattcctgcacccaagaaacaactggccagaagtgacctcatgataattctttgggaaacatgtttttgagcacctgcagtatgttaaaaacagtcccataccctgaggattatttagtaaacagcagtatacttacatatcattggaatggggatagataataaaataagtaaattataaagtgatattgaaagtcagaagtgccaagaggggaaaaagtcatggaagggatatagtgaaggccaatgagtgrcaggaggcagggaagaattttaatgtcaatgggatgattaggaaagttcccactgagaatgtgatatttgaataaaggcttgaagaaacaatttcttgacacaagattcctactggaaaggtagcaggtcctcacctgctcaggggctccacccctctgcatctccaccatggcactagtgcagtgtggtgtggagttgacctcattctcctgtggcagcatcattcccagagtaaattaagtttctatccctggcttattctagagttgtgaaatacagagagaaaagagtaaaaccagagttattttatgatcccctgacagaaaacacagtgttatttattacttagaactctccccagagattaatcaagatttaatatccctagttgactaatatgctcaggcatcaccattaatacatacttagacacttggcattccattttagtagtttcacaaacatctttagcaaagctaactaacactgtggtcccagattattttctcgctaaagaccctccatatttcttcaacttgctgagctcacaccatttgcaaaagaagctttgtacttacaggaaaacatggagggcttagtatgtgccccatggtttttacagccatactactaaaaacgtggttgggggtgcagaggagagactcagagcattttcacattttcctattgacacaaattggctgttttgacaaggtaaagtcgtggcataggattttttagataaattaacagaatgaaagtgctaaattaaaattgcaacattgatttcctttttagctcagctgtgcattatataaaagggtcaggagaaggatttattactggcgatgaggctctgtcgtccgctaagagactggtatataaaataaagttgtccatttcagacaccctttgtcttcaaggaaagctgtctaggtggcccacgggtggcaaaggcgctgaaaggaaatggaaattgataatcggtcctgttaggctgattctctgcatgttcaattcatatccttttgaaaagaagagattaagatgaaacctcattgaggaatacacattttgaagaaaatagaaacaaaggttctgcaaggctatttcagttggtgtcaaatgtgagaacaaggcgacacaaacttatatgaagaaagggcattaacaaaatccccagacaaagaaggagctaatagcaaatatatgcagccgtctttgtggatgctcacaggagaagtggtacaacttgatttacaaagggcctggataattatttgttacttggagccaaccctgcctctccctctgcagagggcaggcactgaccatctgcgggtcttcgtttagcttttgtgtggatgagaattagccacatttctgcatctggtaagctttgcatgaagagatgtttgaagcactggctttgttttgttttaaatctttaaactgctccctcagcttcagtcagaggattactgcacatctaaccacgaataaattgaaatatcagctgaagagagcgcatgttgcttgctggtggaataatggatggcaggtggtagagggttttgttttcagaaaagcacaggaggctagaagtgacaagagtgattttgtgagagggctgaaactgtcaggatgaagtcagaggggtcagtagttcctgagctgacckttttaaacaaatcctgagaagaccttttactggatcctcacagcagttgcacattcatgccagaaaggttgcccctccttctagatattgagaatcctaacaaaaagcatattttctatgatagggcccatgttcacccacgtggtagcctgacactccctctcctgtcagcccatgacacacaatcctaactgctcacctgctccaccacacacacacaccagcatttgagctgtcccttaacacttttctgcagtctttgatatcatcttcctgtcaaatcacagaaatcaagggactgggctgcaaagcgggacactcgtgtgctaatttccatgtcattgctttgaatggttttctagcatggagagctgttacctgacttctggagacatactaaagtgctgagacccattgtagatggcctaaaaattcacttctcaatgttcataagccagaattatagaatgcactgccatatggcttttttttcaaataaatattgttctgtttgagctctgttatgtcactggaagtcacaataaatcacacacytagtatgctttctaatgaatgcttgttgttcaaaattcccaatacctgaaggaaagaaccttctgtccccaaagtctgtgaaaaaaaatgagggattttctcccgttgtcactaaatattattatattattgtatcctcttccattattttttttctttcctgtttgcaactggcacagtaatttactcattcaacatcaatcctcagatgatatgcgctaaaccaccaaaatgtgagttattaaagacaaacaaacaagttttttgaaagttttgaagcaaataaatgtgattataaaacttagaatatttttcttccatttggttctatgtagttatctaaacttctgagtcgacagtaaaagggaaatttggtgactgattccttagataagagttaatttttgaatctggcagaaaaaatatttaaaacaaagccctagaacctgaatctccttattgagtattgattccacgttcagtactcttcaatgggcactgctgtttccaggcacttaaacagcaatgcagcttatattgttgaaccatgtttttttgatgccctcctcagttcctgccccatgcagaagccaggaagcatggaatctactttatagttatctcttgctttctacctgtgtgtttttaaatggctttgtatgttggaaaagtttctggcttagaaaaaaaaatgttaaaaagaaagagaaatggaaagagagtttaagcagaaggttaacgacagggtgggaaacaaaagggggaaaaagaaggtgttatcacaataaaatctgaagattatcaagagagctcagggtgcccagagtctgggtggaagacccgcctggactgggagacgatgtgctggcctctaagggatgtcacttcccccttgcatcagcaaggtcagtcttaggaagaaccgaaagaaaaggaaaaataaaacaaaaggtgacatttgaaaagaaaagatcaatagatatatacaattacaatgaaatctcaagcaaaaaggaagcaaaaatgtattctataagaatgaaaacagaatcctttaattctctactgttacctcaaacgcaggagagaattaaatagtgaaaaggtgttatatataattatttggtcagaaaatctagagagaggagtaatttcttgtcaaataaaaactactmaaattgattatgtagtcaataatcatccatagaattggaagcaaattttaaaatttattattaaaaagatatcaggcacaagtgatttcacatctgactagctaattgttttatcagagtttctatgttatttcaacaattacaacttatagaaaggtacagaaaactccctaataaatttatgaaccttgaccaactttaatactaaatcctgacaatagtacaacccagaaaattgtagaccaaaattatagaccattttcacttatgaataaagatgcaaaagttctaaagaaagtatgataaattgcatcttcgacattctagcgacactaaaagtttcttgcaatatgtatacaatggattgtctttctcctaattgtctctgtattaactttatagaatgaatgtgggtaaaccttaggaaataggttgaattagtacataagaaacatgataagagtgcttgacccagcttcctgtaaatgtcctctgcagttatatagcaataaaaaagctttgctttagcatatggttctgaaacgatcttctagtgaagattgttcaggaagtctttcttcatccatacgttcacatatagttgaaagcagcagataaatgagcgacacttgataattacaaggcattcagtcaatcaatcaataaagattttattttggaaactttgtagtgttagcacattcaacctgtcatatgcttttattccaggggtctggagttgcattttttttttatggagtcctgctctgttgtccaggctggaatgcagtggtgtgatctctgctcactgcaacctctgcctccakggttcaagcgattctcttacctcagcctcctgagtagctgggattacagatacacaccactatgcctggctaatttttttttttttttttttgtatttttagtagacatggggtttcgccatgttggctaggctggtctcgaactcctgacctcaggtgatccacccgcctcggcctcccgaagtgctagaattacaggtgtgagtcactggcctggagttgcctttttgagcattttctgaggtagatatctaaagacaactcaaatttatctgtatataaaacactgcagaaaggagattgtgtacaaaaattaatcctgtgagaaaaactacccatttccatagtaaatccatgatttgtcattttatttgtatatttatatatttgtatcttttatttatttatttattttgagacagggtcttcctctgctgcccaggctggggtgcagtgacacaatcctggctccctgcagccttgacctcctgggctcaagcaatccttccacctcagccttccgagtagctggaactacaggtgcatgccaccacacccagctaagttttgtattttttgtagagacaggtttcaccatgttgcccaggctggttttcaactcctgggctcaagtaatctgccttccttggccccccgaagttctgggactataggtgtgtgccactgtgcatgaccaatttgtcattttacatcagctatagtttatatctggacctcctaagcttgtgtcttggtaagatgcactatagcccccccgttaaaaggcagtcgtggtgcaggcagtttgggtgtgctcattgaatagggagccagctagagggatcaatacctaaaaaattgtaggtgctcagcaaacattggtttaagttaaatgtttaacttatttgggaagacaaacttttaatctgtgtttttgtatataaatattctcatatgtatatcctcctaaatgtatttcttctttgagagctgcaaatagaaaagaactcactctaataaaagctaacattatagttttaattcttggaaagttagcatcacagtttaattcttggaggatattaatttgccaacaccccatatagacctaaaatgtaggagtttcatattctcaggaataaaaaaaatctatatcctcaaacatatgcagtgctttgctgaactgaatgagcatttcttacttattatgtatttaaccatattttagaagtgggcctcaggtctacttatcatatttccatctgtgtagtcattacatatgcatcctcccacagcatacatttctttgatatctaccattctaaattacgatttgagattcatattttaaaaacatataaggtaacaattgtgaccataataatgattgtaattttcttcctgcataggtttttataaccatttctgttagtgtgacttttaakacaatacttttaagaacattttcctcattataaaagtagtgtgtgctcactgtagaaaattaggaaaatacataagtataataaaaactatattaggatcatactgtatgtgctgctctaatcctgctttctctttcacttaaaaatatattatggaagcattttacatgcaccttttaattcttctaaacgtgcttctctttgaaatggccacgtaggattttcaggagtaaataccaattttgtcaatttgctattttagaactttcaaacaataaaatcagaatccatgttgatgacaaactgaagaactcatgggggccaatgctggtagtcaaggacttttctctcaaacacaaaatgttgcaataccataagaaacaagtcaaagcaagggaagaccccaaattcagcacccaccctttattctgtgtgttgacacaaaacattgatgaaagcaagtgaagagtgagcctcctcatattgtcctctgtgtaatagaacccacaccattgtataagcagtaatgacttctttggccgtaacttaaagacatcctatttacactatggtccttttttcagttgtgaatagagtgcatttaaattacaaacttggaaggaagaggtaaaaggattaccaagtgtgagagatgaatgacaaaaagcagtaaatcctatgcgatcagaaggataagtctcacagttcatctgacataagagatggattacaatggctctgaagtggaagacagtttacttagaaatttagcagtaatttgcatttaaggaatgcattagtgtattcacatatacagtttcatcattggatggttaacaggaatatatggtatttgtttgtgattttattgaatrtgatgggttttttttcatcattcagggaaaatctgctttcctcagactattggctgccataaccaccatcagccattaaatgacgtagtgatgctgtattgacactgtcctgtgtatctttctctttgtggctcattctgccctagaaaaatatctctaaggggcagtgccagaattaacccctgcacactgatcaacagaaacttcttctagaaataactaagtctgtcaacctttcaaatatttaactcatgcaaagacattcatggagaaatacaagagggaaatcattctcttataaaatggttaggacatcctgagtttctttgaaggaacaaatattgcttatgctattttctccttgaattcacattagaagacacaaatacaaatatataatgtacatagtctttaacctaaaaaattctttagcaccacatacctctagaagagtagaagagatatggataggaaaatggagtcaagaaacaataaagacacctgtctcagaagttttcaggtatggacttaacccgactcaagaacatacggtaatgtccaccctcacctctctttctttgtgatagtcactcatcgttttctgggataatgctggaagtagaacaaggtttattctttgcttttctatgatggcaaattttgaagttttataatccaaaatgtggactttcattcataaatagggttttaggaatgatgatgtaatttccatgtagcatcgccctaggagtaatgagatgccattactgtattatggctactaacaatgatgagaaggagacttagaactgagccagtaagtatttagaaaacacaatgcattttaccaaatctaagacatgcattttttcatttttaatacctctgaatcagtttgtcttacaattgattatatcgtcaagttaccagatgctgaatgtgaaaaagttttagtaatattttaaacaacatattttccttatattttcttgtttattgtattaataaacaatgtatgatagcatcttaaatgtgatgaaatatagagctgtgcttttaatttgtaataaatgaaggtaaaattattcactgttttggtagtacttataactgatattcaaatatatcaacatataccatctccaaaactcccctagacaaagaaaacacattgtcttggaaagacgttccacaaaatgaaattgaaaatctcatcctgattctgtttagaaacttactttctcaaatctaactaatggggtattgggccaggtagattagtgaattccacacataatccccccaaactcaatttattcattaaattcacttcttcttcctctacgaaatggattcctaaggctagaggactaaccagctagatcaatttattaccttttcttacctttcctttctgatagtcaataatgaaagaaatgcacaagtcagaaagaagcagtaacacaagggcccagattatccctaaatggaaaaaccatccctagataacagagagcccgctgtagctttaaatctttctataggattcagttcaaaatattggggtagaatatagataccatatatgtattatggatatgcattgtatgtatatgtgtgtatatgcacagtaggcacacacatatttaattacacagtcacatgtgttaaaaaggctttgaccacaatgttctgaaaaccactcttaagaagcaagaatgtgcatgttaaagttactttctgggttaacagagatgaggagaaaagttattggggtttgcgaatttattttaaatacattccttaaaaatacccactgacctacatttattgaaagaaaaacagtcaactacaaatgtaattgttatcctgtcaagaatttattaatagacaggctgatgtcatctttgtttaaatgctctaagttgaccgaatttcatttacattaatggatggaaagtccttttcttacttgtccaacaaactggagacaaagtgcctgccaatgttttaatttctttttcatgttctagttagagagtgagaagaatgctttcactccacagtgtcatgaatatgataatctatggaaatcacgggaaagcaggtacttaacttaagcatatactgtactacaggaatccctgatgaattcaagtctcttctgtttagagaagatgttgttgcctgtgaagtgacacactgccagatgttcgtgaagtagcatggtagcaggctcagatcttagcatcttccctaacccccacagatgacagcatctagtttaggctacagaatggtcttgctttcattctttaagcactagtgtttacatttacttgtcaactatcaaatcttcattttcttaattttacttatttaaacatgtggagcacaaaattacataactgtatgagcaatcctgactttatacagtgtatgcagtctaaatgtgaaataagcagttctccatcacgtacaacatgcttaatccattgacttcccttataaatgctggagaaatggtttgctgaagggatgggaaatgtttactatatcgtaatattaagcacaaggcaaaatattttaaaagcacatttttaaaaaataaatacattaatatagtgtcactgtgtacataagtaattcacaaagttaataaaaagctatgagacattgctagaatttctataataaaaataatgttgatgataagaatttctataatgatggcaaagaggcctattaagtgcctattgtgtatgaagctctggcttcactctatacaatttatataaattatataatctttacaaccttataaaatattattcccattttatgagtgaggaaactgagatcttacaaaagttaagtaaaacacgactaagtcaaaaacctagtaaaaatggagccagaattggaagccaagctaagttcaagactgtactgtgtataaatgtacaattacccagtaccttcattcattcaagagtgtgcaatgagccaggcattgctcaaggttctggaaattagtaaataagattagtgaacattttaatctagtaccttttagaggggttggagatttttaaaagtaagcaaataaacgatgtgaatatttttaaaaaggagatgtgaagagtgtgatttgaaaggcctactctagattgggtggtccgagagtgcctctctgaggaggtgacattttatctgagtcctaaaacatgtgaaggatccaactatgcaaagatctggatgcagaccaaaaaaaaaaacccagtaaatgtaaaggccctaaggtcatatgatcttataagacttgtcaagaatagcaagaacaatatggctggagtgtagtgaataaaggggacagtggttaaaatatattgaagaggtgrgcaggggccagataaacctacagtcatggtgatgttttccaattttattctaagagcaatgaaatcattgaaggattttaagcagaggaatsatctgtcatagtttctatttaagacaacttctcaggctactataaggaggatacgttataccaagtcaaaagagaaagcaggtagattggttaggaggctattgcagtagcccaaggatgaggcaattgagccttggactagagccatatcartggaaatggtgaaaagtagagagatttggggtgtatgtactacccagcaaaggagacacttagaagtgacgtaggatgaaaaacagaatagtgggggttttgtttattttttttaaatagagatggggtctctctatgttgcccaggctggtctcaaacccctaggctcaagttatcctcccgcctcagcctatgaagtgctgggattacaggaataaatcactgtgcccagccataggatagtgttttaagaaagaaagaagggtcaactaagtttaatgatgctgagagataaagttagatgagcacaaacaaaaatgtggccacaggatttgcacaataaagattgttgttagcttcattatggaagcatttcaattgtttggaatggaggacaaattcctgaaaaggatatgttgaggagtgaataggaggtgaaggtgtgaagacagacactattaaaaatgcttaaaagaagtttgaagggaagtaaattaatgatgcctgaaagtggctgtagggtcacagaaattgttttgttatgcttagcatatttgtttttaggatgacagacgctaaagtatatctgtgtgctaatgaaaataatgtaaaaatgagggtgaattgttgaatagtcaaagataaaaatgacagaagcaaattccttcagatgatcacagggtacgtgaggtggagtccatgagtggagtcttttaaaggacataggatacctctcttagtagtggaagagaagacagagggtgaaagtgcaggtgagtgggattgtttatgtttaattctattgcactaaaagtgattacatattccctgaggaaggagatcatatctgttttattctccattatgtcttcaatggtcagcscatagcatgtactagacaaattgtaaatactcaacaaatacatctgaaagaaggagtctttcccaaggatgtagtttattaggtccttccctcagtatcttttcctaaaacaccaaaaactttaagtattgttgggcaaaacagtagcccaaaaacttcaggaagttcatggccaatgtagagggagtggcactaggcttggagttgggagacctagatttgagatgaattctgatttatggatgtttgttactgtattctgtagctgcatggagaagctattatttgtggagcactctgccaaatgtataaaatatattttcccatgtttaatatttcatacatgtatgctaattaattatattagaaagatattttttatattaaaaaacttatacttccttttattttctttccaatataaatctgctgcttagcatagaactactaaaaattgactttcaaaatgatgatcatttcattccagtatgctctgaactgtaactctaaatagggttttagatggatcaaaatgtaatattttatgtcctgtgctgtaaaagggattaaaacaggtgtttctgcataggaggatattaggtatcatattgcataaatatggaagaaaattgattaacctagtcttgctccaaatatagcctgaatcctgtatgcttttttactccatatttatagcagtcccattttcctcatcacctcatttttctgttttcctttgcttccattccattgtgtaaggcaatttttattccattttccctcattggtttttgcccttgacattctatgcaacatttagccatgaaagcagtagcattttgaaggtggatttcaaaagcaaattatttcatccaagtactcctaaggcactggaaggactgttgctgagaaaatctttctttatgtattgttaatactctgtgacatttttataattcagagcactcacatctttacattatttattatattgtgcataaatgagatttatgcacaatgtaataatactttggttctataatgctttagagttttcaaaatagtaacagctgtctgtattttaatcatctattaatgcttttcctattttaaatagttgtggtgaagaacaaatgggcaaggtgatcattgttatttctgttttatacagatgaaaattgaggcttacagagggcaagtggcttgccccaggtcattcagctagtttctgcgttctaagatcaatgatcattctgcatattgcattgctttagtagaaggttctattttttctcccaaatcctaaaactctaatatgtaccaaatgcatccacatgtgtatctatattttattcttacctctttagtaatttcatgcctgttatcatttatattcacttctaatatttgtggttgattttctatagagtgtgtctcagatgagtttgtaactagacatcaaactttgtcaagataattacagtgtaatgttagttatgaactgtatgaatttcccaattcatacagatttataatagctttcattaaaaaaatatttttagttctattaattttctatacagatttcattatttagtaatgaggtaaaatagctacaatatctttagttttaccttttactaatgaagtctaaaacagtttatgaacccatccaaccttggaagtttgataaacatgatccatgatatccatatgttatagcctaatagactcagaatgttctatakttaagtaggatggaaagagttataatttatgactcaatctgatgtttcattcacagacaatgtgatgccacctaggcataaaccctaaggaattctaattgtgaatttgaaaacaaaacagatcatatcactgggagggacctcatagatcatgtagtcaaaccccctcatgttaccggtgagaaaactgagacacagagggagtcatcaggctgccataggtcacaaaaccagctgacagcaaagtgaagatcagagccccatctcctaattcccaagtgagtgctgtttccaatatgccacattacctcccccagcaagatgcctcccatggggcattgcttcttgaagatgaagtatattaaattcacatttggctgctaatcgttttctcagcagctctatggtatttcattaacttctgcatgtaacaccctggcctttcacctgtattaacttgagctcattaaacttgaggccagtaataaacaggaccaaactaattcagatattttgcttggtatgtgttcagcattttttttaatggtttctactgtgtgaaacattttcccttcaaaatttgtggaataagtaaaacaggaagcatagatttcaaggaatggagtatgtaggtagtatgcttctttaaataaataaagagcatattaaacacctaccttatacaaaactttgtgaggactacaaagaagtatgagtggcaggatagcacagagtctatcaggcagacttggatttgaattaattgtagcaagttacttagtctttatgcccctcagtgttgttgtgtataaatggacactagaatacccaactcatggatattctttatcttctttgcaataaggaagagataatgtactcatgtgctttgcaaagtgtctggtatatagccatgatcagttaataagctgatatattcgtgaaggtgatgatgatggtgcagttccttccctctcccttgttaaatttataatcccctctcagccatttttgaggaaattgattttccccatgtcacctcccctacctcatcatctctacaaaatataagcaaaggtcctttagaatgcaaggaaagtaaaactaagtcattttacccttcccaggttgtccaccaacattgctttatgttccttttgactaagaagtaagtctttggcagctcatagactatgcaggccccagttaacaaagttcctatgtaattttaaaagtcaagaatctgattgagcaggggatggtgataaaggaggggtcatctgcagaaagatgaccaacaaagaggtggaaatagaagtctgtcaggaagaatgacagcatgcaggagtttcaaggcagaagccattgtgagtcagggtgaggcagtcagcaggcagtgtgggagtgaagatcaatattggagccttggtgtggggacaggtagtcagtgttggttctctgtttcccgaatactacgtgtattagagttctccagagaaacagagccaatttaacatattagattccctcttatatatccatacataactaataggttatatattcaattccctcatatatctatatgcagccaattggttatattattatagccaacaggttataggttatatctgtatgtaacccattggttatatataggtatgtaaaagggaatttaatatgggaattggctcacgttgttatagaggccaggaagtcccatgacgtgccatctgcaagctggagaacaaggaaagcttgtagtgtaattcagcctgactctgaaggcctaaaaactgggggagccaatggcatacttaactctatgcctgaatctgcaggcctcaggactgggagatgaggggggcagcagatggtggaggagatggctgggcgagtgctataaggcctacagtccaaaggcccaagaacctagagctctgatatccaagagcatgcgaagatggatgtcctagctctcactccagaagaaagaataatttgcctttcctccacctttctgttctatgcagtccatcaaccaattgggggatgcccgcccacattctctttactcagggcgtattttctttacttggtctactgatccaaatgctaactgcttctggaaacactctgacaaacacacccacaaataatgttttaccagctccctgggcatcatctcttaacccagtcaagatgatayataaaattaaccgttacaccatagaaccctttttyaattttctactataacagctttgaaaataatgatgaccttagaactcatctagttcactttcctaccactaccagaatcccatctccaacattctggatgattctccctttttgctaccgccatcatcctacagtccacccttccttctgccactatgaggatctggtcacacattttcaaatatctggtgttcccatacaccctaaagaataaaatccaaacactttgcccagaattcagagccctatctatagatattccagcttcatcccccactatctccctgacatttagtatattttagccatataaggataagctcatcctgtagttccttcacttcatttccttacttctcttctcctcctacaactaggcactgctttcccctttcagaatttttcagcatagtttaaattcctccttcactgtaaagattgtattaacctctgagttggaattaattgctcattggatctgggttacatcagattgtttgtgcatgtcgtcctctacttatttctccttacaatgacgtatgtaagccacatgtcagctgactttacccagtcctgtccttctggaaattgctacmaaatccccagagattctgttctctaggttgcttctggctataaattccagctgtcattgaattctgaatctccctcaaacctccctcctgttggtttctattcttttcagctatatgccaacccaaccatgaaactcaaccctgtttccctgattttcctccaaatgtctcaccaagacatgtaagtgtgtagcagatgttcttagataaagactatggaggaggatttagattggagcaatgcaaacatcttaaaattaaatagtggctctccctgtttataaaagtccttcagcctcataccaacaggctgtgctccttctctcttgccctctcttttcacacttccttttaccctctcctctcttttctattccccctctccttcaaaattctacatttctccatgcataatgcttggaccatctctttgttctggtttctcctaaaacatgccatcaataccacatttcctaaatcccaacctagaggtatttcttcaaaaatacttactttaaaaaatgacagtttttaaagagagacctgatatgagttatttaaattgtttcaatatgaaaataataatgttcttatctgagttcctttgaatatgactcaatcctcttcataaggctataaactgcttttggaaggaacagcctcctggtcctctttgtggcctgggccccagcacctgcacagcacttagcagaaagcaagtcttatttccatcatcctttgctggcattccatgaatgttagactttcttctcttgattgacattattcctaattcatgatccgacttcatcacttcacaacaaaatgtgttctgcctgcttttcacaggtgaagtgcctcaccctcttgtagcttatgaacgatggaacagagggttagcagtccattggctccccggtgccttttccaaattgtcacccttctccctctgctgtttattccacctggaggattctcttcacctttcctgacctcacgcctccactgcaccacttgccatcctaccttcaccttatccttcagagtttagctcggatgacacctcttctagaaaatctctgacccctcagcctgggttagatacacattgtcactgctcatataacagtttgtgtcacttctgccacagcccacagggtattgcaattgttattaatatagtctctttaaggtcacacactatcctttctatataaatttcaagtgtctggctccttataaatgttttctgaatgtatgaatcacagcttttctgtaagtacgattttttacttcatgtcatatttgaaaacctatttatatactttaatttgtttctgaaagtaattgtttgggattgtttgacaattcaaacaaccagaaagattttgtaaatatattcaagatattcattcattcatttattcattcattcattaagctttgaaaaattatattcagcacctattatgtgctggatcaaagttacctgtctaggatctcaagctgggcagatggacacataagctaatgatgataaggcagtgcagtaggcacagagattaaaatatgcccaggatattctaaaccactgggcagggagggtaatcggtaaaggagattacttaggtgttatgaagactgagctgaaactaaatrgcctaattggcatgtaccaggtgaaaaagacaagatggggtattctggcagaggggatgcatgagcaaacatggaaacacagagcacagtacacaatgcaatagaagcagttaaggcttatgggaataaattggcaggcatgcattttgcaaatattattccatttaatgcttataccaacatcgtgagtttgatactgtcattctcatttcattgataaggaaaattagtagcagaatagtaaagtaattggctcatagtcacacagctaatgagtgcaaaactgattttaatgcaaatttgacttctaaattatttccctcatcactatgtgaatgttgactttctactttcactatgaaacatgaactatctctgcttttgaccaatttagatatcacatatttgatcaaaagttgtagcttacatttatcaggttaaactaatactcatatttcatatattttacatgtccaatgccagtgtactgatttgcatcattagccatcacatagcactatggtaacgtgtaatatgtagatggactttctgtctctgtctttttattgtgttccactgtccaaatttgataatatcatgaaacattgcttactgttatatcggtgattaagcattacatgccacttacatatgggaaaatctgagcttctgattctaaaccatgctaaaactgattttgaaataaaaatcagcatcaaatgtaagtaactgattactttcataattgaaaagaggaaagaagaaaagtaactgaattcagaaactacagaacagaaaagatacttctcatctctatctcctgtgctaccttgaatcatgctgagcagagattgaaattagggtgagttaggaactttacctggattactttatttaaacctcacaatggccattttatagataatgaaacagactcagagaacccatgctctcaaccattataccacactgctcccatattttttattttaggtatccaagaactacttcaattagctttttgaggtttttaaagatcaactctttgaacatttattttattcatttttctctgcaattattggtcattttattgagttcaaacagttttccaaggagtctggcatattattccttgagataactgcaacaaccaggtatatttgacatataattcaatctgacactagcccttaatgaatagcaaaagatacttacaaaattaataacaatgataatttgtactacactgtctggaaattgtttagcctttagtgtagcacaggacagttcctggcccagagtggatattcaatactgtatttgttgaataaatgtcaaaagactgataaataatagagctatgtcatatgcaaacatgtcttttgggaaaaaaaagtcaacttttagatatcctttacatgtaacttatcctttagtctgtcagttgtatagacacacacacacacacacgaaataggtataaaggagatagatagatagatagatagatagatagatagatdgataatagatttcaggtttatactgaataagatacatatatacatatatatatatatatatatatatatatatatatatatatgatactgagtgatatattctgatataagccggaaatattttcatctttcacatattacaatttagatatcaaagtaattacttgtcttcttgttatggtttccaattagataagagagtgtgattaagaaaataaagttgatccattacagtactacagactagtgctattaggcaacttgctgccattctcataaaaattatgcagtttaaactggaagatacaagtgcttgcttctattacaaacaagaacgcttttctacttcataatatgctcaattaactttagattgatccatgaataaattataatccaaatagacttctttaccttaaagctttgctggcttaaggtatcattgttgattcattatgttgtcacttttctatcggcaatgtaatgctttttttatatctggatagagacagttttagtgtaagatactgttatctttaaatgagtaggatttagcctttctggtgagaacaaattcatcaatgatgaatccctggagaaactattgaaacaaaactcacaccatttctgagctttgttcagttcatcagttacaaagcagcttttgatagtcctaaagaactttttcctttgtttaagaaatatagcatgacgctcaaaacctctcactttgagttaccgcaggctacaacttttctgtaagaaaataatgaatgaagaggaaaagctcctgctgctggcactgtcaggtcctgctgcttctcctcctgcaataggaaatcaattaactatatgttcaggcagagatttgaactaaatgctttattaatcatcactgattgcacacacacacagtggccaactatgcattcatcttcactctttcttagctttgttttgcttgcttgcttgctttatccttcttcctttttttttttttttttttttttgcaagatcaaaacacaaatgtatgcctaaatgtagtatgtgtaaaggtgatcggttgatcctttgttgcgggagagaattgatgtttttttgttttcggaaaactttacttttaaaatgttcagtacttaaatagccttaggaccactttaatatatacaacatattttttaaagcacttaaattttcaaactaataaggaaagcaaaatgtctacagcagccttgaagttttggaagctggtactataccttagtctctgagagctccatgtagcagtgaggaattaaacaaaaatgaacccaatttgatgtggagatgcttggtggaaggtggaaggagcagtcactgatatttggtatttttttttttgctttcaattaaaaaaaattggcaagttttccttttagtccattaattcttctaaccaatgcacaaagaaaatcctgtaggaatctttatgttaaattgagattctctctttaggactaattataaaaccaattagcacattagaaacttagcatgttagccaggggaaggctgtgtaacataatttatgtatggcaaatgtggtcaatcattgcaaaaaatgacagaaaatatcaggctgttggatatttacacaggctgtattatattcagcatcaaaagattttcaaaaatttattgttcttattaccattgttgaaataatttgaaatcattatggtttaaatttaactacattcattgtctgcatttggataaataataatctaaatgaaaaaatatactatcctctgatgtacatttaaaggaagatagattaaaaggttgcaagaatgatttcttttgaatggcctttacaaaactcttaggtgaaattagatgatgttgagtaaggtaaagtccaaacagagaaccatgtaaaccccaacagggaaaataatggttccgattttcatggagcctgctaacctgaggcatctgctagaaccagaggtcatatgtttcaacacttaaccgttcttgatagtctttgagtatattagattaggattgagatgcccctgaggtataagagaagcacgcagggggtgacattctgaagatttatatcatgtggacgtgtgctcgccaccttatgtggtgttatctgaccccaaaggcatttttttggcaccaagtgtaatccctaacacctcatatacctcatatgccccaagaaaaagccatttcataaaagcattgtcttttaaggatgcttatatatgtgataaggacttgttttatactcttatttattttatgcttttagcaagtcagtatcacttgttttatagcaaaatggatacaaaatactatctccctccatcctatcatttcatattactgcaacaattaaatattacaaattaagaaagcattaaggtgtagagatgaagtactcagttctagtctcattgtatataaattagtttggcattcataacattgtttccatttacttgacttgttgacataattataatgaattgataatggaagtaacaatcttagatatttctacataagtatgttctttgctaacatgaattacagttgcagtttgcagttcggcttaattggaacatggtttaagtttagcttacctactctactgaggtctctagaggaccagagaactcattttcctggggcgttatgcaagctgaaatgtggaggccagtgttttgaaacaagtgtgatttttcaccaaaatacttgctaggtcagagatcaggatgaccttcgagtgctgtagttttccaaacctccatcagctagataaatggactttattctgcaggagagagagggtatttttgcagtcttatgaaagagacctaccaattccaggttacaggccgacacaaaacatttggaattcagtgatgtctatcaccagcagtatgtgtcagtaaaagtgaagatcaaagtttctagaagaggggaaggacaaagtgaagagaaaataattgtgggataatgaatggtatgagggcattttcgtgttaacttgaaaccacttagcatttttccatgacgcccaggtatctttctaaatgaactttgtaaagtacaattggataaccttgaaatttaaagctccgtgatgtgattttgaatactgatggagtttgtttaagcactgtaatatttcctctccttttcatttctatttttgcctccatgcaaaataaaatttgttttctgtacagagaaatcaatatttttaccatttttgtttttcagctattccagtaagttgcaatcaacattagttacaatctttaaagagatgtagtaagaatttgaacacaataaaatagagatacagatgagaactttggcgaagtacctttgctattgacaaaagcatttgtcagggactacaactgtgtctatatcatgctaaaaacctgatgaaggggaaaaaagcatcaataggtttcaccttctgtctatacaaaccaaacaaatggtttaactaatagctgttgttttatgtgaatgggtttggtttgccattgtgaactttcttccatttagaaatgtattttaattaacatttgtatatgtaatacatacatatttggtaaaagtattgtactgttgtgttctttttaataattaacggaacctgataccgagaagactagtggtccaaaacaatgagtgaagacctagttacagtatacatgaaacaatccctagacacacatttgtttgttgataatatttatatgtttatatcttcccatttttctcttctctgagctaacatgcttccttatttgtgtgttttccttttagaaactgccaagttttggaccttatctggaacagcrcaagaaaatcatagcagaaaacaagattagactgaaagaacaaaatgtagctttttcaccacttaagagaaactgttttatccccaaaaggcctattcctaccatcaaggtaaaaattatgccaactatataagtatgcctactttactggttaaatatacaaatatagttaaaatgtttatttactgcttaaatgtatcactaatttggttttagaattataatgaaagttttaaaaacatctgtccatggtgaaaactgcatttaaattataaaataaccttttttatttgcatattttatactttttagaacactggcaagcatgcatgtcatggaaatttttatatacattaaatgtatcaggagatattaagatgaaattcctagttttcttatagtcacttaaaaattattttaatacataattaactccaagatatcttgtattagtcatgtagtacaactcaattatcaataagcacatcaatatcaatgtgatcacttgaaagttttggaaaaactttctctggtttggcctctggaaagcctggacatttatttgggtctcaggagattattttctggtaataacaaaaattacactaagatagaattatgagtatgtgttacctttcttgatttttttccttaaacttttcattttgacagaaatgtagattcacatgtagttgtaagaaataatacagagaggtcttgtgtaccctttatccagtttcacctgttttgcatgttgcaaaactatagtatgataacacaaccagcatactgacacagacacaatctaccaatcctattcaagtttttccagttttacttctatgtgtgtgttgtatttagttctgtacaattttgtcatgtatggaggttcatgtatccaccaccacagtcaagatgcaaaacagtgacatcaccaccaggattcctcaggtaacccttttgtaaccacgccttctttttttctgtcaccctcaagacagtattgtttccaagcagtcataatgagaaaaatggaggtgttactggatggcattctgtctgaaatcatcatcactaaaatgtagtttgcagttactgaaattcattcttctgtgtttgatgacactctactcctacatctccattttctgtttgaaatatcagctgaaaagcttgcttttatgtgttctcaagtagacctcactgaaattcatctttagcagtcaactggagactggaacccttaaaaattccttctacctatgaagaaaaaaaaaatgtatctcatgctaaaaacagtggtccagactcaatgttccaaaatttcagcaatacagagttccgaaagggcaaagggagtggctgaccacaaagcgtgccagcacttcaatgccatcattctaaataaaatgaacatttgggacttttaacagcataaaagccccaaatcgtctcttgagttgttcatgttaaattatttttgtgccactaaaagtatgaactgaacaaactgaacactaatggaatgcgaaggccagaacctacagcccttcacgagcctttttgccaatgtgtggctatgactactatatgatttggagatatagtgtgtctggaattggttcctgcccaggggttcatggtctcgctgacttcgagaatgaagccgtggaccttcgcagtgagtgttacagctcttaaatgtggcaaggacccaaagagtgagcagcagcaagatttattccgaagagcgaaagaacaaagcttccacagcatggaaagggaccccagcaggttgccactgctggttggggtggccagcttttattcccttattgtcccctcccatattctgtttttgtcctatcagagtgcccttttttcaatcctccctgtgattggctacttttaggaccctgctgattcgtgcattttacagagcactgatttgtgcattttacagagtgctgattggtatgtttttacagagcactgattgatgcattttacaatcctagttacagagtgctgattggtgcattttacartcctcttgtaagaaaagttctccaagtcccactggacccaggaagtccagctggcttcacctctcaataggaattctcccagctttctctctcttcttaatcaatttgaattaaatgtaaaatctccatctctaggcatcttttccttaggtgtaaaaatttctaaaggaagatattatttatatttgaaataaaagaagtgcaatatgattatgaaagcatttttaccttttctagccctcaaatctttcagagattgtatattaaatattgataacttagacaaaaaacaaaacagagcaaacaaaaaatctgtggttgcatgaaagcctgtagatcattaatcaaaaaaaaatcaaagtcagaattaaaccaaagaattgtgaagtcttggatgtagataaagatttctgaagtatcaaagaggaataaggcatcttattaaaaatagtgcaagtttatgttcctctcctaagttgtcttactttggaggttatccagagtgaaatgtccttggtgttacatgttacataagcctcaagacattgtagataccatcttaccagcatcttagaccttatcagtgtcaacatcttaatgggcagctgtggtagattttctcaatgtctggtggattttccactaccttggccttctccccagaatgtccatactcattccacctgttgtcatttctaggcagatgctgtgccctgtcaaaaaacaaaatagtagctgatagtggcgaggttttcggggaagcragcattttcagtttttataaatgcagttatctctttagaaaattagagattaaatytgttataacaaataactgtattataaatataaaactgtgtatttatatttatattatactataaaactgtgtgtgtgtatatatgtatatatatacatatacatacacagaagctttaatttgtgtaatcatctctagcaaaggctcattttgtgatttttgccgtttgtttgcttaggttaaccttttctaccataagattatatcagtatttaccccatctagttgttttaggattttaatatttgtattttacttcaatttctctaaaatttgtttggctctaaagtatcatgtacagttataactttatttttttccaaatagacagttgttccaagacctcaatatttgcattttaaagggatccctttcatctctcaaattataattcagtgacaaaaatgtaccataaattgcatcatttactttatattcaaattttcaacctctcaaagttttccaaaacttttcaaggacaaatcaaaaatgaattagacaaggttctaataaggatggtcaatctctagaaaaaagttttatgccgtaagtaattatttgtgccataataaacaatttttaaatctttataaatgaaaacttctaattaaattcaaaattctgggttctaaactccttatttaattaataccaaacttaaaataccccttttacacttctacaaaacaaaattatttcttgtcctgtagctttgatcctttactttgaaatatgtttaatatgattcctttttccttctgatattaacctcatggaagaggtaggggaaggtgggccttgagaaaatcactgagttcagagagcagcgtgtagtctcatatgatggaagctgaagaacaggttggggaaagtagaaaaggattgaaagaacatgatgttggtgtctgtattcacctctctgcttccttctctctgtataatcttcctttatgataaatctaaacgtttcctacacaatgactcaactattctccatccgagacatcttttctatacttcagacttgtgtcaccatatcttggggtcacctccacctgcatcgtctgaccaaggaacccagtagccatcatacttagaactaaactgattcccattccttccaaacctgctcttcctcctgagtcctctgtctcaatgaaccccatcttacctaactcaaaaagctgcagttcagcctggatgtcatcttattactcatcctattcacaagctagtcagcaatgactattgttcttatctcttacatctccctcctcttacattctttacataatgctgaggcctcagtgtgttgcttacgtattctttcctggaattctaaaacattatattaactgtcctgctttcttttgtcctccttatctaatccattctccaactattatgaaggagtcttttaaaaatgtaggactgtttgttttatcccttgcttaaaattcccccattgtaaccgtaatcctaaggtaagctccttagcataaccttcagacccatcacattttagcttttcctgacccaagaagcagcttcaatggaatgatgagaagtagaatccaggaggtgataatttgaggaatgaatgaagactgagaaagtaacaacaaagtgtgcagaatacactttcagtaacttgagaaaggtcagtaggaaagggataagaagaggaatcgagtagaggaaaagattgttttgtttatatgagaacgatccaggcttgcatatgcttgcatatgtttgggagagaatagctgaagctgccagaaagggcatgattaaggaaactacatctttggcaagcagagagggaaaggagtctaaacaatatattaagatatcttgcataagaggagagacgtgtcatgaagctgaatttggacttcccagtgtcattttaacaagcagacatatttaaagaaagtgaccataaaaatgtcttcagaaactattgccctcattgaaatacaaagcaaagtttgtaaaattttaacagattatatttatggtgaaagaatttcctgaattaggcatgggactactctgtcacactgcctaggttcaaactatggcattgccgtttcatagctgcatgaacttgcctcagctaactaatctgtgaaatggaaataataaaagtatctgcctcatagagttataaattagatgatgtgtgaagtgcttttagcatggtgcctgcaccaaatgtgtcctaaataaatgttactattagctataatatttgaaatgaacagtttgaaagaaatccacgttaagatgactattcatttccattttgtccaataaaatgaactgaagaatgaaaatagaaatacataaagctctggaggccaaaaaagttggaagttttgaagaagcctatgtatttttcaggaaatctttattgcatacctaccatgagataagcaatgcactaggaattgagcttctgcagggcaataaataaaacatacacagcttctgtcctcataaagcatacagaatatagaaagagacagatattaaggaatcacactaacaagataaaattattttttgatatgagctacatagaaaaaatgcaagatatatagaatctgtttcatagtgagacctaatttagattgaaggggccaatgaaagcctccttgaggaagtgacatttaaggagccctgtagactaagtagagattagaagggaatggggaactgagaatatttcaggtatgccataatgtggtcctggatttggtaattggctatggtaatggaaacagagatgaaattaataaagtcttgttaattcttcctccaagagtcagtgattctcattatattaggcataggtatagtaaagagctgataataagaagactaagatgtccascttttttatggttccacagagataaagaaaaataaaagataatgagttaaggttttgatgttagtgttttaggtttgaggggagtttggggtgtagcatgaaaaacttagatttgaatgtattgaaattgataaaggaattatgggcctatgctggaggatataaaggagaaagagctgacatttccaacgcccactgtgttccagacccaagatagmagctgcacatgtattttcttatttcttacttaacctaatactctatgaagaagtagggagttctggaggaacaaatgtgaagaagtgatcaaagaaagagaaggataaccaaaataaaatgatagtgtggaagaaatacaaaaaggaagtcttaagaataggaaagtggtccacaaggtcagaaagcaccgattgttttaccaatactttgtattgtttcattttgtctcgcatatgcaatcaatgaaattccacctctagttggcaacagttgtcaaattcatccatgtatgtttcttaatttgtccaataatctttaatgtgcaaccastatgttccggtactatagcagtcattggcacaatccagtagtgaaaatcccagctctcatggagctcacagtttagtagggagaaacagacaatgacaaataaacagatgaatacataatatgtcagatggtgacaagtgtaatggagaaaatagaacaagcttaggagaataaaaattactagagagactggccagggaacacctgcctgtttaatggcatatgggcaaacacctaaaaaagtgagggaatgaatgatgtgggtatccaggggaagaacactgcattcagaatgaacagaaagtgcaaagaccctgaaatagcaaagtccttggcaggaaaccagtaaggcttttagaaaggaagactgatatgatctggcttatttttgcaaaggatctttctggctgcagtgttgatacagtttgctagaggggcaagggcagaaacaaggagaccagttagaagctattgtaacagtccaggcaagggattggcaggagggaaaatatatactggataatgtcagaaggcctcaactccattgttttaaatgaaaagatatgtgtgaaagtattatacacagcacagctctattcaaattctaggagccacagttattgtcatttttatacaagtccctgccattttgcccattatttcagaccacatctagatgatgtggctgtgtgatttttcagtccacgttgatattaacggccacattccctttaaagtcattttctgtctgcacatgmatcagacattgcttcttgtccttttattgtggttgttattgctgttttttagcacacacccaggcacgccatgtaattgctgctacatgattacttcagtgttttccctagagtgtttcttctttcttgacataccatttttcctacttccctttttcctggaggacctgggttatctgttttcatgcttaatattttctctgtccacccatctgtttattttagcttgtttcttccctcctctctgctggcctctttatagattcctctgttcgatagtttaaactccatgacactgctttgtttatcctctcagcttccacagcacattattccccatctgctgtagaaagaaccccagtgtcccacaaagttaactaagcccctcttgtctgaacaagtttttcagtcatgcattcaagtttctgatctaccccatcttccctggttgggaatgcaacaataatatttctaagcaagctatgctcagtagatctcatcttttgttcttttttcctttcaaatgccttaatgacttaatggtctatttcttcagaggtaggcagtttcaatatcagtcaatcagcaagtatgtatttagtatttgctgtgtgaccagcagtgtgctaaggactgcaggagattcaaaaaaacagacacggcatggtccaaggctcaggatgtttgtaatctcgatggagatgtagtgctaacatatatttattatgcacttgctgcaatccagaaattgtgctagaaactaggaatacaacgtgaattttaaaaagaaagacgtctatccttatggagctcatagtctagcaagggagaaagacacatgttaaaaattatttacagttcaatcaaatatgtacaaaatgctctgggaaaacagaggagtgaaagggattagttctgccttgggtaattgtggaaagcttcacagagatggtgatatttaaaatggagtttaataaattagtgttaattaagcagagaattaataataaaagctaatatttattgagtacttatgaggtttcaagcatcactacgtgcttgcgaattagctcatttaatcctcacaataaccctctgtgctattatggagtaagcaattgataaacagaaaggttaaataactttcctaaggtcacacagctaggaagatatcaaagccaagatttgattccaaagggtagctctaaaccttgggcccttaagcactgtcctctgctgtctctcatgaaacatagaaataagaaagaaaaggaaggtggcatttcaagcaaatcagtatgtttgcaaagcmcagtattcaaacatacttgtaataacctgcagccatgggaccttaaatccaatacataatccctggatcaagcagatagtgacatcaaaatggtaaactcattyttttgttaaattggaattcatagaaagcacagaactgagaagcaataatgaggaaaataactgggttttataaatcagtattaataacagaatataaaaaagcmatgggatcaactgattaaactgctatgaatttcatttgaacatcaagcatggttatgcccagtgttatccagggactagagagtccttgagaaccagaaatytttgctagacaacawacatcctgattytcctagccccttgaaagtaaaaaaaaaaaaaamaaacaaacaaaatggcctcagaggccctccgtcctacccctgggaatgatctggggccctggggacagcctggcatctgcatgatttcccttttatcaacaccacatcttcatttccaatgcataatagcatagcatttaccatgcgtatggcccatattatgaagctaccaattccataagggaaacagaaagaaaaagattctgaggaagaagagggtatcaaaagaagtactggaaggctgatgggaaagaatgagataaaagaagaaaaagaaacctggcctcctgcaatgagtataaagatttccttctaaaagatgaacaaggaccttctgaagaagctcctgacatattctacaggttcacctgtgctagagaaaagaaaccagacaatgcctcctacaggaggcagtttcgtttcctcgctgagagaactgaagtgacagtgtgcacatttggcccagttaaatgagaaacgtgctttattcccaggcagcatataacagagacttgagagtctgccaagacttataaagtcccccgaatgctttccacttctgttgatatatatgagaatgaattctcattctctttatgaagccgggaatgtatctctaacgtctttgaatttctgcgtaggaaaatgaatggtttaggggcactagtgatgttttcatctcttcttcctgctgcttctagtaagagatggactgcatctcataagactggcaagacagtgttggcgggacaccagtcagcctgatcgagtgctttattatttcaattgaattgtgaaaggaaagagaagagtactcagataaaactgcaagaccatattggatactatggagcataaacaggagggaacagaaagaaaaatagtggaggccttgcccagcaatttccaaaagataccagagaaatgggctgggaacaaggttaatattctcacttgtccctgtaccaacacatagcagatgaaaattatcaaactgaactttaaaaactgaagagaatttggtaaaataatcccttaagtcttatggggatttgtagaaatgtgattcctgaccagattatggcatggaaaggtgtatcttgtctggaataaatgggtctgatggaagggctaggggagaagcagtatctatcaaaaaaattatacacatgcatggaaatccacaaacctcagggtggagtatggaggaagcagctgcaggagagtgaaatgaaagaaaaacaaaatgttaccctgggactgcctcagagaccttgtaaccagatggttaatagggacaggcaagacagaggagtgatgaaagcctttgcaaacttcagatggaaatcccactccactaaaggcaaaacatcggaaaaattattgaattgccttgttggaaattcagtctcacaaaagagagacaagtaatgaggggacttgctgctttggcttatttctggctaaaaaagtctgtttgaagaaaatggcagctaaaggaatcttgaaggaaagtaaccattccacgttaacttagagtttattaggccaatgaaaggaagtctgagcttagaaatgcaagtatcccacctttagtaaacctaatttcaggaagttcagagaaaacaatagatattatcttatagtcagcaactctaacctgaagatggatcaagaaaaatgagaagctgacaagtacaaatttgattatataatcactaagtttcctaagaagtaagaaaaaggttatgcatttagataactcagtgtttggtgcttatatgagaaaagacagatcacattaccaatgatgaaataaaagggtggcatcaagatttaaggacaggtcagaagtgctaaagcctcaaatgatctgagtttggagaaaatattaggaaaaatagcaacatattttgtctattaatactcactacttagagcaggtggtacactgttaaattataattagagagaactgtttgactcctattatctttctagaatcccataaagaattttatcagaactaaaaagagtagagaaaatatatttgagagttaaaacctaagatacctaaggatattgtagaaatacacttaccttcattaaatgaatttaaatccaaagtgtcttgcaagacattaccactttaaagcctgagctcatcccagatagaaaaaatacagtgatcagggccacagacaggtactgaaccaactttgctcctggccaatccttactcatctgactctctcactaataatctccctctcacccaagccgctctcactactttggttccaaaagtctcacttgccgctattccatctcttgatttacttgcttctctcaccctcgccggccaatctaatacttcattttctggatcatactttgtctctgccctctgctctcagcatattcaagccgagtccttagttattagagttctgccaaatttaaacttaagatgtccttttcttactgtacagtactcctgtctgccttctgctcagagggcatatatagaatatccagaataaggcacctgctatatttttaagtgcttttgtaasagatcactataccacactgatgaaaaataaatgttgctccaggttctttcccaaagaaaaaggtggatgttgtaggggaagtagggaaaagatggaaacaaatcagaaagattgagatctaaccccaaaggaatcctacaaacgtcattcagcttttgacttgggagcattagtaaaggaagaagttaaaaatcagcataaattcagtaagagcaaactgaattatctcattttctgttttgaaagatgcattaggcaagaagtgaatataccataaaaagatatgacattggtaatggtacagataaggaaatagttaaatgattaaatagctacatccaaataatttaaatattgaatgtttttgggttagaagtcatagtgactgcccacagcatgctgttctgggtcctggtttttgaaggatacttatttgcagaagttgtacaaagtgcagacagtcctgacctacaatggtttatcttatgatttttttttattttacaatggttcayattaagaacttaacaatggttcatcttatgatttttctttctactttacgayagtgtgacttacaatggttcatcttatgacttttgttttactttaagatagggcgagagccataggcatgcagtagaaactgatatgatacatgctaatcaaatatgaagacttgaagctagaaagaacagctaacatgctagataatcacagtttgaaaatacttccatcagctattaaaaatagrccaaaactaataaattaatattagtcgtaataaattcagaatgaaacatcagggacggaatcagggctgtctagttcctcactctttggccttaaactttatatcaaacagaaacattgactggtctattaaaaaaaaaaaaaaaacttggccaggcgccgtggctcacgcctgtaatcccagcactttgggaggccaaggcgggtggacacaaggtcaagagtttgagaccagccgggccaatatggtgaaacccggctctactaaaaatacaaaaattagccgggcgtggtggcgggcgcctgtagccccagctacttgggaggctgagggaggagaatcgcttgaacccaggaggcagagcttgcagtgagccgagatcacgccactgcactccagcctgggcaacagagcgagactctgtctcaaacaaaacaaaacaaaacaaaacaacgacaacttttaattatctcaaacaagtaataaattgataataatgggatcttggaattctgtagtactttgcaacatccattccttgaacacctacattaaaattaagtgttatcatctrtaatttaaaagatttaacattgctttctccacatacatatctayatataaccatttccactaatcagggatggctacaccatactgctgaaccttcatacatccaaatgggtgtaataatgaattggaataatgaatatgggttccctgatctccacagatgtgtgtacaagaggggctggagactagccatatgtgacttactgattttatgcatctttcagccaactccagattccaggacatctactcaagggtattcataagctggtagtactacctggaggctttgggattaaaacaaatgtccacattcttagccacatggaataattttttttgctactctttcccaaaatgatttaaaatagttgtcattcttttatcctcttccagataaagaaaaaaatataattttcttaaaaaattgtacttaataagggatgaattgttaacaccatgtgctaataacttctagaggctccacattggcttcacattaaacaatgatgttttaataaatgacaaaagcaaatctccaatttagaggaaaaggcatatttaatgtacacagaatgtggacttgctccacgtaaaatttctaaggcatatacaacgtttcttttgaagaaggcttatacacttgttgactgcctagagagtttcctgtataatcatcatttgaatatttattgatgattttagtcaccattatctgattcagtgaaacaactctttgggttgatttatttactagatttaaaaaattattttctatcacatataaatgggcttttacagccagatagtgacctcttgaatttattattttaaaatagtactgggaaatattacacatatycagatactttgactatgattattttgtatttaaaatactcrtatcaataaaaatgttcagtaaaatagctattacttcatcccactatgtgcctactaccatattataggtttagtgtatagatatataaaatttatatttatgttaacaaatatttgmgtacccattgtgtttcaatgatctccagaaacaggatacaccacatgagatacacagatgaattaaagcttactaagagaccacaacatgggaagctaaatgtagaaaatatccataacatgaattagaatttgctaaatacagaataacaaatgagtcagcatagcagagtgctgatgatcgtggtatttaaagtcaggcaacactggttctcaatccctgcttcatcatttacttaattgggtactttaaatctcagtcacatcatcractattaaatgcatgaggtttaagtgagaaaatgtgtaaaacatatggcactggcctgaaatatattaagaactcaaaaggtatctgttgtcattagttccatataatagatattggccatcaaaaaaaatttttaagaaagaggatatggaggagagagggcaaggaagggaggaaaaggggaaaaggtgagraagaggaagaaagagagatcacgtcctcacatttggttaggaaagaagaaggaaggattaaggaaatcttcatgaagtagtggcattcgagatgtctttgaaggatgcttgggattttgcaaagtggagttaggaatgaaaggtatcttagacagaggatttaacctaatgttagatctcagatgggtcagttgaaaagtgtgtcctccagtgtagctgaagtgcatggtgtttgaaactgagaaataagatagaaaaagacatgtttgcagaaagccttaaatgccagcgtggtaagcctgtgcctaattcaacagatttttgaataaggtagtgagaaatttagtctgtgtcttacatcctagattaaggtggcagcattgcccagggtagagtgggaaaggaagaatgtgaggatgaaacttatcaagtagtctcttacaattgcattaaaattaatgagaaattcattaataatgtttaaagatggcagtaaacatggaaaggattcaaaagatattgcacatctggaacccagacttggcaacagataggagatattggagcaagttatgtagtgacatataactatgaaattccaagactccgtgattggaaaaatcgtaatgctattcacaaaactaaagaaatacaaaggaagacccagttcgtgttgttgatgataagttcagtgagtagagaatctgaagtaccaatctctaatgacagtgctcattatgcagctgataaatgtagatcttgagtttatgggagcatttcaaaatggaaatattgatttggatgtcaagtgcccacctacaaacagactgcagtgtagttgaaattataacttcaatgcattataaagaaaatagggaagacaatattggaagttttctagcatcttatcacttgaaagatacacaaaggaactgtataaaaatgtaaactttgtctcagtttgaaattccatgataatgagtatattataatttagagatcaaatagaaaaaaaagtaaagaagagtaagcaagattataaaaatagcagaaaatgcaataccaaagagaatatggaaagatgattttaactaagagtcaaacctccttgaacatggaccttgaattcaaacaagattctcatgttaatagttaaaaacaaaagcaaaaatcttgacagcwtgctaatttgacattgctacattcttttgttttgttttatgaagcaaaatgtttcttattgttgatgaaacatagtctgtgcttcacatattaggcacactcccaattagtatgaagaacaaagcaatgtgtaatcacatgaaagatcttcaatggtgaatgaagaaaattctagttctttaaagtaaaagagcatctgacttaattattggatcaacctaagcgattaacataaattagaatttttaaataatgttgcatactcttcaagacatgacaggtgagtattctatcacagcactttttaaattaaaatctaaaatcctcatgcagtgaaataaatgcataacattcacactcgtattcccttcattawgagcaatctaaacttttctagcatagtgtattaccctttgtcactttgtattacttttggtccttcaaggtccaaaaatragaaaaagttagccataacaactcacacgggtgtcatttattctttctgtccacagaaatgctgttttaaattatccagtcaaaaacctattgaatgcagttaattaggtctcgtatttctaagccaggcatgcatattgcccatctttcagaagacaaacatctaagctataattatcataaaaagcttatctatgagaattatactatccagtctcccaagttaatataatgcaacattgtataaaaacaggaaaatgctgagtgatattaattattacatgaaaatgttttaaaatgagcttgctaagtaattcagtggctatttttaggatgtaataggaaaagcactgcagtaccttggaacatttggtgaattgagcaacgtagagcaagttgtggctatgattgwtgaagaaatgtgtatcaactgtggtaaatgctacatgacctgtaatgattctggctaccaggtaagaatcctgctggaattagaatgctatgagacatgtttcttcttgtttttayggcagaaagcattttctgttgctatgtgtgaaatttaaaccagtggtgccaaatattgctcttctgcaacagtacatctttctgtcctgtcacccttataatatggtctttttttaaaaggaaacttgtaacttttactaactatgccagcatttaatgcacagaattatttttataccatttcatcagccacaacattagagagaaaaatccaactgaaaagagaaatgcacacaaaattaggaatactaggaaagcattatgctttaatacagaggaaagggaacagaactaccatttrtggccattactctgaaaggctatgattccttctgccaaaagagagttctcttccattcagtattgattaggcttttactacagtcagaaagaagcactttcccaccaacgagttgtataggttggtcccaggaattcctctgaagctggaaaagcctaagagatgtattcttccctcatgaagtgagccatagctactttccagctcctcagtcctcagcagagcatctaccatgcaggaaaaaaaaaaaaaaaaagaaaagaaaagaaaagaaaaagaaaaagaaagaaaaattggggatttgactccttctagtgggctattctcttgaaaacacattctgtgaatttctctttggcttataatttgcttcttcatttacttcctatatatttataacctgctattttttaaagagtttggcacaactatgacttttaactggttgaattttagaaatgaatgaaaaaatgatcataacaatacttttaaacataagtttcttctcaaaagcctgatttattgtgaaagttaaagaatttcttaagaagtagagtttggagaaagcaaattttaaagttttggaaaactactaaactattaaaaattgctaaaaactatacaatattgtttttattatatttttcaagctataagtaaaaaaagatctttttaagaaatgatcaatggaatgttctaaattcataataaaatgtccccatgtttaaaaagagaagtttgtgtaccttattcaacctaggggcagattccatactgctcatggtgggattttgcatattcttatgacagacatattttaatttaaaaaaaaaactattaatttttcttcctagttccacagttctacaccaaatttttactcaattcatcaccttttttctagctaaaagctgtcttaaccgttatttttataaagtgctagccatatcacatttactttcatgtcgtctttcaaattaaccaatcagagatcaatcaggaagtcctataactatcagagcatcagctctctaatatcttaaatcttagaacttatggctcccaccgtggaattctagacttggaacaactttagaaaaatcttcttagtaatgagaaagaaaatcacaagtatgcattttaaaagacttagaaagttctttgattcttctgtctcagaagataaaaatagaaagccaaaatttttaattgaacataaagttttatatctttgcagattttcaaagtatatttctaagcattagtcttaatttttatcagttacttcattgagtttccatttatataaaagggtacctaaggaagataartcgtttttactcatccaaacagcaccttaaaatgttgttttacaaaacatagcaccaatttgtgtggacagatattctcatgacttgctatagctatagttcttgttcaaatatatgtttatttccttacagatcagactttttaaaaatattaagcaactatcatgatttactctgaaaatattattttcatttatatgtgcataaaagagaaaaaatatagttgcatgcagcttcatttggaggggggaattttttaaacaactatatatatatatacacacatatataattgaattataacattggtatgagacaggaaaaaaatcaaaataatgcaattccttgaaaatgtaagatttgtagacctggcctcaaggggtaccatgggggtggagagacacttattgtcccttgtaatttcctcagccccgacttagtcacttcaaagtagtacacagtctgagtaaaactcttgtattttttttgcaagtgagactgccaggcaagtttcctaaatcccctctgacaccatgatccacccctacgtagctgccctgaaatccctcctagatagaaatcctgtaacttccgctgaggtcttacatgtcatttttcatcattgaaatgtttctctttaatgggaaaataatcatcatatctttttttaaaaaaaactcggtcctgaatttcatactaggtattcttaattgcttattctacattgcttcatggaaagaaaaagagaggaagggagggaggaagggagggagggaatagaggaagacgggggaaggaaaattgtaaaatttctcaaaatcctaagccgtttcagagctggaggcctggctgtggtaatctgggctcaatagtgtcagggccaggactggacatcagttttcctggctctccattcagtgtttttccccttcgtggtggacaatgactagagtcagcttggaaatcttcaaaactcaaagctgactgttaagctaatttttttcttctgctttcttctaaaaactacatgcattatttgaaatccaaacaaatgtattcattgcctcagaatctgacagtaacacttttccactgtcaagaacaaagagtgtgaagaggaaaaggaggacgtgtgaaagtcccccaaaatccacaggtagaagacgccccatcctggtagaactggaaagacccgaactctgctcagaacaaagaaaactagagagtgactatgttatgacatattttcctcacacaatgaagaaaaatacccctaaggaattttaaacattgtgtttttaatttaaaaggatttcttttctcgctctttttttcctcctctgtcagctcaactgttgctatagttgcaccatagagctggacgtagttgtctcatagtgtggctcctctgcagcagagaaaaatgttnacgctaaaatggggacattgttgacctttgtggtcagtgacatcaataccctctatttctgtttgcaggctatacagtttgwtccagaaacccacctgcccaccataaccgacacttgtacaggctgtactctgtgtctcagtktttgccctattgtcgactgcatcaaaatggtttccaggacaacaccttatgaaccaaagagaggcgtacccttatctgtgaatccggtgtgttaaggtgatttgtgaaacagttgctgtgaactttcatgtcacctacatatgctgatcttttaaaatcatgatccttgtgttcagctctttccaaattaaaacaaatatacattttctaaataaaaatatgtaatttcaaaatacatttgtaagtgtaaaaaatgtctcatgtcaatgaccattcaattagtggtcataaaatagaataattcttttctgaggatagtagttaaataactgtgtggcagttaattggatgttcactgccagttgtcttatgtgaaaaattaacttttttgtggcaattagtgtgacagtttccaaattgccctatgctgtgctccatatttgatttctaattgtaagtgaaattaagcattttgaaacaaagtactctttaacatacaagaaaatgtatccaaggaaacattttatcawtaaaaattacctttaattttaatgctgtttmtaagaaaatgtagttagctccataaagtacaaatgaagaaagtcaaaaaattatttgctatggcaggataagaaagcctaaaattgagtttgtrgaactttattaartaaaatccccttcgctgaaattgcttatttttggtgttggatagaggatagggagaatatttactaactaaataccattcactactcatgcgtgagatgggtgtacaaactcatcctcttttaatggcatttctctttaaactatgttcctaacaaaatgagatgataggatagatcctggttaccactcttttrctgtgcacataygggctctgactggttttaatagtcaccttcatgattatagcaactaatgtttgaacaaagctcaaagtatgcaatgcttcattattcaagaatgaaaaatataatgttgataatatatattaagtgtgccaaatcagtttgactactctctgttttagtgtttatgtttaaaagaaatatattttttgttattattagataatatttttgtatttctctattttcataatcagtaaatagtgtcatataaactcatttatctcctcttcatggcatcttcaatatgaatctataagtagtaaatcagaaagtaacaatctatggcttatttctatgacaaattcaagagctagaaaaataaaatgtttcattatgcacttttagaaatgcatatttgccacaaaacctgtattactgaataatatcaaataaaatatcataaagcattttaaatatggtcttttgctgcctcatttgcaaatataatttcatataaacaatttagattttgagatagagcagtttttggttagtcctatagagcattccatccagatataaaactcatgttagtttaagtaaaataagggtgataatagtgcagtcactcaaatgtttcacttcctgtccttcttacccatctttacctactgaattagattctattctgccaaaaggcatcttttactgggaacaggccaggattcttgcaatggcccatgggcagggacaaatggaaagtggcagcctgcctgcctgtctgaaagtgccagtctcactgtaggaagtacacacctcacttaatattactgcttagatagttatgtgatattattgactcatataaattgactctctttgcactcttgtcgtggtgagggattttaacttttggagttggtaacacttagaaaacagttccagtaatctagaaaagagatttaccagggctacgtggatgccatcataatgtcttaccccctacctgaatctgatgagagtttttcactctgggagttctgggagtttagtagccttctgggaatattataaaagatatcccatgtatgtacacacctgagtcctcttcaagatactgaatgccaaatgccaggcagaaatttccttgatcgagattaaagaaataatcatgacctttgcatttttttctgagaaagagagggcaaaatactttaactgtttctgtaactactgtggagaactacaagtgaccagggttaggccatggcaatccatgattttatactagtttcttccttacacacatttctttctgttgtattcactttctatttcataccaagaagtctttcttatccatgttgtgtgtagaaaacataactcaattttacatatgttatttacagagagactcagaataaggaagaatgaaaaccacattattcccatccagcaacacaccaggagccattgaccctaacacacacattctcatggcaccttacctccagacatgattggggacataagaccagaccagagagtgtggttagtgagcacttcctaacgaatgtctgagaagctgtactaaatgttctacatatatgatagttaattttatgtgtcagcttagctgggctgcagtacccagacacttagtcaagcattactctccatgtttctgtgaaggtgtgtgttttggggttagatttacattaaaattagtggactctgaggaaagcaaattgcccttcataatgtgggtgggcctcatccaaccagtggaaggcctggctagaacaaaggctgacctccctcgagcaggaaggaattctccagcagactaccttcagccttcatctacatcattggctctttctggttgtatatcagactgcctttggacttgaactatagctcttttctgagaggccagcttgcaggcttcccctgtcaaagttgggactcatcaagcttccacaattatgtgtgttcattccttaaaataacaaatgaatttttttaactaaataaagtgtatcagttatgtttctctggacaatcatgactaatacaacatgtattattacattggaatgttataaagatcacaggtaagtgctatatttttttccatttaaaaatgaagacataggtgcttaaagagtctaactaacttgttccaggtcatataactgtttagatatgtttgtaggtgcccttggttatgtctaatatgctacatgccttcatccttttgttcaaccaaccatttatttattcaacaaatatttatgaagcagctattatacagtgaaccaagcactggactaagggctgagggtatgaactcgaatgatgaatgctccttgtcttaatctgttagggctgctataacaaattaccataaattatgtagcttataaacagcaaaaaacaaacaacaacaacaaaaaaaaacatttctcacagttccagaggctgggaattccaagatcaaggtgccagtagattcgaggtctggcgagggactgttttatggtacagagattgcaccttatggctgtgtcctcacatggtagagggatgaacaggctcccttgggcctatttatgagggcactaatgtcattaaggagggttccaccttcctgatttaatcacctctcaaaagctgtacctcttaataccatcgccttggatatggaaatttcaacatatgaattttgaggaaacatagacattcagaccacggcactccctaacttcaaggtgcttacaatgtacaggggaaatagtaggtaacatatggtaaatgctaggaaagcaatcttgagagcagggacatcaaaggtatactctcttaacaaggtgacaattaagccaagtttgttttttttttaaactttggctcttttatttagaagttttctcatgtattcaacaacttgattaaaacatatctctttaatttgggatacattgatttttcataaaatataatatttttaacgtgattatcagtattgcacagtgattaaaatttgggctttggaataaacagaactggattgaatatgacagctgccactcattatctgtatcatcttggacagattatttaatctttctgaatatgagctcataaaggaatttcctaaataggtaacaagagaaggacacctcaagcagtgaaaacaagagagagcacagaagtttgagaagtctggaatgtttggaaaaccacaaaagcttgaattagctaggacaaaaggaacgtggttggaagtaaggtggagacagagagacaggtttggatcacactagaatccctcaaggaatcagaatccgcactttgttcactcattcaaaaatattaagtaacttctttatgccaagcacttcctagctgatagggattcaactatgaacaagacaaacatggctcctgccttactgggtgggcctcttagtggatgatacaaaaatcaagcaaataaattaagtgcaaactatgataagtgctctggcagtaacaacaaggcctgagatggagttgaggaaggtacttattccttctagtgtgggcaggtaagtcctgatgggtgggaagaaaccaatggcatgaagaatagagagtgtgttccagaggtgaaacagcaattgcaaacgtcaagagattggagagcctgagttacttaaatgactgcaaaggtaagctgaggtaggatagtaaaagacaatagctaaaatctataggaaccatgaaccagaagcaatctgcaagatgctccttgggatgtcttccccctctcccactctgactggtgttatcaccttttctgtacagttaatgccaacatctatacctgtaagttggacttctgagtacctgagcacttgctgtatttaaatatttttaacttaattccaatatcaaaatagttatttccctactttttctgttccatactgttccatccagtcagttaccatgtctaacaattttacctctaaaacatctcctaaggctttctccagttttccatcgtacacactgccatgattcattcttccattatgtattatccagctcttgtaggaatatctcactcccactcatgcaagcactctcctagattgcttgccaacctgcatatcctatcatatttctccattgttataaaaccctcaagatttctccacgttttaacaaattaaaatggaattcaagaccctcctaggaaggcctcccactactattccaactatatgtgaccttccttacccccaaagtttgaggattagtatgtatttgaagtttgacaccctgctgcctcttaattgcttgtcacctcagacatccaaacctcaacttcccaatctgtaaagttggtattaaaatagtttgtaccacctaaggttaaggttattgtgaggataaaatgaaatagtgactcttcaatgaataagtattcaattactgtttttctcatttaaaaacatcctatagtgaaacactaaaaaacaaatgttttgaatatatttcatattttgtctcatgtatttttaagattaaaatgttcataccgggactacttgtaaatcttaaccattccctcattaatagtgagttaaatacaatgtttaatatgtattcagttaaaaaatgtttgtatcagaactcatctaatcaaattatactttataacatatggataatttcaataataagaaaacagtaactaagatgttacattatcctatgacagcatcacaactttatcttataaaatacttatggtagagctttgtcaatacattgaaatggcttaaaattttatgctgactttgtataatgtcaagaaataaattacttgtagatacttgagaatttttatataaatcttatgtttttaatgctgaaaaaaaaaatctagctttgttttaaaacttcattgaccaaaaaaatgccaaaattgaaatgtaatgaaacatctcatttaactgcacagaaatgtagtcaggtagaggttatcagctccatttcacagatgaaaaaacaaggcttaggagtttctgtgattttcccaagaccatacgttgccaagggcagagtttatatttaaacctgctccttcaatcactcactatacagtccatagtgcatgatccccatcttcactggagtctcttaaaacttcctactaatatgaaaatagttattcaccttacacacacaggatagtagaatctatatctgccacttgctgaacttggatacattaactagactgctcagcctcaatttcctcatctataaaatggagaagataatagtcatacacttaataagttagatataattactgttgttcatgagcgtagaaatttcaaatacagttttaaaagatatacggccactaactaaaatctacatttgctagactcaaagtcagatggtcatagtagtaactgatagtatgacttcctaggctaacatttgtcatggcaatctggaaaaaaaaaagtactccatgcaatggaaagatcaagatttttttttaagagtaagttaatcaactgggcacggtggctcacgcctgtaatcccagtactttgggaggccgaggtgggtgaatcacgaggtcaggtgttctagaccagcctggccaacatagtgaaaccctgtctctactaaaaatacaaaaattagctgggcgtggtggcacatgcctgtaatcccagctacctgggaggctgaggcaggagaattgcttcaacctgggagacagaggttgcagtgagctgagattgcgccactgcactccagctagggcaacagtgtgagactctgtcacaaaaaaaaaaagagtaagttaaccaattctgtcaaaaataaaagatcttagtaataaaatatatataattgaaaaggtgaatgtgattaaaatgaacatgtktatatatttatatattagtatataaatatgaaaatatataaatattaaatgatctcattttacctccctaattctataagctggttatttctatgttttttaaaaaggaaattaaaagacaaagcaaataaatgacttacataaactgacatgtttaatcggaactgtatttggaaatgaagttaaattgacttgatattcaggcaatgccctttgtcagataatctttctgagcattagatagtttgctgtaatatggatatttggagatgcatttttcacttttgcatggtcttaggttaccagcaaatgggctggcaaaatcatgtaataatattgtctgaaaggtactgcccttaggaatgagtttgttacctggcaggatttggtctgcttctatcccatgaagttaatccaattaacaggaaagccattaaacacactagtatctacccagagctgtaacattttccacttactcacatatgtgcaaaattcagcaaactgcct

SEQ ID NO: 94085 - DNA, 118988 bp, Homo sapiens
  misc_feature (1)...(118988): n = A,T,C or G
tacactgttggtgggactgtaaactagttcaaccattgtggaagtcagtgtggcgattcatcagggatctagaactagaaataccatttgacccagcaatcccattactgggtatatacccaaaggattataaatcatgctgctataaagacacatgcacatgtatgtttattgcatcactattcacaatagcaaagacttggaaccaacccaaatgtccaacaatgatagactggattaagaaaatgtggctcatatacaccatggaatattatgcagccataaaaaatgatgagttaatgtcctttgtagggacatggatgaagctggaaaccatcattctcagcaaactatctcaaggacaaaaaaccaaacaccgcatgttctcactcacaggtgggaattgaaaaatgagaacacatggacacaggaaggtgaacatcacacaccggggcctgttgtggggtggggagagtggggagggatagcatttggagatacacctaatgttaaatgacgagttactgggtgcagcaaaccaacatggcacatgtatacatatgtaactaacctgcacgttgtgcatgggtaccctaaaacttaaagtataataaaaaaaaaagagagacattttaaagctgggtgtccggaagcgacatcacatgtcggcaggttccatgatgccccctgagccgtaaaaccagcaagtttttattagcaattttcaaaggagagggagtgtacgaatagggtgtgggtcacaaaaatcacatgcttcatagggcaataaaagatcacaaggcagaaggtcaaggcgagatcacaaggtcagggagaaactagaattactagtgaagttccatgtcccactgtgcatgcattgtcattgataaacatcttaacagggttcaagagcagagaactggtctgactagaattcgccaggctggaatttcctaatcctagcaagcctaggggcactgcaggaggccagggcatgtttcatcccttatctgcaactgcataaagcagacaacccccccagagcagccattttagaggcccccctgggaatgcattcttttcccagggctgttaattatcaatattccttaccagggaaagaattcagtgatatttctcttacccattttcggtaataagagaaatatggctccgtcctgcctggctcccaggcagtcagacctaatggttatctcccttgttcccgaacattgctgttatcctgttcttttttcaaggtgcccagatttcatattgttcaaacacacatgctttacgatcagtgtgtgcagttaatgcaatcatcacagggtccggaggcaacatatatcctcagcttacaaagatgacagggttaagagattaaagtgaagataggcataggaaattataagagtagtgattggggaggtgataaatgtccatgaaatcttcccaatttatgttcttctgtcacggcttcagcaggtccctccgttcggggtccctgacttcccacaacatctttccctttctttttatataaatgtgctatggtgatgaaggcttgttcattctttcgattttgatgcaggattctttgactggtctggcacactaaagacaagtcaattaaacagagaaacctaattccaaattgcactaggctgtccccctgaaaagctgagtctttttcactacctggctagaaggcatatgagaaacggaagcaggaaattcacagaagaaaaactatacatgactatggaacatttcaatgtaatttttaaaattacatagaaaacataggcatagctagttgtccatgagttgccttgtctagctttttgtagtcattgattaatcctcactttcagatttcacaaatctcgacccactttatttttatagaatgagatcatctcttgatagaggcctttgcagtctgatcacaacctacagtaagaaatgcattctatattatgacccagtacacatattcctggacatcattgaaaggttcagaaagcaatattttcatcattaggtgcaatgtctcctgttttatattttattctgttctattgcattttttaaaatgctggtcatgagacctgcaaaacccattccatgacccaccaatagtctgaggccaatgatttgagacttttgagagaaaaacaaacttggaggactgacactgcccaacttaaagacttactacagccaggcgcagtggctcacgcctgtaatcccagcacttcgggaggccgaggtaggtggatcatttgaggtaaggagttcaagaccagcctggcaacatggtgaaaccccatctctactaaaaatacaaaaattagccaggcgtggtggtacatgcctgtaatctcagctactcgggaggctgaggcacaaaaattgcttgaacctaggaagtggaggttgcagtgcaccgagatagcgccactgcactccagcctgggcaacagagcgagactgtgtctcaaataagtaagtaaattaataagtaaatgaataaaagacttactacaaagctacagtagttaagaaagtgctattggtaaaagaatagacagatgaatggaacagaatagagagctcagaaatagacccacacaaatatggtgaaatggtctttgacaaaggagtgaaggcaatacaatgaagaaaggataggctctttgacaaatggttgtggaataaatggacgtccacatgcaaaaaaaaaaaaagaatctagatctagacctttactcaaaatggttcatagacttaaaggtaacatgcaaaactataaaactcctagaggatgacacaagagaaaatctagtttagtttgatgatgaccttttagataaatcaccagtttcctccattaaatacaatctatggaggaaaaggactgatgaattggacttcattaaaataaaaaacttctacgctggaagaaaagaaaacagaattgatattctcaccagctcctaaacaaattggcttttccaggaaaactcagttcccctgacactcctgtctgtgggcttggccagagtgtgggcatagcagtagagctcctctctcttcacccatggcctcagcaaagcccccagtgcccactttgctctggcacacagtggtctcagcaggaagccccgtctcttctgctcccaggagccacactcaggtgcactgtgaatctctttcacagtcacgtctgcacctgcagtctccctcctgcaacatgcacactgttgcgactgactgcaggccactctggcatcatgagagatggccgttgctgctcctgtggaagagcagactcaccctcttccaggaacagccttggctgcaacccatgctaccttcccctgccctggggcattacaaggtcacacgagatcagcctttctcaaccaggggcaattttgccaccaggaaacatgcaatgcctggagacattcttggttgtcacaactggggactactggcacctaatgagtaaaagccggatgctgctaaacattctataatgcacaggacagctcccatcacagagaattatacacccttaatgtaatagtgctgggatggttaatgttatgtgtcgactgaagtgggctaagagatgcccagagggccagtaaagcaggatttctggttgtgttcatgagggtgtttctggaagagattggcattggaatctccagaaagtaaacaagatccatcctcaccagtgtgggctggtaacatccagtttgttgagtgccagaatagaacaaaaaggtggatgaagggcaaattctttctcttcttgagctgggatatccatcttctcctgctcttgggccttcaaactcaggatgaattacaccaccagcttatctagttctccggcctgtagatggaagactgtgggacttcccagcctccataatcacatgagccaatttctacaataaatctcttcttatattcctatatccatatcctattatttccagttttctggagaaacctgactgataaagtgccatggttgggaaatcctgccctagatttctttctttggtcctcgaagcctcacccctattccccataaatcccacacctgcaagaagaaaggaaatgtaaaaagagtcccttctgggaacggatgctgattcctatgtagatttctctattgagagataactgttgctcagtagttggacactactagttcacttttttgaggatttcaaaactgaggtctctcttctctatggatgttttttttccagtcctattgcttcaaatatcatctaaacactttcaacccataactttatttcctgtctgggcctcttttctgagctgtactggacatctcaaatcacacgatttgtggatatctgaaatttaattcccaaactgaatccttggtgtccttcacctccccacacccaatactggtccaccccagtcttcttcctctcagtctatgaccgtcatcccctgcccactggcttcatcactgggtagtcgttccatccccttgactcctccccttgtccagcaacctcctaacatgcacacacacacacgcacttatggggaatattagcacgcttcttcatctcaagccccccctccctcccccagcccatctcctagaatggattcacttgaattcactcctggtttgcaggaaagtgcagaaatccaaggaatgtggtgggaattggtggtccaacttaaagggtctaaccctttcacccttatctccctctgatccattttctaccccagagccagagtgatcttaaaccataagtaagctaaggttactgctttctagaaacacttcaatgccttctattacagttggggggatacaaattacgtaacgtggcttgcaagactccccctcccctactttgaatggtccttaggagttggccttctgtcagggcctgggagatgccgagcttgatcctcagtaactttgcagaggctgttccctctttggagcccttccctcactcttccccttaccaaggacaatcacttcttcggttctcagctcctgtgagaccccaggcgggagcatttgggtgtgcgtcattggagggctcacttgccattctttctcttttccctctttcctccaatggctcctgtggaggttttgagactcctcaatgtcactctgcttctctctccagttccagtcctaacaataggaaccctaggtgccccgccccagcctgctccagtcccctaggatagagcaaggagagctcttccctgcatctagcctgtgacaaatggctctagtgacagccctctctgccttgtttccagtcctttaatgagctgcccgcagccagcctcactctcactctgctcttcacacccactgagccccacgcttggagctgctggggtctgccagaaagaccagctcctaagatccctgcaggctgtgcctgctcaacttctcaatgtggctttctcagccctgctttgtgctctcataaaattctatcgactttggggtttttttataaatttgtccaaattccactcagagtattgtttcatgcatctcaactatgattttgatgggtttggggaaggaaggtgagttcctgggttctgctgatatctgaacctggaaatcttacccatattgctgagtgctgcaccgggaagtgcaggcttactttggggctgccttcaggggcaggaggctgtgtgcaatgcaggcatcacctggtgcagggctggaacatatcagatgacttaatgggctccaaacttgaaatcagggctgcttagtaaaagatgggatgtatgtagaattacataagaaagatccaagcttccaggatttggaatgaaacagtctcttcagaatgtgctctcaggattcccagaggcgagctatttctcaagatttccttgacctttgtcaccatcaggaattaatgtttaactggcacatgtggctggaaatgcaagaagagggaaacgtgtggcttggagtttcaagaagagtgactgtctcagtgccgagtgcctcagcagcttctccacatgctcttcagtccccaaagttggagaatcccatcaaggagagtagccctgtaaggaattcgaatttccagcatgtaagtctctgattttatacctactcagattgtagtagtggaaaacagcaacatgtaccttgactctctggccccatgttactgaacatttgcttaaaggttaactcacttgagggagcttgtgtggtgctttctcttctgctgcaggctggcaggggtttttgttcagtgggggctgtgcacttkgtggctctccatgcacacacagtcactccagtgacacatgtttgataggtgctgggaatgatttcatgactggctcagtagcaaatgcgggccagatgtgattctattttttccatgcaccaccagggatggtgttgggtattttattcccccagcctctgtttcttctgtaaatgaggattttcttagtatctaccttgtgaggattaaatcccatgattttatggaggtgattagtaaatgtgaactctgcccttccctttataacatctgaggctccgtcagggctctctccttttggtgtatgttatagtttacttagaggtcaatttggtgtctacctatgcagtgtgatttgaggagaattagaagatctttcccaccaacttgccatgctgagtacaattcccatctgaaaacatatgcggataggaatttctattgggagaattgttcggttatcgacttcaaggagtcgaagttctcctggttttaagtctgttgtcggaagtatataagaatcaaagcttaatcgatggaaatcattgctctccatcatgcgtgagttaaaaccattacttctgagtggtcagtttacattgggctctgtctagaaggtttgccttcttcacctccagtcacatccccatttcacaagtgagcaaacagccagaggaggggaggaggatggcataagatcttgcagctggcagagacgaaatgtgaatgtagcccgtttgcacttggtgctgtcgggcagccaagcaatccagtgtgtaggtccagggcgacaagcgctgctcccrtggctggggtaagtccctccagcattcagccttgctccctgtgcttatctggatgcggtgtaggatgaagatgaccctatagaactctaccctggaagtcctggcaaagtggatatgtgacatttttkaaaccagggacatgttggtgctgcttaatatttaaatcataattttcagactcttaaaaattactaaataagtttgaagagacacagccatctgcctacagtgccacccctgagcttcacgccaccctggtctccaggaaaggggagagtctcaggaatattgaatgcaggtaagatgtggaagaagagcggagttttcacattttaacaaggtcaattgagtaatcaactcaataaataaataaattattatataaaatgagggctgggtgctgtggctcacgcctgtaatcccagcatttggggaggctaaggcgggcagatcacttgtgctcaggagtttgagaccagcctgggcaacatggtgagacctcatttccaataaaaatacaaaaattagccaggtgtggtggcatgcacctgtagtcccagctacttacgaggctgaggcaggataatcacttgagcgtgggaggcggaggttgcggtgagccgagatcgagtcactgcacttcagcctgggtgacagagtgagactctgtctcaagaaataataataataataaaataaaattatgaaagttttactctgccaagaatatgttgcagttttaaagatacatagagccttaaatatataaagaaaatcttggttcaactatggagagaaatcaacaaatccaccatctttaccaattatagtaaactggatgatagatttagcaaacaaaacattagtaaacatttagaaaatttcaaagacaaaagtaatcatcttgctttattggacatatatggaatcaaatacctaaaaattagaaaatacactttcttaagtgtcttaagtggcattatgcaaatgtcaacatctatcagagaactgctctcacaccaacatgttctctgactgcaattcaatccaattaattaaattagaattcaattaaaaaataagcaaatattgctatgtatgtctggactttttttttttttttttgagatggagtctcaccctgccacccaggctggagtgcagtggcacagtctcagctcgctgcaacttccacctctcaagttcaagcagttttcctgcctcagcctcctgagtagctggaattacaagtgcctgccactgtgcccagctcatttttgtatttttagtagaggtgggatttcatcatgctggccagggtggtctcgaactcctgacctcaggtgatgtgcccaccttggcctcccaaaggctgggattacaggcatgagccactgggcccggcagtctggacatttttttaatagctactgaataactcatgtatcaaagaaaaacaaaatagagattaaatactatttatacataaatgataataaaatatcagcacctcctcatacctgtgtccccctggtgtgtagcccaagccgtgtgcagggtgaagggcacacatccagggagcagtgcagccccagctccgccctgtaggagccctgtgctcagtcacccactgcagcccccaagctcctggccagtcctccctgaccagggctctttctcatgggtgcattgccaggggcaagaaagtgggagtctgtgttcctcaggacagaggagtttcagctcaagaagtgcctggctgtccagcttgacactgtcccctcccacagacctccaatgctcacggctggggcctgcctctcctctgtggtcatggctgaactcacagtgtttggggggatgagccaccttgctgctggcttctggctccccctggatggtgacgcttgggcagctcccatcttgccctctgtgcagatggggcctaatctccttactgcctccattgtccacrtggctgctgcctgcaggtccctgcacggctgctggagggagctgcttatgcacaggctgagaccaggatcccctcacttgtaccacctgccaggtccccgccctgcagcccctgcactcatggcaygttctgctgcctggaaggccgctgcctctgtcccagttccatggggatctctgctctagaggggtagcttcttccttgaaaagatgctgcttaaagtcagaggatggatggctctccttggggmatttctagctctggactgtgccacaagccctggatgtggtatgtgtatgtgtgtgtatgcatgcacttaggtatgtgtgtgtgtgcatgtgtgtgtggtatgcatgcatatatgcatgtgctattgtacgtgtgtagtgtgtataaacatgcatgcatgtatgcttgtgtatgtgtgtgcatgcataagtgtgcatggtgtgtgtgcatgtgtgtgtggtcggggcaggggcacctgcaggctgctcgtcatctgagtggaccctgttctccactcttcctcctctgcaaagcccaggcccctttcctagcttcacatgactctgcgtgcaccttcaggagaaacggagtcctgctccttctattgcacccatcaaccaggagtggggggagggggtggaggtggggaagatgatcctccctgttgctgccccatggtgggaggagagactgagcccaaaccatgttttagatgctgataggcttaagggtaacagcacaggagtttgagatgcatgcggctcaacacctaatctacatctcacttcactttctcatctggggaagtgggcttgggaccctgagcctcccgggtatcacagggtcctaatagtccctcacagaaggagcagacccagagtgagcactccccaaatgccacgccgtcccttcctcacccttggagtggagcctggtcgttctcaaagttgctgggagagtcccaggagccctggccccaaatctgcatcctacacagtgcctgggaacacagggcccattttttccttggcctctcgccagtcccagcaggccctgatgctcctctccatcctgctaggatggctctctccccctgggggcagagtgggggcaggaggtggtgggagggtggagggatgctgctcagtaaataatgcagagccggcagctctgattggcttcggggaggcagacactctgtctacataaatggcaatcacatcttctgtgcctcttaactgtcactgtggagaggagagagagaggacagagagcaagtcactcccggctgcctgtgagtactgctctttgtcctcatggctcacgcgtccagctctctggatggccgtgaccctggggtttggggtgggaggtttgccggttgattctagctgtgctgaattctcctcctgcaggaggaaggaggttcggctgacagggacagctgagcattcagtgtgtgcaggtgacacagggtttacaggaacttttcaagaaaataggcaccaacctaggtcggcttgcttttttgtgctatctgcaagcaacaggtcaggcagagaatctgaaactttggattgctttttaggccacattcctagagccatgacagcaacataactaagtgagtggaaattattttccagactggctcatgtgcatgtagagaccgtggaggccacacgatgggtgggaaagaaggaggctatgcagccccacagactcaggtttgcattcagatgcacacctccctggccgcctttccttcctcagacgtgaaggagaggagctaattaacagcatcctcccccagatcatagtaaaaaccaggtttgattttataaaggggcgggcacacaataggtgctcaataaatgagagctctattgtgaataagggaggaaagtgtgaggtcactgaaaatgctgctgagtggtctgctgcgccctccacagcctgttttcttcagtttccaagcgaaattcaggcaggtgacatgggttcttcccacaagcttgtttctctcttgaagactccaagggcgaggctccttgcgaaaatttctcattcagataagcagagtttcccctccaaaaggtgacaatcactgcacaaaagctggtcctctgttggtttgtcaagggtgccagagaaaaacactccttttgctgggggcaccggagtcctgctggcagcgtgcggtgaccccagactagaacacaggcatcctggatggctgaccacagagcaagttaaggggtgtctggatggttctgaaggaaacaaaatcaagccattctcagcagtttcttttcttcctgtcttctgggcacacgctaggtgggcgtctacacacagccagtgtgaagaaaataattaaaataaatcccccttaactccccttgccacaaattcaaagagatagcctgggggatctaattacttttgttttctgctcttcaagatgttgattattctgaaggttttactttcagacactcaacttgagtcagcagttaagtttagggaacggctctaggaaaaccacactatgcgggtattttaaaagaagtgttctgcggctgggcgcagtggctcacgcctgtaatcccaacactttgggaggctgaggcgagtggatcacctgaggtcgggagttcaagaccagcctggccaacatggtggaaccgtatctctactaaaaatacaaaaattagacaggcgtggttgtgcgtgcctatagtcccagttactcagggggctgaagcaggagaattgcttgaacccgggaggcggaggttgcagtgagctgagatcatgccattgcactgcagcctgggcaacagagcgagactctgtctccaaaaaaaaaaaraaaagaaatgttctgatgttttgtgtttrtctggtgcttgttggcatttctggaggaagacattcagggagcccagaggcacctcgtgggcatatgggacagcgatgggcacaggacctcrtagaaaaggttagaatcccactgtgttgagagacagcagagggtcctggtcttctggtttgtacagaggcaagtgtgaaagccatttctgagctgtgcgggctgagaggagctccgtgcctgctgcatgcttccctcagcctcttcgcattgctgtaaaggggatcaggctgctactttgcagagctgatgtgaagtttaggaggatataggtaaagggcttacactgctgccctgtatatggcaactattcaacatttcttctgctttggaggaggtagaggagaggcacttctcttggggcatggagggcagcagagtttgttgagcctctgcctgtttctgttgggatcagcccaggtgggtggaggcagacgtgtgtctgcgggctcagcactcccacccgaagccacattcccctgttctctcatgtgcagtgaaccaggcaggagccctggaccacactctgggttgcaggcaccaccttccccatccccagtgagagccctgtttagagtcctgtggtctcatctctggccatggtgaggacacaggcagctgacagtggaggtgtaagtggattcccaggccaaaggtgtgttaggaaaatgctggcttcagaacaccagcacccactccttcacttactggctgtgtggctgtggtcaagttaaacagcaataactctactggcctggcagtgttgtgagcgtgttcagtgagataatgtataccacgagcttatcaggagcttgagcactgctgatttgtttggtttcttggacaataggatgtggcaaccaaagttcaacagattctcaggattttttcttggaggggggcacctcaagtgcaggcttcttagcaacaccaggccccaggccagcagctgttcaatatgaggaatagggaagcattcactgtgaatgtagaagtcaatatttaccaccaaattggctcataaggactccccaaagagtgtaccaaagcatactaaatagattcacagtgcaggtgtcctgtgtttgtaatagacggtaaaccaggacatgtcatgggcactggatattatgactatgatgaaaagaagcaaccaactagaacataattcgaattgtctcaagccaatagcaaaggcagatggttatgatctcttgtgaactattaatgtgactgcaagagaaagggggaaagaattgagaaaaaataagggaaaaaatttgtaagggggggggtgatttctgaaaagtttcttctgacataactcttcaataaaatgaaaacaaaggagaaaagttaaaattacctagtagttatcatataaactttcaaaattagcaaccatgaatgaaaataataaaatttgaatgttttaaggtttaaagttaaaatgtgaatgaaggagcaaagcttacagagatggagtgtctatgctcaatgcctgatggtgggtgacatttctgtatcattccagtttttcaaaaagaaattgacaacacgcaaaaagaactgtacaactcacatgtctcaattccactggggaattaatatctttgagagacagacccaataggtgcgacctatatggtgatggtggggtggcatctactcatgacggtgctgcccataacagcaaacagctaacaggcaaagtggggatggatggtgtcataggaacacggtgaaatccccactcagcagcccttaataagtgcaaataggagcgttatgttaaggaaattctgcaccttgtaattaggcataaaggaaaaatgtcaagtgaaaaaaggatccccagtcatacacacatcctcattccaactatttgaattgtctacggtcaggactaaaatggaataatatcaatcagtttcatgtccttggcattcttttttgtctttggaarttgctcaagttatgaatttttccagccagcattaactaaggtcacagmatggttacagagatatgagtggaagtagcatctttccatgggaggaaaactgaaaaccaagacaaacttctctatggctcctttycacggataattgttggccaagaatctactttgacagagcattgtttattaaacagggaatgaataagaaacagctgcacaaagctccttcctccttcatgtcagcagaggagcaaggctttcccctgaattttgatctttgtttgttgtagaaaatttctcccttttctcttatgctacctcaggagaagaggcttctgcctgtcttttgtagcatcaataataataattgctagacacaggtttacagtccaaagtgctctctgcctgcatgagcttgcggccccattttataagtaaagaaacagactcagagactccaagacgtcagccagcagctgcatgcctcttgccgcagagctatgggctcaagctgttttctctgaatgcaaatccaccattctttctattcttcatgaggaggaggaggaggaggactgtcctgtggaattgtagtgctgaaagcwtagctccacttgattgtggcagttccattttccaacgcagaccaatctcgccaaggaggccagctgggcggagtgggacttaggacccagtgcaaagtcccttacaggagttcctttctggacagaaactcccttgagatgatggatttgattcctcctgaatttgcacaggtgtggagagtgaaatgctatgcttcgagcatctactttgtaattatcttgtactctcttcatggttttgtgtggtgcctaggatgatggccatggtacagattgcaagtggagctgcaatggagtggacgtgtgtgtttctcccaacattcctatgttgaaatccttgcctgcaatgtattaggaaataggaactttgagagatgattaggtcatgaagtcagagccctcatgaatggaatgagtaaccttataaaagagaccctagagagacccatcacccctttcaccatgtgaggacatagagagaaggctatgtctatgagaaacaagcctcaccagataccaaatctgccggggccttaatcttggacttccagcctcagaactctaagaaatcattgtctgttgtttataagctgcccagtctatagtactttttatagtagcccaaagggactaagatagggggcttggccacggtctcacctccagccaagagctgcccaaaccctttctctttctggttaccatttgtaacgaacatgatctataagcaaacaaggcaccgtggaagctgcggtgcccctgtggtcctcagtaggcattcgggaaatcattccttgcagccctaggagaaactggtattacaagtttctaatcctgaagttacttaagccatgctcttttcatcaactgatatgcatctggctacagctgttagagatgctctgtacctgtgtttgagtccaggacattctctcaggtgccttcaggagccagactgcaggaattcaactgtggcctcatctgactacagcaggtgtggagtcttggttcagttgtgcagcctctctgcgcctcggtcttctcatctgttaaasggagtaatagtagtcctgacaaggttcttatgaagattaaatacgagaaccaggcaaagagcttaacgtggttcttggcacatgtaagttcatatcaatgttaactattttttagaccaatgagagagtgcctatttaaacaagaacacccgggtttacataaaartagtggtacaagtgtaagacagtcrcaagtgtgtgtgcgtatgtgtgtgtgtggtgccctggctttattgtgtcaattataagtagagacactttggcctacaggatgaaggaaacaggggttctgccttggctttgctgcaaccagcttcacacctgggacagtcctttccttctctgggtcccaggtccctcccttttaaaatgagcatagtaatagctctcaccaataaagcattaaaggagctaagatgtcagcctgtcctgggtctcgtttccaacagatctcttgtctcccccactgactccaaaccacacaagccatgcttctcaggaacccaggacacccggattgtggtagggttctgccaatgggaggtttagtgggaggctcgaaggcagaggtaccaccatccccgtgacactggctcagcctcctcctccatgcctgctgacccggcaagcctgacctggtggcagctttgcacggacagcctggatcctggttccaggagcacagtctctcccatctctccatccgagggatgggagtgcatcatattggccatagagkttacctgagcttcctcggttacctaaggtcacccagctaataagccttggagataagaygcaagccgagttctctggatccagagtccacccttctcccccgcagygccatgctgcctcccagaacactttatgttgctttttacccatgtgaggaagtctgtgatgtttctctctctgtagttgagaaaactcatgtgctaagggcctcagtgacacagaatcttcatgactttctgaagaatgctgcgggaacctggggtcaatcatgtagaataattggctttgaggaccacagtctctgagaagagcagttgtatggaaagtaggcctgagcactaactctggctctagtccctgactgttatctcatcaaagaatctgacaaatctgtcagcgctacctaagtcttgtaagctaaaaaaacccagcagttgcaaaacagtggatttccagtttgtaaacagatgagtttgagagctgtggaagagaaatacaagtgaagataatgtgtcctagaaagggagraaggaaggagctgaggaagccggcctcaaaagcctcaaaatgaggccacttctgcccagttaataattttattttttacttaaagaaaattaatagactttcacggcagtttcaggtataaaggaaaattggacagaaagtagagagtcctcatatttcccctctccccctgccccccacagttgccctattattaatgaaaacattttactgaacactgactctgcagcaggctctcaccccatcatctcattcatcttcccagcagcactggagggaggtatttgcatgcattcttgctttcacagaggctgagaaggagcctcagaaaggggtggaggttaaaggtaacagagtaactgaaagcagtgactcttgacctcaggtctgcctgacacttggtggtgtagctggaggccacttgtgagcggatttagattattcacgtacctcctggccactgacaaaaatgctcatgtaaagcttcttagtggcctgttgtgtaaccagagtcttaagggttaaagaaagaacttagaggatgtttttttgaggcaagtttatcagatagccattctcctgtgattaaaaagctctcatggctagaaacttctttatggtcttgcttggaagcatttctcctactgaatatttttatggtctttgaacccacagagaaaatgtccatcaagaaacaagtcaggctgggtayggtggttcacacctgtaatcccagcactttgggaggccaaggyaggcagatcatgaggtcaggagttcaagaccatcctgaccaataaggtaaaaccccatctctactaaaaatacaaaaattagccaggtgtggtgacgcacacctgtagtcccacctactcaggaggctgaggcaggagaatcgcttgaacctgggaggcggaggttgcagtgagccaagatcgttccactgcattccagcctgggcgacagagcaagactccatctcaaaaaaaaaaaaaaaaaaagaaaagaaagaaaagaaaagaaaaaaagaaagcagctaatccagggggaaatcagccaaattagtgttgtgcctggatttataagtatatgcttgagggggatagtgagccagagcctcaggcccaaaagcttacgtgttttctgagacataaactatggctcctttttactggaatagtgtaaaaaatgtcaaccctatttttttcatcaggatggaaaaggaaagtcaagagaggctgaacaaagtctccagtatcccggtgtttgcagcaaaatcatgtcttgcgtgcatgaacaggcagtaccatggacagatccacagtgcatggttgccatccccactccgggcttgtgaggaatccactacctcacatgcacagtggcgtggatgggcttgcccgtggtgctaggggcctgggctgcattctcttcagtggctgtggcagagaagtcctaagagtgaaattgcagtgcccagactgcaggacacttagtcaagtgctgaacatggagggctagatgttgggcagggactgagacaggagatggcacaggtggaagtggtcaagactcaatggtgggaggggctgtggctcctgagccatagtgtctcctgtgactcttccttgtggcaaatatgtgaggggctggtgatttgaattgtctcaaaggtagagagtagagtccaatagggtatattacagaaacaaaatgtctagaggaccaaatatcattcattcattcatcattcagcaaatacctacagtgctctctgttgtccagggcccctgactggtcctgcaaatgcaaaaataaataagttgaggaccctgcttggagaagcccaccattagcaaagggtgttattgaaatgttgcattacaacaaaataaccccacaggtcaakcaggaggtctgagggagttcaggggagtccatctcttcttgaagcrtgtggggctggagatgagctctgactgttgctgatgcaaaaagacattgagccagaagtccagggaggcagccagctcaccgtgcacaggcaatgcaccacaggggctgcatggagaatagcgcagcatggagaatagtgtggggtagagaatagtgtggagaatagtgtcgtgtgcagctgctggaacactgggcagattatgtcarcagaagctatttcaagggcctggagaggcataagccacagcctttatcataggctaagtcttccagctaatatttacacagcttgggggcataaaatatcaaacagctacaaatgagcacaagattctctgtggcttcatgctaagagccttctaaaaaggtctttgtgggaaataatctgtgaataaataacagagaataatttaaaatataagaaccaggtcttactttacactttgactaggaatatttcttttggtgtatgtggtatgtgtctgcttgttgtgtttttttattccagagccacatgctttggcctggtgctgtgacttaaagctgatayccccagaagctgagcgtctttctgaatctttcccagctaccccttctgagtcttcagcttgctgcctcacatgtgtggccccccaggagggcaaatagatatagctagaatatttgcttcaaaaggcattgctaatagtcacacatcaggtacaagtcctgaagaaaagattatgagatttcactacataaaaattgacattctcataggtcagaatagaattataagcaaattgggtccaacaaaaatgaggaaaatgcctgcaaaacatttaacagacgtaagagtagaattattagtatattagaactctcacaattaaataggaaatatctaacaccctagtggaaaagaatgcagtgagcaagaaattcagtaaaaaagtaatccaaatggcaaagaaacacacgaaaaagctattcagtttcattagtcaaagtacaatggggccgggcgcggtggctcacgcctgtaatcctagcattttgggaggctgaggcgggtggatcacttgaggtcaggagttagagaccagcctggccaacatggtgaaaccctgtttctactaaaaatacaaaaaaaatagccgggcatggtggcatgcgcctgtaatcccacctactcaggaggtcaaggcgggagaattgcttgaacctgggaggcagaggttgcagtgagcccagatcacaccactgcactccagcctaggcgacagagtgaggccccgtctcaaaaaaaaaaaaaaaaaaagtacaacggaatcattaaggctggttaaacttaaaatggatattcaagcccrgtgattgtatggtaaaatgagcattcttatacatgttttaggggaaaatttggcaatatattttcaagacactaaaaatatttatctctagaagaatttgttctaaataaattataaaataagtgttctcctttttataaatttttaatgcaaaagaaagtgtgcagaaacgtaaacaagaggttgcacattttaggattatttggaaaagctaatagctgacatttattgagtgctaatttgttaccatttatttatttagttgttacacraagttcttcaaggtattacgggcatacctcttgtgaaaggaaaatatcttaggccctttcaagctgggaaccactcagggaaaatctgtctcccattctattcaagtcatccctttgctcacagagatagatgcatattttgattgccttctttagaaagacttatcagaaactcaaaagaatgcaactaactgtatctcacctaccgtgacctgggagcccacagcgggagggccttgctttgcactgtctcacctttctggatggaactaatgtacttctttcaaattgattgatgtctcctgtctccctaaaatgtataaaaccaagcttggccacatgtyataaggacttcctgaggctgtgtcacgggtgtgtcctcaaccttggcaaaataaactttctaaattaactgagacctgtctcaaattttcggtgttcacacctcagaaatattgcaaattcagttccaggtgaccaccataaagggagtcgcatgaattttttctctccagtgcatacaaaagttctgtttacactatactgtagtctattaagtgtgcaataacattatatataaaaagtatataccttaatttaaaaataatgtattgctaaaaatgctaacgatcatctgatccttcagcaaacataatctttttgctggtgcagggtcttgcctccatgtcgatggctgctgactggtcagggtggtagtacctgaaagttatggtagctgtggcaattccttaaaacaaagtaacaatgaagtttgctgcatcgatcaactcttcctttcatgaaggatgcctctgtagcatgtgatgctgtttgatagcattttacccccagtagaacttctttcagaattggagtcagttctcttaaatcttgctgctgctttagcaactcagtttatgtaatattctaaatcctttgctgttgtttcaacaatactcacagcctcttcaacaagaatagactctatctcaagatgtctttgctcatccatgagaagcaactaatctgtccaattttatcatgagattgcagcaattcagtcatatcttcaggctccatttaaaattctagttctctatttccaccatatctgcagtgacttcttccactgaaattttgaaacttgaagtcgtctgtgaggattggaatcaacttcttccacctcctgttaatgttgatattgtgacctctttccatgaatcacaaatgttcttttttttttttttttgagacagagtcttgctctgtcgcccaggctggagtgcagtggtgtgatcttggcttactgctgcaagctccgcctcccaggttcatgccattctgttgcctcagcctcccgagtagctgggactacaggagcccgccaccacacctggctaattttttttgtatttttagtacagatggggtttcaccgtgttagccaggatggtctcgatctcctgacctcgtgatccacccgccttggcctcccaaagtgctgggattacaggagtgagccactgcgcccggcccacaaatgttcttaatggcatctagaatagtaaattctttccaaaaggtttttaatttactttgctgaagttcatcagaggaatgactatctatggcagatgcagccttatgaaatgcatttcttaataagacttgaaagtctaaattactctttgatcaatggactgtagaatggatgtcgagttagcaggaatgaaaacattaatttccttgtacatcttgctcttgagtgaccaggtgcattgtcaatgagcagtaatatttttgaaaggaatctttccttctgagaagtctctctcaacaatagtcttcaaatattcagtaaaccatactgtaaacagatgtgctgtcatccaggctttgttgttccatttataaagcacaggaagagtagatttggcatagtttttaagggccctaggattttcagaataataagtaagcataggctgcaacttaaagtcaccagctgtgttaccccctttgagagtcagcctgtactttgaagttttgaagccgggcattgacttctcctctctggctatgaaagccctagagggcttcttgttccaatagaaggctatgatgtctatattgaaaatctatggtttaccgtagccaccttcatggattatctttgctggatcttctggataacttgctgcagcttctccactggctcttgctgtttcaccttgcacttctatgtaatggagacagcttctttccataaacctcatgaacaaaactctgctaacttcaggcattttttctgcaactttctcacctctttcagtcttcatagaattgaagacagttaagaccttactctggattacgctttggcttaaggaaatgttgtggctggtttgatcttcaattcagaccattaaaatactctccatatcagaaataaggctattttgcttagcattcatgtgctcactggagttatacttctaatttccttcaataacttttccattgctttcatagcctggataactgtttggcttcacttttgacctggctcaacttttgacatgccttcctcactcagctgaatcatttctagcttttgatttaaagtgagagacatactacctactcttcctgtcacttgaatacttagaggccattgcagtgttactaactgacctaatttcaattttgtcacatcttagagaacagggaggcccaaggaaaggaagaaagacaggcgaataaygggtcagtggttcagtcagacacaaatttattaagttgaccatcatgtgggtgtggtccatgctgtcccaaaacaattacaatagtaacatcaaagattgccgaccatagatcactataacagattaataataatgaaatggtttgaaatattacaaaagtttctgaaatgtaacacagagtcattgagtgagcacatgcttttggaaacattgtgcctatagwcttgctggattcagggttgtcacaaaccttctatttgtaaaaaatgcaataaaacggggtgtacctatactattattgtcacgatttttgttgccagttaaagaaaatgaggtttagcatggcagcaatttacgctgggttgtacagctaatacatgctgttataatagctaatayatgcgattatgatagctaatacatagaatcagggtgtgactcgcagtcctttctttggctctcggtctcggagtgtggccactgggatacaccaatgcttcccactgtgtgggtgaaaattggaaataatataaatgctcaacaatagaggtacatgttgtgaatatggcacattcacattgtgaaatacttgtgagaaatcacacaatagaaaagtatttatcgggcaggtgcggtggctcatgcctgcaatcccagcactttggaaggccaaggcagacagaacacttgagatcaggagttcaagaccagcctgaccaacatggcgaaatcctgtctctactaaaaatacaaaaaaaaaattagccaggtgtctgccaccatgccctgtagtcccagctactcgggaggctgaggcaggagaatcacttgaacctgggaggcagaggttgccgtgagccaagatcgcaccactgcactctagcctgggtgacagagcaagactccgtctcaaaaaaaaacaaaaaaaaaagaaaaagaaaagtatttatcaacatgagaaatgtacttagaaattagtaaagaaaaacaggctagcaaaaagatctgcagtgtgataccatttgagttaaaaatttgagtcatattaatttgaaatacttccacttgaggtgaaaaccaagtttcactgtatgtgcaaaattaaaaaaaaacagtcacttcaaactaaaaactaatttcaaagcctgcaggccccaaggaattgtaagctggctgctttagcacatggccwtgatgttttgctggtgaacaggacactccttggtcgttggcttaagaagcacaaaggtgcaacagaacttcagacagtcattgtggttgttctcatgcttgttagtttggcatttgctgttgctataatctagagtctaatcttacgtctcaatcactgccactcaagcactcactagctgagaaatgcatcctcaaacaatagctttaacatgggggctggatctaataagccttgaaatgacataaaaacttctgtaactgttcatttaacagagaacatggaagtaaaaatattagagagaatgccaatggaaggaaaagcacattctagcaggtttacctttgtcaaagtaccttgaccaaacatcagccaagctcctctggcccaagggggaagagcttagccaagtctcctccttggccttctgagcacaactttgatgtccaatcaggctcatgtgcttccacttytggtatctcatccagagttcctttttcccctccacccttgatacttacccaagttcctcttagtaattttccacccagggaccctctcacctgaccrttggctgtaagtccctatgtgcccctgttgtttttggaattgagttcagcccctccccttttgcaacattctatccctattgcagtggtcttgagtaaaatctgtcttgtcacttttaacaagtgcctggtgaacaatttttctttaccacctttaacctcacaaaaattgttaaaaatcccagcatggacaatgggaaaatagagaagtgctggaagctgatagtaaggtcatcaccattgctaataacagtgaatttagagtattcctaagcacttaactcccatgggaaaatttatcttaaatttgtcctggagccagctataaatttgaatcctatttctgcaattactggtcatgtgatcttgggcatgtcacattgcctctctgagcttccatttcctcatctacaaaactttggagtatgaaaaagatttgaaaatgcatccctatgcattttccttgtgccatcctatgcacaagacgtgccttatggagaaaatacatgtgttagagaagcttccccagacaggagttacagtgctgttggctgtgagtccatccctagcatgcaattgtctctcataaatagaaaatattctagaggctgggagcggtggctcatgcctgtaatcccagcactttgagaggccgaggctggtggatcaccagaggtcaggagtttgagaccagcctggccaatgtggtgaaaccccgcctctactaaaaatacaaaaattagctgggcatagtggtgggtgcttataatcccagctactcaggagactgaggcaggagaatcacttgaacccgggaggcagaggttgcagtgagccgagatcgtgccattgcacttcagcctgggcgacaagagcaaaactccgtttcaaaaaaataaacacataaaataaagtaaaataaaaattctagaaagacatgtgccagaattttgggttgtgggattttaggcttatctttttctttgtgttgttcactgtcctgttttgaaaatacaattgattcttattcacatattccacctatgcaaattctcctacttgctaaaattcatttgtaacccccaatgtcaataaatatcaatactcatggtgcttttgagaccactcagggacgtacatatgtgtagcgtagtggagaatgtgcttgtcygatgygtatgttcccagctgaggctgaacaaagggacacactaccttcttgcgtcagctctcataatgtaaacatgtccttctctctgtctattcagtgccacatccttcacatttttatgtttttcttcttggtgattttgctgtttaaaatgacccccaaatgtggtgcagaagtgctgtctagccatcctatgcacaagacgtgccttatggagaaaatatatgtgttagagaagcttccccagacaggagttacagtgctgttggctgtgagtccaatgttaatgaatcaatatatattaaataaagtgtctcttaaaaacacatgaaaagtttatgtaytgatttgttgacaaaaatgttgggatcacgcttcaggaaattgtatttcccctagaagaaatggttcagtattcactaattcagagtttatggccatggcaactgttgtagatagaacacagctaccagcaataatgagaattgcctgtatattacttatgcaaggagggaggagagcattagttttaaaaagcagatggtgcgtaaaggtgcagttccatctgtgacagaatcaagaggagagaagaagactaagtttgagggggtgtgctgccccaggctctgagctgaggctcgtgtgcattgtgtgactgtgccttcatgccctcctgagaggtcagcatcacagtcttcatttcncagatgaggagaggggctctaaggggcaagcttgtctctttcaaaggcaggtaagggcagaggcaggacttggaccagtgtttgtcattaaagttggaatcgatcawgaaaataaaygtgtgcttctagtctattgaaataaagcgacgttgtgttgttcccagttgaatagctggtgaagaggagaagsagcttttgcctcagtcccaaatccagtgccatttctacctcctacagacatggagggaaagcgccccttacttgggatccaagtggcctccagggcatgcagtcactgcccaggtgtccctacscacggcttgcttggtatcccygccttccagttcagaggttgcaaaatttgctcactgaatcattttctttctgcagttttcacctctgacagagcccagacaccatgaacgcaagtgaattccgaaggagagggaaggagatggtggattacrtggccaactacatggaaggcattgagggacgccaggtctaccctgacgtggagcccgggtacctgcggccgctgatccctgccgctgcccctcaggagccagacacgtttgaggacatcatcaacgacgttgagaagataatcatgcctggggtaagtgtgtatccaaggtcagaaaacaggagggctrgaactcacatagcacctacttggctctgagcaattcacatactttgtttcaaggaatccctatggcagtcaggttggagagaaattttgtcatttctattttacaactgaggaaactgaggctcagagaggttaggtggtccacctcaggtcacacaggtagtacacgatgaagtcaggattaaaatccaaatccaagggcagtgaggctctttcccccaggtcccctgagactcagtccctgcccagagacactcggtacatagagcgtgtcctcatatacattaggaagcaagacactggtggctgctttcaaataagtcaattgccccaaataaagcacacttccaccatccttgggtttagcaataggtaattagcatatgtggaagaaacgttttctttagtttatttgagagtgggcagtgtggtgctgcccaccaaggcagccctttttctctgaagccagtaggcctggggtacacagagggcagaaatcagcgggactggctgctgtctccgatactcactcacagggcagcagagttggagctcagagaaamttcccttcagctttacgcttccacagtagattttctctgccaaggagttcacctaaaagcctgttrgttaaagtggctctggcctagtcagggtctgggtgggagttgcagcccggccagtttctagatcacgaatgtttatgaggatggccaaacctgcccttccatgcaacaatgtgcagagtccaggcagggaaaatctccgtgggctccactggttgatcactgccgcgacccagcaygtctgtggttgtaaggcctatgagcaacgacatgtgattttcatagaagaggggtctgggaccatcaagacccactccctcaatgtagacagaatgccaaggccctgtgaaggcataaggtcagacaargttacagtccactgatcatgggttgagamtaggcctcaggcccyggacctcagggactggtttctcagtagctgagygcctctctcaccacactgctcacatttcttcttccaggggattctcacttggcatttatgctttgagcaaagaacaggattcaggttcttctagaaattgtgcaagtacactaagctgttcagcataaaaccctttgggagaggtgtggctaaatgtcaggcagtggggagtacaggagagtaagggaggatttgaagtctttctgcttccttctatgggggcattcactgckcagagctgagctgggaaatgcacaggcgttgggcaaggtccctgggtgggagctgcagcccacgaactgctggctgtgtgatcgcaggaaaccaggtgagctctcgagccgtgagcggagcaagtgcaggcccagccatctcaaaagttgctgtgaatatcagcggagagtgaagcaaaagagcacacatctgtccctaatcaagaatcgcttctgtccttttccagcccagaggccacaggaaggggagagagacaaaggcacatgggccctccaggtgcggaggggctagtcagccacagggctgctcttaaactctcctgggccccgggcgctttgtctttgtcggctccttcctccctagaaatatggaaaattatgctttacaaatgcattggcataaagatgaatatattaacatcgattttttttctttaacctgaaagttcactgttttttcctcctgattacagaagaaatttaagcattttttcagcccctaacagtgtcgtgggcctggacctgctgtgctgaaggcatcacagcctgtgcagctcctctcggcctctcagcctcatcaccaacctcccacacctgagcccccaagcctagactgtgttagctccctctctccaccactccccaagccctggcagacttggggtggccgtggttgttaaataaaccttactgaacactcctagttcttggtgagctctctcagttggctgccttcacaatcagagggggttgctcatgctacatcttagacaacatatatttaacgatgagtgctattgagaaataaatgtttgcatctcttctcagattgtaagagatatcttacagatatcttagcttggactgctatatcaaaggacgtagactgggggcttaaacaacattgatttctcacagttctagagacaggaagtctgagatcaagatattaggttcaggtgagggctctcttcctggtttacagacagccgtcttcccagtgtgtactcacgtaaccaagaggtagccagctctctgccttttcttatgagggcactaatcccactgttggggggcactaatcttattaaggggaccccaccctcatgccctaatcacctcccaaagacgctgtcccttaatgccatcactttgggggttaggatttcgacgcgaatggtgtgcagatactcacattcagagcagagcagccaagcccgatagagcatatcctctgctgctgggattctgagccagacctggaggaagcatcagagcacgtgctttcattttatctgaagggatgacagggcccagggaggtgcagtcagttgtctggggtaacccagcaaatcagggttcctgctggacttgcagtccaggggtgctcccaacaccatgctattcccacaggcaggatggacatggagcaccagcaggggacaatgcggaacagggcaatgtctctcagaaaccagtgcgtggtcacagcctgagaggggtctgaatggcaatttctataccttctccatgcacaggggctgagggttgtcctgagggctttaggactttattctgttccttcagggcaggtactgcattggcaggaacaaattaaagacccaaagactaggctacacctgctccttctctgtcctcccctgatcgtcctcccagactccaagatgtttgaggctggccccttgttaccattgctaaatgttccctgcctgggtgtccaccacaacccttgcctcctggatcctgaaaccccctgtccccaagtataccacctggagctgtcactaccccttatggatctcctccctggcccacatgagcttttcctctgtgcctcacccagggagtggcaggtgttcaccttatgggctggagaaaggtgggatgcccctagccagggcaaatggcaaggggcagtggccaggctgagggacagcagaggtgagacatctgtggggtgatccagctgcttggctggagggaaggcctcagctcctctagaagagccaggggcagcgggaagaccagatgcatgtttgtggcttgactgaagaaacctcgaaaatccagagcttggttttttttttktttgtttgtttgtttttaatggagactttattttttagagtagttttaggaaaactaagcttttggcacaaagagatcagccttggggcagcgccttcactgacgagagcaccggagcaagaacttgaagcacagtgtggttttttgagacttcttttgttatggaaaatgataaggattttccactttattttggagatagaacttttccttctgagctagcaaatacattccagtgtcaaaaagggagctggtttaaagggagtggggacagtaaggtgatgtgtaaatgctccgaaataatggaggaaggtaatgggatggctgacatttggggaactgcactcacctaactctgggtctggctgcatctggcagctgggagccatgggggtacctgggtcccccgctctcttgaggcctggctttcctcactcctcagcagctgctctgtcctcccatgcaggtgacrcactggcacagcccctacttcttcgcytacttccccactgccagctcgtacccggccatgcttgcggacatgctgtgcggggccattggctgcatcggcttctcctgggtgagggtccggatgcacctcgggaaggggtcctggctgtggtgggatcccggggtggggacacggtacctatgcacaagggacctgagcagatggcggtgctgtctgtgggcagacgggctactgttgcagggaggagaaaggattcagcccagagagagtgcctctgagaaagtagcgattgagaacagagaaagtctcaacaactcaaagcccattctgcasaggctgtgttggaagcacttggtatgaactaacatcatggtctggggcccagagtttctgcagctcgaacctgggaatctgcatttctccaagcagctcagagaatttctatatcctccaaagcttgagaaccgcgactgcccctgtctcattccttctgttctccaccagggctgctgccyggggagaggctccaaccagcctatcagatgtgtccagagccttggagcaggggggtctctggaaaagggcctagctcctgcctgcaaaccaccagtcccaccctatctggaggtaaaatgcctaaaaaagtccctactcagaagaacggtaggcagggctggctctgcccgtgactctgtgctccaggcacagattacaggaaagatgcattcctcccaaatgcagagagcttggaggtagagctgcctgctgatggccagtgtccgagggctgctgcaccctggggagttcctcaaaagccaggggctgtccttggcctttggggtccagagcactcaccttgtctgtggcttggagccaggtggacttgtgggcatcggtctatgtggcatgctgtgatgtgtaaaggagctgtcaattaggaatttgcagcactgagccacagggcccagctgagccacctctgcttcaccagcctggcacttgctcttctctgggctggggcactggaagttgccgggtgagcaggcatcatgggccctacaggcagggctgaagagcccacagatgggctcttcagtgtctgtgctgctcctctgccaggcactggggcctccctctctgctgggcagggctggcctgggctgagcataccctctcctaaagagcattttctatcactggatattgcagcagatttcatttagctctgctggtccaaatccattctgtcccacagaggtacttggcatccatctctatctgctcattctgggacagtctgattgccctcaggccttgaagggagtgcctcactatctctcaggctgcgttgcctgatacctcatccctagcagagagcataggctcctggtagagctgggcttggccaggctcaggtagaacccagcaggatggggctgaccagaagggagaatgcactcttctcacttagatcttactggtgacgcatcgggatgttgctgtgcacatctaggcacgagaacatcttggaccccttatgttggagacttttatgaaggtggagactcaatccacctttggatggggctcaagaccagcctgttcagagagaggggagagttcatagagaaaagtcactgggagtttaaaagacaagatcaatggcttctcgggatgcccagagggtgacagctgcccagcgcccactttctcattcccttcatttgtgactacggaggaaagtccaccagtgggctttctggacccttctgtgagtgaacaaatgaatatcctagcaagcccgcagagcccatgcagtgaggctcagtggagtaaggttcattatggtggcccgtatgttccttcccaaccgctctccttgcatgattctaggtcaaacagccttcaggcctttgaatcacatctgagattgggtgattttaatctgggctttagtggaaggttaaatccccttgttactgctgacccccaaattctgcaatgcctggccctcggttaatcccttcccttcccccacgacaggcggcaagcccagcatgcacagagctggagactgtgatgatggactggctcgggaagatgctggaactaccaaaggcatttttgaatgagaaagctggagaagggggaggagtgatccaggtaaggtgggagctgtgagggccacttttgggatgcatgggctctgcacaggactgtagcygcaggtggggaaagaggcactcatgcttcttgttagttcctcaaatttctcctggagaataaacaaaaccgagctcttgggaaaatgctggctttgggattggcaggatctggattaggatcccagtgctgtctttcactcgcttccccagggcagggcactcagttccccaggcccctagctatggtaggtagcacarccgctatctcacagcaggtgcgtggaagtaacaactacagcaactatcgtttgtgtggggttccccatcgccggccactgtgcctaagcattttccaggcattaactcatttaattctcacaacaacactgtgcattttagtacccctttttacaagtgaagaaacattttaatagccctttttacaggagaggaaactagggtccagaacattaggtagcttgccccatggcttccagctacagactctgtgtggctcagagcccgtgatattcctcggaggacagcacaggtggcagatgtgaccaggcttcagaggctataaatactatttgtctttgaaccaatcatttacttaaagatgctgctgcttctatgcagcaactgaattcattttcttcatgtaacatgtatctattgagagtgactgtgtgtcagagcttacaccagggaacaagatagacaaaagacaatcatgatggaatttctattccactggggttgcaggacaaatggcactgggatgacttggacttgatgcattaaaaaaaaaaaaaaaacaacttcctagcatggaatatgaactatattgaacccagtactctcccttaatcatttttctcatgtcaagtagatgatagtctcattaggaaagcattgttaactttgggaaaaaggggcttccttttcagatattgtctttcacaaggctctgagaattggtgaaggcccattcagtggatgaggacagtgwggcacacactggagaacacctttgtgcagagcacatggccagtgtggccacgcgaaactagcaagcaagtctctccacttccagtcctgagaatgagcaacaagactgataattttatgtatttgtttctattgatgttgtgacaaattttgtggctcaaaataagacaaactgattatcttacagttctgtacatcagaagtctgacctgggtcttactgggctaaaaccaaagttgacaccttggaggctccaggggtgaatctgcttccttgcctcttctgacttctagaggcttccaaaattccttggctcacagccccatttccattttcaaagccagctgtgtcccatctttctgacctttcttttgtaaaccccaaatatctgagatgggtctcagtcaacttagtttattttgccaaagttaaggatgcgtgcctgtgatacagcctcaagagatcctgactacatgtgcccaaggtggttgggcacagcttggttgtatacattttagggggacatgagatgtaagatgtacattggtttggtctggaaaggtgggacaattcaaagcagggagggggctttcaggtcataggtagataagagacaattggttgcattcttytgagtttctgattagcctttccaaaggaggccatcagatgtgcagctatctcagkgggcagaggggtgactttgagttctgyctgtccttcatccaaaaggaaattccttatgagggaggcatgtagctttttatcttagtagctatctcttttaggaatagaatgggaggcaggtttggcctaagcagttcccagcttgacttttccctttggcttagtgatttgggggtcccaagatttattttcctttcacactttcctggtcgcatctccttgtgaccacatataagatcggaaagtgggtctccacttttaaggacacatatgattggattgggtccatccaggcaatctgagataatctctcaagtcaagkttcttaacttaatcacatcagcaaagtcaccttttccctggaagggaaacagtcacagattctggggaccaagacctgaaatctctgggaatgagggtgcattaatgtgcctaccacatccagtgtgcttcagagtcatggagggaacttgcttrtaatgcctattcctagactctgggccaaaaaatgtgaacgctaattcatccggatgacacccagattcctgaataggccacatgccgggactgatgactgccttctccatgacccacaggccctgtggccaggctcagagtcatccctccacgtgctcctccttcgcattctttggttatctctttttccatcagacataagtgatattaaatggggagctgaggaaaatgaaatgtcaggcatagtggctcacgcctgtaatcccagcactttgtgaggccaaggcaggcagatcacctgaggtcaggagtctgagaccagcctggccaacatggtgaaaccctgtctctactaaaaatacaaaaattatccaggtgtggtggcgggcacctataatcccagctacttgggaggagaattgcttgaacctgggaggcagaggttgccgtgagccaagaccttgccattgcactccagcctggttgacgagagggaaactccatcaagaaaaaaaaaaaagaaagaaaagaaaacgtcagctatgttgtaagcaaagcttcaatacgttgctgtgaaccataccattctacgtagcagcaacaatgactcagcaatgattcagcaaatgaatcatgcttcagtcccagcacaattttcttctggtcagtgagtatgcagctggagaagcctccttggccaagatcacagcaaggataggctgtcacaggtgcccttccagcgaggggagggggctactgcacactgtccgcagccagtgctctgtcagctgcactttgccttggtgagggccagatggctttctggcctctggaacatcagtcctgattctccaggggacagagggcagcagcactcagggacccagtgggacagctgcgtgcctgcagagggcgtggttttgattccaggcaagggcatgcatggtctaaccctttacaagaggcctcgatgttggtggccgacttactttttcttttagttttatacacgggacaaggtctacttttccatttcttttccatttgttcctctcatttttttttttattttgtcttgtttttagacgaagtctcattcttgtcgcccaggctggagtgcagtggcacgatctcagctcactgcaaccactgcctcccggttcaagccattctcctgcctcagcttcccaagaagctgggattacaaggcacccatcaccatgcctggataatttttgtatttgtagtagagacagggttttgccattttgcccaggctggtctcaaactcctgacctcaggtgatccacccacctcggcctcccaaagtgctaggattacaggtgtgagctgtaggagatcggtcagagtggtgggagaaactatagggaaaaggagcaggccttctgaaaggtcagaaggctctgcaaagctccatggcagaatagctgaaggcagctgttctataaccctgaggcagaggataaggagtaggtacaagggagtgtaggggaatttatcttggtcaagcttgtttgttagaagttgtccaggaactgacctcggaacatccttgcacgtgacattccctgaaaggggaacaataaatgttaattatctacaggttgtgtttgctccaggttttcagcattgtgcttgcactcaataaaagcaagctgctccagcttctcagggctgctctctggccactagagccaggcagtcacttagctgctcttacactgcatacctgtgtctgagcactcatttcctccatcggccagggtctgcaggacagatccagcagtgagccactgcacccagactgttcccctcattttgaccctccctagcatttggtgagccctgctgattcaagactcagctctgtgcagtgtggagatttttcttctactgtatgttagttattgtgggccacgtcactctttttcagggacttcaattttccacagattgggtacctcttccatgatttctctcttyctttcgatatttcccttttttgttatcttctatattttaggaagcttttcatggttttctccacatgattatgtgattatggacctggtgtggtggctcacgcctgtaatcccaacactttgggaggccaaggcgggtggatcatttgaggtcaggagtttaagaccagcctggccaacatggtgaaatcccatctctactaaaaatacaaaacttagctggacatggtggcatgtgcctgtaatcccagctactcaggaggttgaggcaggagaatcatttgaacccaggaggtggatgttgaggtgagctgagatcatgccactgcactccagtcggggtgacagagtgagaccctgtctcaaaaaaaaaaaaaaaagtcccctttccacctagatactggacattcatggtaaaaatgaaaagacacaggagctttcttgtcatattccctgtgttatttcagtatctacatgtgaatatatgtatacaaacaaaattgaaatgatactacgcatatggattttctgcatggtgctttccttatcattttattgtgagcatttcccactatttaaatattgtttgaaaaaagtattactccatgattttctatgatgcatcacaatctatataaatatataaataatacctaagatatttgtgttgcatcaaattttccattcttataaaaaaaattttggaggacaccctttaggatgaagtgcaacaatcttccaagatgatcaccttcctcctaggactctcctggctgtattcatgtttaacattcatgctccccactaaatccaaatggaacaaaacaaaaattgaagcatttctaggtcattgcatcttataacaaaaacaatttcatattcaattttttcagcagatgattcctctaattatatactcctcaaaaaaatcttatcaatccctcataatataagctgtgtctattataataagagctacttttcattgaatagcaattatgagcttggctatgttttagcctatgtcttgtgctttgtgttattgtcttcatcctcaaagtatttatgaagattgattggattatggacaatctttttcatggatgaggatattgagtcccagaaagttagtagaacatgcatagcagcaaaagtgaattaaagccaaggctagtaggaaagacaaccagagttatgrctgttacaccagctcatccctgaccataggcttgggttggtgtccagagatgtgcatgctactatgggctgcattttcgtttcattaaagacaacctcatttttgagagaccatacaagtctttagcatttgggtaggaatattcctggcatctctcagcccccgctttaacacaatcttcctgtgagcccaatccactcagtttttttctggatgaaaggaagaaatgggatctgtgtttgccaccggaagctcacccttctcagcagacaaggctgattgtctgtaattggtgaggccccaaagagcacaggagcctggtgacagcctgtgagccagcctgcattattgatcccctcagagctgtaatcacagctgtgggcgtcagcgcagtgatgcgtgtctgagtcaaatggcaaactgttgttgtgaggctggacaaatgtggtctgggaaaatggtctcttaattgggttttaaagttcttgtggaagaaaagacaattttttgcttcgaaaaaaactgaagatgaaaggacatttctgctcacggcatcagcagccagaagcgtcagaccttaccagcatcccctcctacctcctgagcaggcttgccatggcaacctttgtctgctgctatcgcacagagccatcgttcctgctctgtaccacatgtcaccctccccgtgcttctctccgcgaagatctgctgccagcaaagtgcagagagctccacctgacatcatgcttgaggccaccaggccaccctggtggcatcggggtggtgtggttctagatgtgctactgacgatttgctccttcaggcttttaaaacatcattttgttgacttaagaaggtgaattttctcttaggacatgaactaagctcccccatccccccccagagaaaagccataatgagttgtcatggtgattcaggtgattcatggtgactcatttcattagaatgttcagagaatgaacacctgcgttccaacgcttcaagcagagggtagaatttagccggggaagctgcagtcacgcctgcttgtcaagcatcagaacagggaattgtgccttccaccaggcttttcatgttacatttccaatgagaatgggtgggacatgacaaacaaaatgtgtgtgggggcagatagggggacaggaggaaatcagggacaggaatgatggggtacataggagaagtgtaagtaaggtacaatgcctgctctcagggagcctgggtttcctgggatggctgatttagctttgccagccaaaattggtttctccccttctctctcctctggccaaggtttgtaaacctggcctaaaacaatgtctaaaatcattgctcatgaaaatatagcctgaaggaaataaagtacccattttagatgctgaattaagagacgcatatatctgtatatttgaacccatccattagtgctacagaaacatgaataaatgtatttrtctttcaatattactgtcccaccaaaggatgtgggttggctcaaaagaataagtaaaagtagtgtcaaggcaaagtcaaaatgagaaatcagggtcaatgaagagagcatcaaatgttaagaagagaggttagcatttctacttaattattttattatatatttctctgtaaaaacctatcatgttataaactttttcagagtcaacaagaacctaccttcttttatttgccctttctaatgtcctttcatactggtcggtagatgggtttcttctacgacttacttaagagggaaggtgctcgctgcccctacctttctaggcccatggcaccctaaaaagcgcaggcgtgggctcactcctaaccgtgccctacctagctgctgatttggggcaagttagtgaacctctctgcacatctgtttccccacctgaagatgataaaacacaaaaatgggattatttttacaacttaaatgggataacatagcaggccctgaatccattagtttgccaggggttccctaacaaaataccactgactgggtggatcgaagaagaatttcttttctcacagtcccgaaggctgcaagtccaaaatcaaagtgtccacagggttggttctcctggggcctctctcctgggcttgcagatggccaccttctccctgtgtcctcacatggtcttccctctgtgcacccacatgtctgggggccacatttccccttctttttatttatttatttttttgagactgggtctcactctgtcgcccaggctggagtgcagtgttgtaattgcggctcactgcaacctccgcctcccaggctcaagtcatcctcccacctcagcctctcgagtagctgggactaccaggcacgccaccatgcctggctaatttttgtatttttatagatacagggtttcggtatgttgcccaggctggtctcgaactccggggctcaagtgatcgaccctcctctgcctcccaaagtgctgggattataggcaaatttcatattatcagaaacatgtcagattggattagagcccagccatgtgaccccattttcttytaattacctctctaaaaagcctatctccaaatatggtcacatctgaggtcctgggggttagggcttcaacacatgaatttttggggacacaattcagcccgtgtcattaggaatcaaaagaaaccctttaaggcatctcttagtctcaaggaaaatgcacccctattttataaacaaatgcaaatcgctctgtccgagtgaatatgaacgcagagtcaggcttgcatgctggtgccctgggccgttctcctctgatagagacaggagcagtcgtcctaggccaggctgggggcagtccatgaggagaagctctcacaatacctggygcagggaagtggtcagaaatgttagctgctgctgttacacaaaatagacccaccaatggcaaactcataccaacagctgaagtggtggtctcaggtgtcaaaaatattagttttctcctaagcaaaggagagtgaattttgccatttcagactcatattttaagaaaactatggacacaaaacaatatgtcttccaatagtgtaggtaccaatgccttcgctatgtttgggatttcatttggacyttcycttgaatttagggaagtgccagtgaagccaccctggtggccctgctggccgctcggaccaaagtgatccatcggctgcaggcagcgtccccagagctcacacaggccgctatcatggagaagctggtggcttactcatccgatcaggtgagtgtgttgtgggggtatcagccaagacttcaagacccnaatgtttggttttatgtcaaattcaaaccaaaccaaacagcatccttccaaatctaagaacagttcctcaggtatcactaaatagagacctgaactacagggaaggggtggattcttgggtgggaactggatagatcaagttaagaaggaaataaatgtgtggagacatcaccgcgactggctctgtcaccttttctaccagtgcggacttctgttgtgattatctggccttcygagcaccattgcagagaaactagatatggggatcaaagtcctcggccctaactgcagctttgttattctgtgatctcaggcccctgggtagcgtcaagcaggagacagtggcggtgggggctgcagggcaaaaggtggccggctttcatgagaattgcctttcctgagaatctctgagacaggatggatctgccacagtggtgatgcctcctggctggtttctttcctccaggtactgtttactgagcctggccaccaagctccccaaggctccacagtcaggggcagggcacagatttgagcctaggatttctaagtccacctctgggatctactttccagggtctcgccacttatccttgagttcaaacaaatgaaaaacttcataaatattgacccagcactttacccttgttagtgcctgatactttaaacttaaaagcaagattccacaggaacagaaacaactccaggaaaaaaggggtctcatgaaggtgcaggggagagggagcagtcaggagcagttctgcctcctgtgccgttaagagggaccttgtgtttgcaatgttggctgctctctgccgatccagggcctggtaataactgcatgcacacacctgtacaaatccaactctgctgtcttctttccaggcacactcctcagtggaaagagctgggttaattggtggagtgaaattaaaagccatccyctcagatggcaacttcgccrtgcgtgcgtctgccctgcaggaagccctggagagagacaaagcggctggcctgattcctttctttgtaagttcggcagcacttgtggctcctggccaataaggtgaaactccgtctctactaaaaatacaaaaaaaaattagccgggcatggtggcgcattcttgtaatcccagctactcgggaagctgaggcaggagaatggcgtgaacccgggaggcggaggttgcagtgagccgagatcgcgccgctgcactccagcctgtgtgacagagcaagactctgtctcaaaaaaaattaatctttgagaaacgctttttacctccatttttttttttgttttgtcaattcaagtcaattccacagtgtaatgtggaagaactgacatggctcaaagttagcacgcagagcaaggtgacagccaagacattttgaaggatgcaaaaagagtctgccagtggatcaaggtgtacctgccatcttatcccaaaagtcttatctttctccgttgcgttcatctccacaggccatacaggtttgttcctatatgtgtttactgcttccttcttcccaacagaatgtgcggggaggtaaggtccatttgaatccctgccttatccctagctcctgaaacagtgcctggcactgaacagaagctcgataaatatttgtcaaacaaataaagatttggaagaaagatcattcaggtagaaagaaagatctcccttaaaattcccacaaacaatttcagtacaatttgaatagattctatttaaataaggtgaatttctttgaacctatagtgtcaatattaagactcagaatactctgtctagggaaaaataaatctgtcaaaacacactcttttaggtttcargaatgaaaacaatgcaggaaacatcacttaaaatgttaagatcgtattttacaaaaatttcaaaactcatgaaataaaaagacaaatgctggcaagaaccacttatagcrtatgtcgtaaagtaaatcttaaaaagaaggcttacatatcagtaagcaaaaaggcaacattccagtgggaaaacatgcgaaatatatgaagtcggtttcatatataaccacaaaaaactaagaacacaaaaccgattctgatcctctaataaccaaagaaatgcaaattagttgccgagagaggtatgttatatctatgagtgtagatatgtctatttccacttttatatctgttaaattgtgtacatattttgaagcatattaatttggtgcatacacatttagaattgtcatatctccctggtgaatgatcgtttatcactaggagatgccctttatatctctagtaatgcattttgtcctgcagcctactttgtctgacattgctataattacatatgttttctattggctaatgtttgcatgatatagacattttccattctactttcaacctccctgttcatttatatttaagatgtatcctgtgaaagcagcattgattgttgctattttaaaaatttgtttttaaaatccagtgtgacgattgatatttattttgttcatttacactcaaggtagttattgatacatttaaatgttatctgctgtctatttgttttttatttggctcaactattatatgattgcttttctctatgttcttgcctcttcttggattaattatttcatattattccattttcttatctctgcattttcttatttccattcggcatcttttcttttagtctgtagaattccctttagaaatttttagtgtgaatttgatataatgaattatctcagttttgttaatctgaaagtgtctttactgtgccttcacttttggaagatattttttctgggtatagaattctagagtgtttggtagctagttttatttttggtactttgtataagtccattgaattctttcttccatgatttctgttgagatgtcagttgtaattttaatgttgtgatgatgaagaacatataaaaatatgacatttccttctgtgccgccaatggaggtgctgcttgctttttgtctttgttttactgtgatacaaggataattttctttttatttactcttcttggatttcacagaacttcctgaatctgtaatttggtgtctctcctcggttttggaaaattctaacctattatcttcccaaagtttgcctctcctcatttcctctctcctcccattctgggactctgattatgtatatgttaaatctttctgcagactgccatatatctcttatgcccttttacatgtctcactttctttttttttttaatctccatgcttcatcaacttatttacaatttaccaattaatctctttagctatgcctagctgataaatatgtcatgctcataattctaaacattaaaaaattttaacttattttattttattttatttttttgagacagagtctcactctatcacccaggttggagtgcagtgatgcaatcttggctcactgcaacatctgcctcccaggttcaagtaagtctcctacctcagcctcccaagtagctgggattacaggtgtgtaccaccacgcctggctaatttttgtatttctagtggagacggggtctcatcatgttggccaagctggtctcgaacccctgactgcaggtgatctgcctgcctcggccttccaaagtgctgggattacaggagtgagccactgtgcctggccaactttttattttgaaataatcatagattcatagaaaattacaaagttagcacaaagaaattctgcgtactaacccttcacccaatttcccctaattgttccaacttttataactatagtaccatatcaaagacaggagactgacactggttcattgtgtgtgtataggtctatgtcatttatcacaagtgttgattcatgcagccaccatgccaatgagaatactgaaatcctctagcaccacaaaggtctgcctctgctactccctgatagtcactctcaccttcctgatctcctaccatcatcaacccttggcaatcactgatatgttttctacctctacactcttgtcattttgagaatgttatataaatggaattatacaatatgtgacatttcaagatcagcttttctcactcagcataatggccttgagatccatccaagttgttgcatgtatcaatagtatgttccttttcgttgctgcaccacagagatttggtaccatgttatctatactacagtttgtttacccattcacctgttgaggggcattgtagttgtttccatattttggctattacaaataatgcatccaggaacattaatgtataggtgtttgggtggacatatgctttcatttctctgggataaatgcctaagagtgcaattaagggtcctatggtagttgttacatttaatttttttaacaaagaaactgacaaggtattttccagagtgactgtattattttacatttccattatcaatgcttgagaaaatcaggctctttatacatccttaccagcatttggtattgtcactattttttattttatccattttgatagatatgcattaatatgctatcatggtcctaatttgcagttccctgataactaatgaacatcttttcatgtgcttattcactatctatatgtcctcgtcaatgacatgtgtctttatgtcttttgcccattttctaattggatgatggattgattttttaaatgaataagcttaattttgttagagttgttttaggcttacagaaaaataagtaggaagaacatataccttcttatatcccaaccttcgtttcccccattattagcatcctgcagtagtgtgatacatttattaaaattgattcaccaatacataacatccataatttaccttaggggtcactatttctattgaattttctatatgttttaacaagtgtataatgacaagtatctaccatttcagtgttacacagaatagtttcactgccataaaaatcccctgtgctccacctgtttatccctctctccctccacttgaaccactggcagccactaatctttttggctgtctccatcatttgttcttttttagaatgtcatacagatagaatcatacaatatgtagccttttyagattgacttatttcactaacatgtatttaagtttcctccatgtctttttgtactagtttatttctttttattgttgaatgctgttttctgatatgaacacgccacaattcatttatgcatttatctattgaaggacatcttgtttgcttccaagttttgacagttattaatgmagtgctataagcatttgtgtgcaggtttttgtgtgtacataagttttcaactcatttgggtaaataccaaggatcacaattgctggatcrtatggtaagagtgtgcttaaagttttataaggaaaggctgaactgtgtttcaaagagactgtaccattttgcattcccacaatgaatgttagtgtagktttttcaatatctttgtcagctgttaatttttttcagtgttttttattttatccattctaatagatgtgtagtggtatcttattgttattttacttgaaaattctgtaataacatatgatgttgagcattatttcatgtgcttatttgctacatgaacatcttctttggtaagatgtctgttcaggtcttttgcccactttttaattggattgtttcattattattgagttttaagagttctttgtgtattttgggtagcaatcctttatcaagatatatgttttgccaatgttttctgccagtctttagcttgtcatttcatcgtttaaacaatgtcttttgcagagcagaagttttaattacaatgaagtccagattatcaattacttctttcatggatcatgtttttggtgtggtctccaaaaattcatcatcaatcctaaggtcatctaggttttctcctatattatcttctcggaaatttatagttttgtactttaaaacattaaaatagatgtaggtctatgatctattttcagttaatttttgtgaaaggtgtaaggtctatgtctagattcattttttgcatgtagatgttgatatggtttggctctgtgtcccaacccgaatccatgtggaattgtaatcctcagtgttaggggaaggacctggtggaaggtgattggatcatggggatggatttctcccttgctgttctcatgatagtgagtgaattctcatgagatccggctgtttaaacagtgtgtagcacctctccctttgctctctcttgctggcaatatgaagatgtgcttgcttccccttcaccttctgccatgattgtaagtttccggaggcccccccagccatgcttcctgtatagccagtggaactatgaaccaatagttcctttctttgtaatggaacaataaacctcctttctttataaattacccagtctcaggaagttctttatagcaatgtgagaatggactaatgcagatgttcagttgttccagcaccttttgttgaatactacacttcctccattgaattgcttttgttcctttgtcaaagatcagttgacttcatttgtgcggatctatttctgttcaactcatttatttgtctcttcctttgccaataccatattgtcttgatttatagctttctactaagtcttgaatttgggtagtgtcatgtcagatctcaaacactgttgtttaatattatgttgactattctaggtcctttgcctcttcatataagcattagaatcagtttagcaaaatgcacaaaataactttctgggactttatataggattgcattgaatttacgcattttgttgaaataactgacatcttgatgatattgagacttcctatccatgtatgtgaaatatgcctacatttatttagatcttttaaaaaattttcttcattagagtattgtagttttcctcatataaagctcattctttttttttttctttttactttttttggtgctaatgggaatggtttttattttattttcaaatttcatttttttaattgctggatgataagaaaacaattaacttttatctaatattatcattttatcctacagcttgccataattgtttacttagttctgggagagttttgtttttgtttattctttgggatttctacacagataaccacgtcatctgcaaagatacttttttttctttccttccaatctgtatatctcttatttcctcttcttgtcttattgcattagctgaaactctcagtacaatgttgataggagtagtaagaacagacatccttgcctcattcctgatcttcgtaggaaaacatctagtttttcatcatcaagtatgatgttaagagtaggtttttcrttcatcaagtatgatgttaagagtagatgtcattcatcaagttgaggatgttctgctcgaatcctagtttgctaggagtttttattatgaacaagtgttgaattttgtcaaacacttttctgtatctatttacataatcatgagattcttgtccttcagcctgttgaaatgatagattatattaatttattttyctatgttgaatcagccttccatcctggaatagatctcacttggttctgatatatawwtttttttacattgttggattcaatttgctaatattttgttgagaatttttgcatctctatttatgagagatattgttctatagttttccttcttgcaatgtctttgtaatactggtctcatagaatgagtcagaaagtattccttttgcttctatttkctgtaagtaatccttacttccttaaatgtttggcagaactcagcagtgaattcaattggcatggtttctttgttttagaaggtttttaattattgatctaattttaaaatagatgtagcaccattgaggttatctctttctctttgtctgagttttggcaaattgtatccttcaaaaagttggtctattttatttaggtttttgaatttgtggccttggaatccattttgtttctttattatctttttaatgtccataggattagtaatgatggttctactttcctttctgatattagcaatgtgtgtcttttttcttaacctgtataaatgtttgaaaatttatttatcatttcaaagagtcagcttttttctttatttcctatttccaatttcattgatttctgctctaattcttattatttcttttcttttcttctgcttacattgcatttatttatttatttatttatttattttctgagacagagtcttactctgttgcctaggctggaatgcagtggcacaacctccacctcccaggttcaagcaattctcctgcctcagcctcttgagtatctgggactacaggcatgcatcaccatacccagctaatttttgtatttttagtagagatgggatttcaccatgttggtcaggctggccttgaactcctgacctcaggtgatccgcctgcctcggcctcccaaagtgctgggattacaggcatgagccactgcacctggccacattgcatttaaattgcctttttttctaggttattaaggtggaagcttagattatagattttagatttcccttcttttctaatgtactcattcagttctgtaaatttccctttaagtactgtttcactgcatcccacaaattttgatgagttttattgtcattttcattgaagttgaagtacttttaaatttttcttgagacttctcctttgaccttaaaatgtgttgtttgatctctaagagttttcgggtcttccagctatctttttattattgatttctaatttaattccaatgcagtctgagagcatactttgtataatgtccattattttaaatttgttgagatgtattttatggcttggaatgtggtatatcttggtgaatgttgattgtgagcgtgagaaagaaaatatattctgctgtcattggatgaaatattttacaaatattgatttgatccagttaattgatggtacttttccattcaattatatccttacctattttctgactgctggacctgtccatttctgacaaaggggtgacaaagtctccaactataagrgtgagtttatctgtttctccttagagttctatcactaataatatagtaactgtgaaaagtagattctcgcccatcttcaggatttactggtttttgtttgtttgtttgtttgtttgttttkgttttgattgttgtagactacctctgtgctgaaaattggccttaggtgtaaactttttttcccccataagttattagggtacaggtggtatttggttacatgagtaaattcctttagtggtgatttgtgagattttggtgcacccataamctgagcagtatacactgcaccacatttgtagtcttttattcctcacccccgctcccactcttccccccaagtccccaaagcccattgtatcattctcatgcctttgtgtcttcatagcttagctcccacatatcagtgagaacctacaatgtttggttttccattcctgagctacttcacttagaatgtgtccaatcttatccaggtcactgcgaatgctgttaattcattactttttatggctgagtagtattccattgtatgtatatataccacagtttctttatttattcgttgattgatgggcatttggttggttccacgattttgcaattgtgaattgtgctgctttaaacatgcatgtgcaagtatctctttctaataatgacttattttcctctgggtagatacccagtagtgggattgctggatcaaatggtagttctacttttagttcttttaggaatctccacacagatttccatagtggctatactagtttacattcctaccagcagtgtagaagtgttcctggatcaccacatccatgccaacatctaatgtttttgattttttgattatggctattcttgcaggagtaaggtggtattgyattgtggttttgatttgcatttccctgattattagtgatgttgagcatttttttatatgtttgttggccatttgtatatcttcttttgagaattgtctattcatgtccttagcccagtttttgatgggattgtttgtttatcgtgttactgatttgtttgagttcattgtagattctagatattagtcctttgtcagatgtatagattgtgaagatttcctcccactctgtgggttgtctgtttaccctgctgactgttccttttgccatgcaaatgctctttagtttaattaggtcccagccatttatctctgtttttattgcatttgcttttgggttcttgktcatgaaatccttgcctaagccaatgtctacaagggtttttccaatgttatcttctagaatttttatagtttcaggtcttaggtttaagtcctcaatccatcttgagttgatttttgtataaggtgagagatgaggatgcggtttcattctcctacatgtggctagccaattatcccagcaacattagttgaaaagggtgtcctttcccccactttatgtttttgtttgctttgttgaagatcagttggttgtaagtattggatttatttctgggttctctattctgttccattggtctatgtgcctatttttataccagtaccatgctgttctggtgactatggccttatagtatagtttgaaatcaggtagtgtgatgcctccagatttgttctttttgcttagtcttgctttgactatgctggctcttttttggtttcatatgaattttagaattgtttttttctatttctgtgaagaatgatggtggtattttgatggggattgcattgcatttgtagattgcttttggtagtatggtcattttcacaatattgattctacccattaatgagcatggaatgtgtttccatttgtttgtgtcatctatgatttcttttttttttttttttgagatggagtctcgctctgtcacccagggtggagtgcagtggcatgatctcggctcactgcaaccttcacatttccaggttcatgccattctcctgcctcagcctcctgagtagctgggactacaggcacttgccaccacgcctggctaatttttttgtattttttagtagagatggggtttcaccatgttcgccagcatcttcttgatctcctgaacttgtgatccgcccatctcagcctcccaaagtgctgggattacaagtgtgagccaccaggcccrgccccrtctatgatttctttcagcaatgttttgtagttctcctggtagaggtcttcaactccttggttaggtatattcctaaggtttttttttttttttttttttagctattataaaagggttcttgatttgattctcagtttggttgctgttggtgtataraagagctactgacttgtgtacattaatcttgtatccagaaactttgctgaattcttttatcagttttaggagctttctggaggagtctttaggattttcaaggcaagcaatcatattggcagcaaacagtgacaatctgacttcctctttactgatttggatgccctttatttctttctcttgtctgattgctgtggctaggatttccagtactatgttgtaaagaagtggtgagagtgggtaaccttgtcatgtwccagttctcagagggaatgctttcaacttttccccattcagtattatgttggctgtgggtttgctgtagatggattttattatattaaggtatgtccctttatgccaattttgctgaaagttttaatcataaaggaatactgggttttgtcagatgctttttctgcatctgcatctattgagatgatcatgtgatttttgtttttaattctctttctgtggtgtatcacatttatttacttgtatacattaaaccatccctgcatccctggtatgaaacccacttgatcatggtggattatctttatgatatatttttggatttggttagctattattttgttaatgattttagcatttatgttcatcaaggatatctgtctgtagttttcttttttggttatgtcctttcctggttttggtgttagggtgattctgacttcatagaatgaattagggagggtttttctttatcttctgtaatagtgtcaaaaggattggtaccaattctttgaatgtctggtagaattctgctgtgaatctgtctcgtcttggactttttttgttggtaattttaaaattaccacttcaatctcactgcttgttgttggtctgttgagggtatctaattcttcctgatttaagctaggagggttgtatttttccaggaatttctccatgtcttaagggttttctagtttatgtgcataaatgtgctcatagtagccttgaatgatcttttgtatttcagtggtgtcacttgtaatatctcctgtttcgtttcttagtgaggttatttggattctctgtcttcttttcttggttaatcttgctaatggtctatcaattttatttaacttttcaaagaaatcagctttttgtttcatttatcttttgtattttttttttgtttcaatttcatttagttctgctctgatcttggttatttcctttcttctgctgagtttgggtttcatttttttcttgtttctctagttccttgaggtgtgtccttagaatgtcagtttgtgctctttcagtcttttcaatgaggtgtttagggctataaattttcctcttagcatcccctttgctgtatcccagaggttttggtaggttgtgtcgttactgttgttctgtttgaagaatttttaaatttccatcttgattttgtttttgagccagtgctcattcaggtgcagtttatttaatttccatgtatttgcatggttttgaaagttcctcttggagataatttycagttttattccactgtggtctgagagagtgcctgatataatttcagttttcttaagtttattgatgtttgttttatggcctattatatggtctatcttggagaaagttccatgcgctgttgaacggaatgtgtattctgtggttgttggatgaaatattctgtatatacctgttaagtccatttgttccaggatatagtttaaatccattgtttctttgttgactttctgtcttgatgacctgtctagtgctgtcagtggagtactaaagtctcccactattattgtgttgctgtctatctcatttcttaggtctagtagtaattgtttgatcaatttgggaactctagtaataggcacatatatatgtaggattacaatattttcctgttggacaatgccttttaccattatataacgtccctctttgtctcttacaactgctgttgccttaaagtttgttttgtctgatataagaatagctacccctgcttacttttggtgtccatttgcatgaaatgcctttttccaccccttaagtttatgtgagtccttatgcgttaggtgaatctcctgaaggcagcagatggttggtgagttattatccattctgtggatctgtatcttttaggtggagcatttaggtcatttacattcaattttggtattgaaatatgaggtacccttgcattcatcatgctctttgttgcctgtgtactttttttgtttgtttgttttttgtttttgctttttaacttgtatttttgctttataggtcctgtgtcatttatgctttaaagaggttctattttgatgtgtttccaggatttgttttaagatttagagctccttttagcagttcttgtagtggtggcttggtaatggtgaattctctcagcatttgtttgtctgaaaaggactgtatctttccttcatatatgatgcttagttcagctggatacaaaattcttggctgacaattgttttgtttgaggaggctgaagatagggtcccaatcccttctggcttgtagggtttctgctgagaaatctgctgttaatctgataggttttctttgtaggtaacctggtgcttctgtctcacagcttttaagattctttctttcatcttaactttggatartctgatgtgcctaggtgaagatctttttgccatgaatttcctaagggttgtttgtgcttcttktatttggatggctgggtctctagccaggtcggggaaattttcctcaattactcccccaaatatgttttccaascttttagaattctcttcttcctcgggaacactgattattcttrggttcaacataatcccagacttcttggaggctttgttcatattttcttattcttttttctttatctttgttggattgsgttaattcaaagaccttgtcttcgagctctgaatttctttcttctacttgttcaattctattgctgagactttccagagcatttcacatttctaaaagtgtgtccaaagtttcaagctctgaatttctttcttctacttgttcaattctattgctgagactttccagagcattccacatttctaaaagtgtgtccaaagtttcctgaagttttgattgctttttctttatgcatctatttccttgaatatttctcctcttacttcttgtattgttttgtggattttcttgcattgggctctgcctttctctggtgcttccccgattagcttaataactaaccttctgaattatttttcaggtaaatcagggattttttcttggtttggatccattgctggtgaactagtgtgatttttttggggggtgttgaaaagccatgtgttgtcatattaccggggttggtttcctggttctttctcatttgtgtaggctctgtcagggggaatatctagggctgaagactgttgttcagattcttttgtcccacagggtgttcccttgatgtagtactctcccctytttcctatggatgtggcttcctgtgagctgaactgcagtgattgttgtctcttttctgggtctggccacccaggcagtctacccagctctgggctggtaccaggggttatctgcacagagtccttcrgtgtgaactatttatgggtctctcagccatggataccagcacctgttctggtggaggtgagttggggagggggtgcaatggactccgtgagggttcttagcgttggtggtttaatgctctgattttgtgctggttggccttctgcrggaggtagtgctttccagagagcatcagctgtagtagtatggagagggcccagtggtgggcagggccctacaactcccaagattatatgccctttgtctttcgctactagggtgggtagggaccgaccaccaggcgggggtggggctaggcatgtctgggctcaggctttccttgggtgggtcttgctgcggctgctgtgggggatgggggtgagagtcctaggtcactggagttgtgtacctaggaggattatggctgcctctgctgagtcatgcaggttgtcagagaagtagggaaagccagcagtcacagccctcacccagctcccacacaaaccgaagggcctgtctccctcccaccgtgcccctgccaagagccccaagtctgtttctgggcrtgggcgagaggggcttaaaaacttgccccaggctacctacttcccagctatgaaagaaaagggcttggtttttcccctccctctggagcctgcacaccggatttgcaccgtccccgagttctggccaggaggcttctcatccgttcgaactgttacaatgttcagctggagatttccttctccctgtgaagttttacccactgctcctctggctgccttcccaatggatccctgtggtgccagcaggaatgacctgcttgggaacccagtgagttcccagtgcctttctgctgcttcctctacccctgtattttgctcgactgtctaaattgactcagatccaggtaaagtcggaaacttctcccgcaacagaccttcactttctctagtgggggtgtgtgttcaggagaggagggtctccctttcccgcttctgcagctggggcactcacagtacttagggtgyctcctgagacctgcaggagcatttcacttccttcacagagtctgtgggtcctctcgggattgctggtttgttcttgcagtcaacctggagctaaaattcacaaatgtgagcctccacacgctgctctgtccagtgctgcaatctcaatctagtcctgcctcccatatgccatgatgattggccttaggtataaatgtaaggttctttcagttattttctgagcctgtgtcttttctgggtatgtgtgatgactttctaatttcccctacataggtgttagtctttgaatatccaagtcttcacactgtctgtatccttaaaaagggaaaagaggaaaataaggggggaaaaaggcactggccctttttatcccccagaagtcacttcagttggataaggtgggtcttgcagcaatgggcagggtgtacaacaatggccaccacctctttgcacctgtgactgggatcagtaatcaacaatcaacaatcaaagtgcagactcccaatatttggaggacagttccctttttctcactttggctcttgcaagctctgtgcaagctgctccaggracacatgctcagctatgtgccatgggcctgggggtggtggatgggtaggtactactgtactagagctaaaattgaccaaaattaactgtattttcctgtccaacccttatattgaagttgcaagccttcaatagaccccagagtttcaaaataattgcatcaaacagattctgccagtaggtaaaagttttgtttagctgggagacagatttcctggtgcttcctactccttcatctcctctttaccctatatctgtaatgctcttttttatccctgacaattttctttaacaattttcttgatccactttgtctaaaattaatatagctattccagctttattttcattggtgttagcatggtatatttttctacatcgctatacctttaatctgtatcttgacatttaaagtgcatttcttatacagaaaatatagttgggtcttgttttcttacccattctgacagtctgtgtgctttattttatttttaattattttaattttaattttttatttcaataggcttttgtggaataggtggtgtttggttttgtggataagttttttagtggtgatttatgagattttggtgcacccattacccttttcaattagtgcatttagaccattgatatttaaaataattattgatgtagttggataaatatctacaatatttattaccttttcctatttgctgctcttattctttgtttcatttttggtcttctattctttgccttctcttgttttaactgagcattttatagaattccatcttttcttctctcttagtatgtgaatcaattttttttctttttctttttttctttttgagatggagtctcgctctgtcgcccaggctggagtgcagtggcgcgatcttggctcactgcaacctctgcctcccagattcaagcaattctcctgccccagcctcccaagtagctgggactacaggcgtgtgccaccatgcctggctaatttttttgtatttttagtagagacacggtttcaccgtgttagccgggatggcctcaatctcctgaccttgtgatctgcctgcctcggcctcccaaagtgttggccaggctagtctsgaaatcctgacctcaagtgatccatctgccttggcctcccaaagtgttggggttacaagcatgagccaccatgcctagtcagattttctttctttacatcaaatattacaagcatttttttcaggtcattatatattatataaaagtataattttgttaaaaaaagtcgcatagtactctattatatstctatctttcccagctatctctctcatatatacatatatgtacacacatacatataacataaataaatataaatgtaatttatttaataggaattcacatatatgtacatatatgtatgtatttgtattttatgtattcataaaattcatattttatgaactcctattaaataaattatatattattttgtgtgtgtgtgtgtgtgtgtgtgtgttgtgtatagatatatcctaatatcctagcaataagctagtgttaaacagttgagtttttttttttttttttttttttgagacagagtctcgctctttcgcccaggccggagtgcagtggcgctatctcggctcactgcaaactccacctcccaggttcatgccatcctcctgcctcagcctcctgagtagctgggactacaggcgcccaccaccacgcccagctaattttttgtatttttagtagagacggggttttaccgtgttagccaggatggtctcgatctcctgacctcgtgatccgcccgccttggcctcccaaagtgctgtgattacaggcgtgagccaccgtgccctgccatcttacttacattttttttttttttttttgagatggagtctcactctgtcacccaggctggagtgcagtgatgtgatctcagctcactgcaaccactgctacttaggttcaagtgattctcctgcctcagcctcccaaatagctagaattacagatgtgcaccaccacacctggctaatttttgtatttttggtagagatgaggtttcaccatgttggtcagactggtcttaaactcctgacctcaagtgatctgccagccttggcctcccaaagtgctgggattataggcataagccacagcacccggcctacttacattctttcttgtagtaattggtgcacttaaaaattttattcatttacttatttamttatctataatagcttatgtaaacaaagtaaataagtaagatacataagtggccaggtgcggtggctcacacctgtaatctcagcactttgggaggccaaggtgggcggatcatgaggtcaggagatcgagaccatcctggctaacacggtgaaaccccttctctactgaaaatacaaaaacaaaattagccgggcatggtggcagtcacctgtagtcccagctacttgggaagctgagatgagagaatggcctgaaccccgggaggcggagcttgcagtgagctgagatggcaccacttcactccagcctgggcagcagagtgagactccgtctcaaaaaaaaaaagatacgtaagtatcttatataagtaagataagtaaatgagaaaatttacttatcagaatttcttgggaatgatttatagccctgaaattacttaatgaaagagatgggttttttttccccaagactttgatacatactctcacattctacttcaaaaacattgtaccaatttataccaaaagtttctttataaagagttattaaacataaaagtcatgttaaaatagtgacttctactgaaagaaatgtaatggtgaaattgctggaagtgccaagtaatacaggcactaagaaatgactcattcattcattcattcattcatttgctaagaggaagtaatttacgattttcttaggagtttatttactagagtgtctgtgggtgaaattcagattccactgggcaaatgaggaaatgaaaaatgtgggaatggattcctttataaagaagtttgcctgtgaaggaaagaagagtaaatagtgccattgctggagcaagttgggccgagggagatgtgctgagagagagatttatctgtgcatgtgaaggagctggtggaggaggcagaagcacgaaagagaagactacacatttcattaagagaaacaaaatcaaattttattttctttgaggaagatggaaggaccaaattaatatgcctctgttggaattttgccctaaagaccaaaattccagaacattctgctgatagaagccacagatgtgggccaattgtaggtatcggatcagagaggagaatcacttttttgcygtagactgccccatgcaccggcaccgtaccagccctggaggtgtgtggcragccatggtccctttcctcatggcatggttcttggtggggaagacaggtatgttcccatctccacgccatttgatgagaacaatgcatatatacatgggtagagggcgcaaataaacttcytagaggggatttggaaagcctgttgctgagagagaacacaggagctgtgtcaggggatatccaggcaggtacttctgggcatgstgcctttcttgttggagggaagagggctgcagcgtacagagatcagaaaagcacaggacattccaggaaatgcaccttgtttgttgtctttaactggcagccaaaggattgtaaagctggagagagtctgggccctcataggagaggggttggagcctgagccttgtctcactgcccagctgtgcccttgtggttataactgggcatgtgcataatgactatatgcgtccttctgggatgtagccacatggtcttcattatattctcaaaggggctgtagatcccttaaaattgaagacttgctgctgagggcaaggggcacatttggcagggtttgaaccagaaaagctgaatcattgcccttccatgaacaggcttggggcttgtaataaagtttccccttgtttctcaggacagcttgcttccctaatgagccagcttgataaggtcgggccacagagggcgatgcctgcgaggcacttacgtgagcacagagggctagtcgaaggggcaaggatgcagaagagaaggttgtgctgggctctgccactgcaggaagactgtgggctctttgagatggaggcctgaactgtcccctacccctccttccccctgcacaaatgtgattatgcctctgcagagcgcctggaatcaggttagcgtcattgagcaatgctgagctggagtaatcagagcctggagcggagcaggtgctggctttaaagtggcttctgagaattaggacaggctgacttgtagctcagccccacgtagacaagccacttagaacactgtccttgcagcccccaggcctcctccttaccacagcaaagtgcttgggtttgttggaggggcctctggcatggcccaggtgctgagctcgttaactgatgttcagggactggtgtcccaggggtcctgtttgcccagcatgtggcaggacaacaagagctaaccaagcctggggtcacatttggtctgctcctgcctatctgggtgtcctgggacaattacccacctcttggagcctcacataagtcaactgtaaagtgggaatcacgagcatatctaactcataaggtggtggcaattaaatatcatataggaaaggctgtcagcattaggcctgctgcagagttagccgcaaagaacatcacccctattctcaacctaggccactgccaggacaaggccgggttttattgtttctgcaaagatgtttcatactcagaacaaaaaaaatcagtaattacataagaatctaagaataaaggtttatgttaaccaaaatcttaagagaaatgcagtattactgtttggtgaacatcactctagatactcttctatgcacacattaatagagagaaaataattttaataagggcacatttaataaatttttaataatagaagttattggctgggcatggtggctctccccagtaatcccaacactttgggagaccgaggtgggtgaatcacctgaggtcagaagttagagaccagcctagccaacatggtgaaaccccgtctctactaaaaatacaaaaaattagctggatgtggtgcctgtaatcccagctactcgggagactgaggcaggagaatcacttgaacccaggaggtggaggttgcagtgagctgagatcgcaccactgcactccagcctcgacaaaaagagtgaaactccatctcaaaaaaaaaaagttattgcatttagtttagtgtttaactgaagaaagtcagatgaaacagaaggaattgctaaactagagatatgtcatttctaagatatgactctgggagttgagaaaataagtttcaagcaatattaatattgttaagtcattctttttcgctattctcttaaggataaagataaggcattctaagactctcatgctctacaaactgagtagccaggtgtcttagacaaagtgctttaacattcaattatatgtcaagatgaaattgcaaatagcagagaaaaacaacacactgacttcaattcccactaaatgacttatcttgccaaaatgaaacaaatgcggagaattattgatgcttgacatgaggaggggacatccagaggttaagaaaggatgctgacagcaccaggagaaacattgaggtatgcaagatgttagcccgttggcacctgatagaccgggcaggtctgtaagtgcaatacgttgctttgtaggtaagaaaaataaagcccagccaggtgccaatgtgacatggagttgggcctccagcccaggtctctgtgccccacatacatggtttaactatctgtattcactgtgcctttttactatctgtgcttctgatgctgtgacacctttgggtcttgctgaccctggagggactgcccttctcarggagaggggkttcctagagctcttaaaggactcacttrcaagttcacctttcttttcttttcttttttattataagttctagggtacatgtgcacaacgtgcaggtttgtacatatgtatacatgtgccaggttggtgtgctgcacccattaactcgtcatttacattaggtgtatctcctaatgctatccctccccactcctgccaccccatgacaggccccggtgtgtggaactcaaacaaatttgtaaraaaaaagcaaattcacctttgaaatgcaaaatcatcagtacagagctcctaccccagcatctcctctgtggggctctcacactctgggctactatcctcctgccctgaccactcaagggctaggtaccagacatctagggacagccactgctccaaatgtgacgtggagcagaccaaatgcgaccccagagcccactgaaattattcaaaccagccgatcctaatcctgctcacccttgccctgcctggttcttcctgtggaaaccacaacacaggcccttgccgctgtttttcccccacccctctgctgcccaactgatcctcgtgcttccccatgtccccctccccttggggactgtgaggaacaagctgtttttaatggcagtcatctcctgacttgttgggctcaccatcctgaacaagaagaaagcctacatttaaacagactgcccctcctgcgcctgagggtagccccttgggggactgactcccttgggcatagctcagtgacacagagagcccttccagagtccagccaggacctgttttgggcccacgccccggggtttggcatggaaaactctggtccctgagcaggcatcgctctgtctgagaagtaccttgtccagcccagccacctgtgagaggagcagggcaaagctggtgagacgaaccttctgcaggctaactctgtgctacctgggcatgaacactttgtctctctctaaaaggaaaagttggtttccaggtgaaatgcgaggcagtcataggtgaaatggagccacaaaggtctcgaactggggttctcacatacgagtttctgacctctctatctttatcctcaggacacatggcattgctaagactttacagggggctcaataaaggtcacacaaatttaattctattccacactcttgtcgcatctgcaaagaaatttcattatctagactgcatgacatccataaatcaattaggccctttggttttgtaaacataatgtgcgttttgatcctttggagagagctgtttcaattcagcaataggtttcagcatctatgcaatgtccagcaaagtgcaaatgctcagcccaacacaaaacaatgagacagggtccctggctttgggagcatcatgggtctggagggagagacagacatgtgtgtggggacaacacagtcaggctgtgccagtgcgatcgtggcaccacaaggtcctcagagctcgggagaggccgcagtgactccyagcccgtattttctgggttgtgtgactgacagcactcaatgctttctcagaacawcccttttaaaattattttcaatgtcagcagtgttttctcatgacctcctgaggatttaattaatctttgggaacagtatcattcagaaagagaaaggcagcggattaaagctggtaaatgatactcttgctcaaaatcctagtgtgactcttaactgatgccaaagtctgttctgaaagaagcattccatgagtgccttgggcagtctgggccctgctggagggagactcatctctactgcgcttgctctgctctgtgcattgcacatgtgtgtatgcacacacacacgtgcacacacacagacacacacacacccccccaaactaggaaaaaatcccaggcttctgctccatagtagtaactatgttcttacattctctatatatgtatatatatacacacacatatatatatagaaaataaaatatatacacttgtgtatattttaattataacttaattataaatttaattagattataattaaattaaaatgtatatatggaatataagaacatagttacactaatgttacatagaacgttaattaaaatttaacaaaaatatacacacatacatatatatgtatatttaataaagtagaatatagtatatgtatatttactaaagtagaatataggtatcattgtccaggtggtagattgcttcatgtctgccccaaggcaccctggaaaatcttttgcaacttcccrgtttctaacctcagagcttagttttctgtctgcaaatctgtttctcttaacctgttatgatgctttcacccaaagattcaatgtgcatccatgggcttacgtttccatgtagcagacattcattgggatctcggctcatggccccaggttggaccatggggcagcagttgcttgtgtggaggttacagcggtgactggcacctggggaataaaaggytgtctgctttttaccctctagatggttgccaccctggggaccacaacatgctgctcctttgacaatctcttagaagtcggtcctatctgtaagtatccgattccattttctttttggaaaatgttctctgtacacggggaatttagcaaaccttcctcgttgatctctttcttgtcgttaacttcatattgtgatggtttgcccagctcttctcgtatttgcaataacacaaacctcattagcttgaactccacaaactcagaatttgggctaattggaaaagaactgagcttagttctaccaacacactatttgtaagaaaaaaaatccgagcaatatagaagttatgtaaaattgcaggttatgttggccctgttgaggagaataaactcttcaaaatcttagagtaaccaccttcatatgtgggtcgtgcatacacctgatatgagaattgtccacacttgaatttaattctttggtatatccctttttcacctttttttggaattactgaatgcagttaagaaaattgctgaaggtagtttagcaaatcaacacaatgaaactggatttcgccaaggaataatctgtgcttcagatgttttcctggtcactctcacctcctcccttcctcattcagagatcctaggttttctcattgagactaggatgctgtgttttcaaaaggtgaatgtgaatgagcagctctgtttctagagtttcacctttgacatgtagctctgggaactcagcaggycttgaagctgcttctgtggacagaagaaccctcgtagggcagggacactggctcagggggctccccctttctctgtccctctaggatgggaatgttctgaccgctcggctgtgagtggagctgcccaagtggggccttcagatcacatacctgtggcctgtgccagatcccacaacagctaccagggaattggcttcctccttagtctgcacaagccaagcacagttctcacctctcctaacccaagagtcacccatagtccatactcagaggagtggaccctcctctcctgggcgttggcctcccttcttggggtcagcagctggggaaggccggtgctgaaggtgcaggtgcctttgtgtgagctagacatgaaattggtgacaaggaagctagggtgcagcccaggatccacccctgaatcttacattctgagcttcatttatgctgtctgtaaagtgaagagaaaaaccccacttgtgctcataaaataacaagatttccccacacgattattcagaggataaattaatgcagggaaaatgcaccatcccaaaggtagagtgcattgctgcacagcaaggaatgcagtgctgggaactactgggaggtgggtggcatagacttacccgctctcacagggtttatgctccaccgtttatgctctgtggcacacagctgtaagaacaactggcgggaagtggtcgtgcacagccccgggctggggagaagggatagaactggctgactcaggactgcagccacagcattggcctcatcagctgcaaaccttcatcagctcagccaagcaacttggagtcctctgactcagatgtcaggctaagaactgaatgtcctggccagtagctggctgatgtaattcccyagggctatcggatttaaagggccgaggtcttctgctggatagagcccacatggcctgctgtcccctgggccaagtgtgggctgcccgctggaccatggagatgacagccagcgtgtgtcacctgccagtcacagtcccctggatggatccagctcaggccttcctgctatctggggccccctcttctttgtagaggctggaggctgtgsacagagcttgatttatgatttgtttggtttgaaacactgaggttgcttttggggttgtgcagaaggagctgacatgggtgaatgccaaaaccctttcatccattggcagaatgcataggggaggtcagttttgacaattcctttttttttctttatttttgagatggagtcttgctctgtggcccaggctggagtggcacaatctcagctcactgcaacatctgcctcctgggttcaagtgattctcctgcctcagctttctgagtagctgggatcacaggcacatgccatcatgcctggctaatttttgtatttttattagrgatggggtttcaccatattggccaggctggtctcagactcctgacctcagatgatatgcccgcctcagcctcccagtgtgatggaattacaggcrtaacccactgtgtccggccaacatttccatttttattgatggtgttatattactaactgttggtggtaccttaacaattaagtcagcacccttttacctactttccctctcctgctaccattttcctatcaccagatatttagcattctccaactccaagcgggactrttctgagatcctgagctgaccttattctatatatgattagaataatctaacataattcagwtaagttattcacccaccatcatttgacaaagaaaacaaatcagaagatggttttcttccaattgctgccttaggaaagacattttctttttattgcatttgaaatgatttgccagtgagggtattcagattggtctgcttggatggatcagttgtctggcaggttttactgagaagatggaatacaaaaagtggatagttgaagtcagttaggttgccgrtggggaagtggggaaactgaggaygagggtatgggctgagttggggaggccatctcaaggtgtgaggaagggaatagcacagggcaggcagccaaagctgcatcctgaggtgccagcataactgagagaggacgtgcagctggaggggcagccaggcctgccgcaagttcctgggaagtctcagaaggaaagagtcactgacagcaggaagctggaggrktgtgaggctgtcccatycctccccactgaggcagccttgcctcagggctaggtgtgcccctggtgcatgcaacttctcaagctctggccgagggtctctgtgtcygcctggttcctagatgggccgtgctatgcagtgtgtgctgttagtggatcacatatgagatgcagaatgcagaatgcagaggcatgcccacagctccatgcatccccatggaaaccagagaagcccttcagagtccacttcctttaggggtctgtaagttcccttctgcaggagttgtaggccaactgcaagcttagagagaacacagtcctccacaaagctgataaaagacataaggcgtttcaaagctttgactcagtttaatcatcaggatgaaagccctcagttggattaaggtcaagtgtgtcctgcggacacggatatccaccccagggcatgggaggccaaaggtcacagagcagtgtggacctgaaccgaggcttaggggctcatcacttcccccagaatcagtctcacctggtgcttgcataaccccagatggatgcagcagtgagccaggaagagcacaaggccttaggatttgcagagtttctccctgaggagtcactcagtaatcatgggatgtccatgcctgtagctcagatcagcggtaaggttgagaaaaacctcagatcacatcataagataggtgtaaatttgaagcttgctgtagtctgaacgtttgtgtccccygcaaagcccatttgctgaaattctaacctaaggtgatggtattggaggtggggccttccagtggtaatgaggtcagcacagtggagccctcctgattggaactgtgactaattagtgcccctgagagtctcacgcctcattgcacaatgagcaccatggatggtgagtgaacggtgaatccatggatccctacaaatgcatatgctgaccctgacacctaccccacggtaccctgacactggtatccaccctgtgaggtgagggtggctcgcrccctctctgtggtccttcacccttcaactcttactctcctgggtgcctagggctgagaggcagcaaccatggaagccacatttatttctcccctactcagtgctggggtcctggcaagcacattgtaaatattcccttgctcatcccttrggcctatgggtactatttcatctccatcttcctgggaggagagtgaggcttggagaagtagatagggccccttggctggggagcaactggaagcaggagttgagcccagatctgtcaaaattgagggagcatgctacatctgtggctctcccagctcctgaatgaggcagcccctgcccacaaggctgctatgcatggttggaaaacagaaccctgttcatgaagaaagcaggggatggtctaagatggtgtaaagtaaagaacttcacctggtggtggggatggagtggggcaggtagaggtcagcgtggactgtgtgcagacctccccttggatgatgtttgggggaggacttgagaatggattagcaaagggaaccaggaagggaattccaggtgggtggaaagggtggtgtcactggagagaaatgcaggtgagtaacatgaggctgtcacacgatggtcccttggagttacacttagccgccagggtcaggagagaaaaccaagtggtgcagtggcttccattttccctggtgtgtctggggccagcagcacacacactgccctcagctttagaccctttgaatgagggggccttttggggattcagccattagttcagcaaatactgttggcatgctctacccaagaaggtgctcagacagggcgaggtcagctggcaggctccgtggtgaggcatccatctggggactcacaagttgattctgaactttaggcaacaaggaagacatatggctgcacgttgatgcagcctacgcaggcagtgcattcatctgccctgagttccggcaccttctgaatggagtggaggtaggtgcacccttcgctctccctaaggctgttttcacagtgctctgttattgacctctcccttcatgaggagctgacgtccantctcttgctattgaggtttgtttcagccaattatgtttgaaccarttccgacttcctcagaataggggctgagagccttccccagccatanagcctgtcctcctgaaatactcctgacacttacagttccatttcaatctacacaaatcccaaacagaaagaataaatgttagcttataaaactgtgggaaagtaggaacaaaataaaatcttaatgaacttaaactcaaaagagtaatttaaaataccaacccgcaattccatacaatctggttcaatatgacagtcatgttctgcccatacatctgaacatgatattcactttaaccaatattgaacgagaagctaccaatgcatttaaatgcccctagrcagtcttctggaaattgtaaagcatgatctttaatgctaagtgaaatgcctgcttcttttgagaagtagcaatcaaaattattgaccagcactccgcttctccaaaaagcaacagaatgtaaattggtacagacttaacacaaaaaaatgaccttattgatatactgtggtgtgttatttcagactcaagcgggatttcattgttggtggtggctcatagggtaggaagtctcttctccccaagaactcagctttgaatgccatagagggtcctgagaggcagtctttggcagtgtttctaagagaaggaggtagcaaagcaggggagctgtggcactggccaagaaagaaatgctttctgccaaggggcaggaggtgtcgtgagacctcacccatgtgtgatggcagatgaagggcacagtyctctgcattagactccttggtttgaatcctagatttatccttaagactagctgtgtacccttgggcgagttagatatcctccctatcctccagaaaatagatttcataagaatacatccggtgtgggattgtcgccaggrgtagatgagttaatcatgttttaagggcttaaaaacagtgcctggcagacagtaaatactgaaattgcattaggtgcttttgtgattttctactacgtcttagaaaaactttcccttgacagcttcctctgcttgcatgtcaggtttgctaatcactattctaattacaactttgaattctcataatgctgtaataccagaaaagagggtaccagakgtatagaatacaaatgtccccatctttggaaagaataatcctcttactactaatcaatgaagtagtattctggtttatgtctgcatcacaatcattcactcattcattcaataattacttgttgagtacttaatacaacctaggacttacatgatggatccttgggggtaaatggagcttccaaagacctatgtacgcactggagrgagggtatagtatatgagaagttctcataatgtgatgccagtacccagctgatatagttcattgccggtagctagtttggtgcgtgtttggtgctgggaaacgaagagtaaatctctgtatcatataaatgcatggcatgatggagataatctccattatttgaaacatctgtcctgggacagtttcaagggaggaagggctaagcagtcctctgggatttatgtgccctccccacggctggcctgagcttgatgctcttttctaactctgggtatcaggtttagggttcgtgatcttttcctaccactgctcttcttttccccaagaactgacaacttgaggtttcatctttcatagaagggtgcctcattgtcagaccaccacagcaatgggctttccagccagatcctatcagcaacagacaggatttcatgctgtacaatgagtcactgccatttttcttgcattattgctcccgactctctttccatgcccagctgagggctgtgcgtctcagtggggcagataaggaggctgcaatatcctgttgtggccctgcccttggagataagagcctttctctccggttggcaggaggaaaatatcactgctgggtaatgagagaagtttaaacagatcagccccataggagggaactcataagactcctagcaaacagagctcctctttaaccttttgtctccttttatcaacaaatgaaacttgctgtaatttcctgtccttttctcaaaattacttttattaaaacctagaaggaaatgaacctgggtctccagagcagtggaaagttgtcatccaccaaccaaatgcctcccaggacgccccccaggtccctcaagcttctgctgcctcctcggtgcacatccctgaaaccaagtagacaggaggtgccctagggccttgggaagactgaaaagtttcccagtaggagagtcggccagactggcgcctcactgcaacagccacctttatttcggtatcaattatgaatccagccgcatggccaaatccctggccattaaggtggaccctgttcctgttcaccagtcaggtgataaaccaggacatgcatttgaaaaagaaagcaccatttatgacagctcagggaaaatgcagagtgtcctcctctgccactcttggtggtttaaacctcttattttctccttgaaaataaggtagmccctaacactgatgcatgcagccagagccggttgttcacagtttttacccaggatcttccagctacgggagcctgtagctgttaggaatacaatgaactttaaarataaaggagctggtcggggtgcagtggctcacacctgtaatcccagtactttgggaggctgaggcaagaggacggcttaagcccaagagttcgagatcagcctgggcaacgtaatgagacacactgtctctacaaacaaaattttaaaaattagctgtgtgtggtggcacacgcctgtagtcccagctacttaggaagctaaggcaggaggatcacttgagcttgggaggttgaggctgcagtgagctgtgttcatgtccagcctgggcaacaaagtaagaccctgtcgctcaaaaaaaaaaaaagagagagaagcatttaggtaaatgaggagaattgttgatatgttacagcaatgctggcaaaagaacccatcaattaaatgaaaactgggtttacccctatctactgtagattagtaataaaatttcctctttcccactgtttatcatgacacgtgtagtctgagaactttgctagctcagcaagtggaaggaacttcaagcatgaagtattycacaggccaaatcagtacaattcctgtacgttgtgcttgtgaaggacaattctgatttttccaaatattccagtaatttaaaatataatatggatacattttatgtcacattagattatgtaaatttgaaaatgcttttcatttgggaatataaacttttaattttaaaattcttgttccattttatgagagtataatctagatatagcaaaacatacaaatcaactctaaatacatatacccacccccatgtacttaccacccagatcaagagtagaacaattccagcactccagaagactcccctacccactacaagttactactcccctgggcaaccctacctggcccctaccactgtggattagttgtgccataaacttttattatcatgtatggggtcttctttataattaaacatttataaagaaaatgttttctttttcttactcttgttctttggcagtttgcagattcattcaactttaatccccacaaatggctattggtgaattttgactgttctgccatgtggtaagtttccctgctcacagatgtcagttgcctgtccgaggtgacagtgaaagaagctggcarggaagatgccagagccaaaggggtgcaatagtcacttagctcactgcttgctgccttttctgaacccttgatggaattattgctaattcttagcctcactggaaacttttatctagggaatatcattgcaacatactggcataagaaatgagaagcctaaaaakgacaattttttatttgatttatccagcattgacagaaaacaaatgcaagtacacacttctaattcagtagcttgtgttttcattcttagattcgtaaccagtcttagtgtaatgctaagtttwagcaatctgagtccaaatgcttaaaagtatttgctaaggccgggcacagtggctcacacctgtaatcccagccctttgggaggccgaggygggtggatcacctgaggtccggagttcaagaccagcctggccaacatggtaaaaccccrtgtctactaaaaatacaaaaaattagctgggtgtggtagtgcatgcctgtaatcccagctactcaggaggctgaggcaggagaatcgcttgaacctgggaggcagaggttgcagtgagccgagatcatgccactgcaatccagccttggcgacaagactctgtctcaaaaaaaaaagtattcgcgaaggaaaaataatagtaaccatgtttcctaagaatttccctggaaattcttttcttcctctcttttttttttttcgagacagtgtctcactctgtcgcccgggttggagtgcagtggtgcgatcttggctcaaaatcttttctttctttctttcttttttttgagacagtgtctcattctgtcgcccaggctggagtgcagtggtgcaatcttggctcactgcaagctccgcttcccaggttcacgccattctcgtgcctcagcctcccgagtagctgggacaacaggcgcctaccacgcccggctaattttttgtatttttagtagagacgaggtttcaccgtgttaggcaggatggtctcgatctcctgacctcatgatccaccctcctcggcctcccaaaatgctgggattacaggcgtaagccacggtgcctggccggaaattcttaataacagcatgataataccttggtgatatttagaataagaaaaagaactaaagcattaaagtgggtgatattacaccacctacacaatgtttaaagaaataatgatgatgggcagtgatacagggacactagaaactagtttctctaaagttttaaagtaagaagttgattgattgatcatagggccaggaggatttgcatgaattttgtacagtatgcaaaactgcaaaattttccaaatattcagaaggctttgcaaaattgttcagtatgtaattaagtgaataacttttcactttcctcctaagcatgaggaaagcagcttttatacaaaacaactaatgtcagctctcaaggttaccaaaatayccgtttgaccttttcctgttttttttttaaggctaaccacatttctagtcctttacttgtatacaaatcaaattattttttgtcagtctttttccccaaacttctgctatataattttaaaaccagttggtatgtgggcatttcagacttaattttgtctgaaataagtatttatgaaagacatggccgttatgaatgtgagtattcttttgtattcttgtggttgtgtttttctgtttcacccaaggtggaacacagtgaggacagtttgcaccgtgtgccagaggtccctttattcgaggggtaattttgattgaaatgtaaatccgctctgctgaggtttttggtcagtggggaaaatcctctaaggtggctggagttcggaaggaccaggcagagcatccacaggctctggcgggaacaagtggctctccctacttgcttttgttttgcaaggggcaggcgtcctcagatgccttccacaaaggaagccctagaaccacccttgagcagggcagggctgatgggctgtccggaggaggggttctcgtgcgccctgaggccgtcctcaatgcctggatagaacagtgatatcagcaaggctgtttagtgactgcggataggtacatccaggctcccttctaagtccctaacctctcgtagctctctggacccccacgacagccctgtgttgagggacacagacattgccacgctctctttacagatgaggaaactgaagcggtcagggaccagaaatattttgggtccctaatcttggaggcaaatattgacacacgataagaaggagtgtaatgaatgcggcgtcctgccctcaggtccagacaaccagtgcgtatgttaaggctgaagaaaacctgcttagtcagtgcggtggtgagaaggagttgagcctttcgggacgtggagtgcctgccgcagagctgatgccccgaggctgccgcagacgctgcagagctgatgccagcaagttggcggctgtgcgctcatctctcccggacaactcttccccggcgctcggggttcagttcagccaccagcctgtgaggggaaatttgacaaagtggaggtgatgtagggaagagacacaggacacacagggatgaggccaggccatttggaaaaggsmakwtggamaatttccttgtagaaggaattaaacgtaagccctaagacacaagagaggcctgcggtgtctggaagtctgccacaagagaagggtgatggggttagttcccatcctctggagtgggcgacagtggtgggtcagggtggttgcaatacttgaggaacctcttaccttcctatgggcttgaaaggctacaaaatatgtttttaaattgcaatagagaatgtgctctttctctcctgagccggtgcgttctcgacagaacaagagtcaaagaatttggtgagatgctgtgtacctggaaaaatcagatctctccaaaacccaaggttttgtcccatgacactataaaaatggcatgaatgttgatagatgaaatctgatctttgaaagatttgtgttttaacacagaaattgctgatctttactgtttgggggcactgtgcctgcattagttggctagggctggcttaacaaagtgccatggacaagcggcttaaacaagagatgatttatctcagtcctagaggccagaggtctgagataaagccatcagcaggctggtttcttctgaggcttctctcctgggcttgcagatggctgtctctccctgtcctcacatggtcttccttctgtttacctgtgtccaaattttctcttcttataaggacaccagtcacattggattagggcctgttaaccaaaaagtatctgagacaggtctcaatcaattcagatgttttattttgctaagcttagggacattcctggaagaataaacatggaatcacagaaacagggtgtgctttgtgcctttccccaaagatgattttgaggccggcagtatttaaaggggagggcaagctggaggggaaagagggagggtatggtcacattactgaatccacgtgttgtgagagaaaaggagcaggtagaggaatagtcaatgatatatttgtctcacgcccagtaaatcagctctttatataagataaggtgagcatagagtagctacctgtagagatatttaaccttttatctgtagctttctgcttaggaacaaaaggaagggtatcttcttgcatgaaagcgtccagcttattttttttcctttggcatagtaaattgaggcaccaagtttttattttccgttcacatttcttcccctccccttttaaaaaaagtcttcagaaaatgcattttagaagaaaatgcgtctctagtcttggggttttgtctggtctcttgtgactaagacagtttatttctagacaggtcccacgtggttargaaagctcatttttagcaggttgtaaagtctcatgacccatgaaggaaaaaaataggtggaggaagagagagagaaacaaacaaacaaacaaacaaaaataaagggagaacaatcctggaaaactgacataaaccrtattactctgaagtccctatgtcagtaggcaggtatgaaagtgatttacgtatataaataggttcctgttattttcttccaaagttgacgttgtctagcttcagtttacagggctttaagaaaagcatagcttaatatttagtgatttcaaatcacgattaaaaaggaaaagaaagaaggaaaaaaaactgacaacattattttccagaattgtagccaggaaaaattttagaattcagcccaaattgtagaaaataataaaaacagacaaacattaggcaaggctagactctaattacagatgtactatagtttattttgaaacataatttttctctttccagttccccaattgtattaaatacaagattataatagggccaatttatttgtaaaataagttttagttctattatgattggcttgattatttggataaagtgcagcaagaataatcatttgccatataggtttgctctctcgctctttttgttgttgttgtttttaaattggttttgttggaatcttttcataaagaatctaagatttagagcttttgttgttgttgttgttgttgttgagacagagccttgctctgttgtccaggctggagtgcagtggcatgatctcggctcagtggcatgatctcagctcactgcaacctccacctcccaggttcaagcgagtctcctgcctcagcctcctgagcagctgggactacaggagcgtgccaccacgcctgcctaattttttgtatttttagtagagatggagtttcaccatgttagccaggatgatctcgatctcctgacctcatgatccacccacctcagcctcccaaagtgctgaaattacaggcatgggccactgtgcccggctgatttagacctttttaaaagcctcagtcccagtcaaggatttttctgtgcctatagatacctgtatgaattggttgaatttttctattttcaaggtcccaagagaacttgaggttcctagccctgttagaaagtgacattttttacttaccataggtcaggaccctgtaaaggacaaggtatggggccagtttttctaagaggcttttactagctctgtaggtcacccttattttctcaaggcaatctgaaaatgtcattccaatcaaagccttggtaaaataaccaatgacagaacaggatcacacagaggycattgtaaaatcagtcattcatttagccaaagcgataactcaaagatttcacaacctttattctttgagagaagagacttacttttctaaacaataaactctaataaagacagtatgaggccaattaaatctctctcaaattttataaacaaatctattaaattttaatcatcttgaccaaaatatataatttccataaatcattttataaccttttataattttttaattaaagaatgggttaatgtcccaagaaaaccttgttaawctggcatagggacacagatgctggtcttgcatcagtgtacctttgatattagtgtttaatttatagagaaactaagctaattttatctgtcaatattagctcttccaatctatgtgtccacctcttctgtgatactctgatagtccctgggcctagaggggttgaatagttttaatttctggccctgtgtctcttgaacacagtttattttgattgtcatcttctcctgggtctgaagatgaggcttttaactgctgtcagtgtttaagatttagctggacttggtatcttttttagacccaggagtcaaagtcctgtaatagtacaatgactttagaagcaatacagaaagttatatggatataataaccttaattttttaaatctcagttttcgtaggactttaattagttagacataggaagagtgcatcctgtgttataagttttctatttcatagaagaatttagagaataatataggaagaaagcatttgctttaggctgcgtgtggtggctcatgcctgtaatcccagcactttgggaggccgaggtgggaggattgcttgaggtcaggacttcgagaccagcctggccaacatggtgagaccttatctctactacaaatacaaaaattagccaggtgtggtggcacgtgtctgtaatcccagctatcctggaggctgaggcacaagaattgctggaaccygggaggcagaggctgcagtgagctgagatggtgccactgcactccagcctgggtgacagagcaagactccatctcaaaaacaaacaaacaaacaagcaaacaaagaaaaccattcagtttagatctttaagttaagatatattttttaattaggccacaacatcagtcagaaccagaggggaaaaagttaaaggagctgataaaaagttgaaagagttactatctcgggccctcttgaaggggagagaaagctgaaaacagcgagatgaaattaaagttgaaattttggtttatgaaaattaaaatgtcttgtaattttattaagaataaaccagtaccttaagaaaatttagttgttctaacaatttttttagtttattagtgtatttttaatatcaaagcccaatttctagaaagactattataaataattttcttttaattatggccaacttgatcacataaatattttttcataaattctctttttataaaccttattatgacttacacaaaccatttactgaatacttggagtttctgttttatcccaaacatcctcttttttaaataaccagtgattttattttaggacaaaaaatatatcacacaacatttttgtcatgtaaaattgttttccttttaatctttcttaccaaaaataccacttaatatttataactttttttgcatctcttttatttactgtttccttttaccttgttttagaaacgacctttaagtaatctttgaattagacaaaaattatttctttttaataagaaaacattgtttttcagaaaaacattttcctatatttttttttaaattggaaatgacccagacatttaagcaatatctattattttgtttaatgttactttagattctaaattatatgtcgttttttaacaagcatttattctattatatttatctaattaattttttaatagmttacttataaaaactgatggtcatcatttaaagttatttccctgctaaccaattttatagcctgcgaatttcaggtgtttacctatgtaaaaaacttaaggttaaataaatgtatttgttttttctttttgccaaataattcagtattaactgtttgctattaaaccaacaatattaaatgccttacttaccaaaagttacacaaagataattctcttttgggctgcatttatggctttataaccctcattccaaatattgacaccttataatatttagcaaacataaatataaaactacttgaccaataaatctaaacaataatatgtgttgacagtacttaagactttctaattttatttggccaataattttaaagccagcttatttattaaaagttaagtcatgtgaacttgaaaagcatttggattatttactaaatttatgagtactcctttatttttaagccaatttggtaccttgtggccacaacacataacaaaatgcatgtatgtatacataaacacacctaagcacacataaacagtcatgcaaataaagatcctatagcttttacttcagaactctagccatgatatatcaatacagactcatcagtttacaaaaaaaaagattaaatagaaacagtggtttttatctcaacaccagtagaaaggtcctctaaactagaaaaatacattttcttaagcaaaaaacacatcctcgcgtgttttataaactttaccaaaaacacatcctacgatacactactaaccctaattctccctgaaaaatcaaggattacttaatttaatataatatgactttaagtgttcaaattactggggacagttttgagactaactttaccaaattaatcttaccaaagattactaaaactatatgaactgaaaagcctctgagctagtttctattagtctgataaaaacttacttttctttaggccaattaattagaactctttcatataattggtagcaaaatattatttccacatgacatatctgaacatatagacataacagacccaggcagaggcagatcttatatatttaaaatttttcatttgcctgttttcaaaaatgttctttttcctacttaaactattaaagttgtctggagggaaagagggagggtatggtaatccacgtgttgcaagagaaaaggagcaggcaggggaatagtcaattatgtattcatctcccactcagtaaaatagcactttacaacagataagatgaacttagagtagttaccagtggagatatttaaccttttagctgtagctctctacttaggaacaaaaggaaaggcaactccttgcatgacttagctttaagcttaatttttccttttggcagagtgaattggggtgtcaggtttttatttgcctttcaaagtccccaccatatgacctcattttactaaatcacctcttaaaggccttatcttcaaatacagtcagtcatattctgaggtcctgggaggtggagcttcaacatgtgaatgaggaggaagggggacataatttggtccataacagcgctcacaagaaatcactagttaaagccataagcctcatatctaaggatttaaaccaggtcagcttattttaaactccataatcttaatgatcatctacttactgatttgtttatttgatagctatgaaacttatattttcatttgatctcactatacccaaacacccacatccctgttttttcctcattttcttaccaccaaaaacttattttcttcattccacagtggatagtcttcacattgccttgctgacacagtggcctgtgctgtatctgatagtatgcaaaccaagagtgcatgcacgcaaagcaacatacgttttacaaatacaaatacaaacaaaaagatgcacatagaacccactgggatcacttcttatggatatagaagctggagaatgagasctgttttttggtgtaaatgagccaaaatcagggtcacttttgttcaagctgttattgacttggttttcactgtaaacactggaagtagtctcgaattttagcccaggatgtacagcctcagagcaaaagacaagtaggtggaacacagcatcccttcctctagacaccgttacattaaaatggcaatcattacaagtacagcaagtatacttcataatgaattcattattctgttcataagctttttagggactatattattatcccatctaagaggcaggatccactgatcatgcttggtcgaggttggcttcccctgcctgtttgcgaatggtgccttgtaacgtggagacagggagtggggagagtgagggctgagaatctctactcagaggctttttcacactgtccagatatcatgaaataaaaataaatattttgacagtctaagagaagattacagtaacgtgatctaccttaacacaatagaacacagataataaggacacttgtaagaaccagaattcacaaaaggacaaatattcctctagattcctaagagtttaaactaagcaaaaaaatcctaagtggtgaatttttaaagtgtcttttaaaatttcactaattcagtaaacaacatataaatggattttttattgctttcactggtttctttgtattctttaaaattagaagtgtttctcttttgtttaatgaaattttactaatggttagtccataatttaacataaacactttggttgtactctttaaatactgaaatagacaaaataattgaagtttctgaaactggcaatcrttataagcacagtaaatacattttataatgaaataattattctgttcataagcttcttattgttcatttgatattctgaatcttttatctgtaaatgtgagccattctgtccagwgcttattgcctctttaatatcagatctccaaagaaagactcaaattccatacacacgaaaggcatatattatccacatttaaaagatggcctgtttttttttcccaaaatgttaaattttgccacaaattattttatagtgtttgtacacttctgttgcattgggaggtttttaaaaattctatttctctgaaacagttttaatcattctagtaatcgttgagacttgattctagaacttgttttaaaagtcttagtggatagttttctatttatctatttggattctttgcacttagatctgggaaccctttattatcttgaattttttatggatgttattgggaccaggaggtcatgtgagtgctcattcagtgagcactatgtagtgttgtagattttttaaaaaagaaaacgtaaggagccaggctttcaacccaacacaagggtccttttcctgatcccctaggaatgtgtctggttacagagagaggctttcctcaccaaaagtctcatgcaggtgaggtcaccatgtgaggtgactttggtgccacaaaagcatgtttctctgtgtgtgtgtgtgcccatgtatgtcctcaagtacacatacacatctgtttccataaaattctttctctttataatatccattaaatcttaacaagaaatgcaaatttagtacctaaatattgaagaggcgactaccacaggcccattagaaacatgggccaatgaataaagtataatgggaagctgcaaatactgagaattgaacaaaaagaaasatgcaaccaaacttgccacacacagctaaagcagcacctacaaaacagacatcaattgaaaagaggaaagccagaaaatcataagctaagtatcaaaattaagctagaaagcagcaacaaaataaacctccaaaaagtaaaaggaagaaagcaataagaattaagaaatgtaacaaaatacacaaaaaagacccaacagagaggatcgacaaagccagatgttggtagttggcctgcctaattacataaacgatctctggaaagataggtcaaaaataaagaaaacacagattaacttgtagtagaaaatacaatggcacaattacagatacttcagagatttccgaaaatagtaagggagcattatgagtaacatcatgccaagaattgcccataaacacatatattcaataactacaacmaaacatgataccaaaactgactcaagagtaaatagaaaacctgaaaaatcttattgttaatacaacatgtcaatagtaaaattttcttacagcagaaatacccaaattattattcttttttttttttttgagatggaatcttgctctgtcgcccaggctggagtgcagtagcgcgatcttggctcactgcaagctccrcctcccaggttcacaccattctcctgcctcagcctccccagcagctgggactacaggtgcccgccgccacgcccagctaattttttttgtatttttagtagagacggggtttcactgtgctagccaggatggtctcgatctcctgacctcgtgatcctcccgcctcggcctcccaaagtgctgggattacaggtgtgagccactgcacatggccagaaatacccaaattcttaaataatgagtatcctaaactgcaggaaacttatcagtccaatcctaagtataattcacagagagcagcaaaagaggccacactgcctcttatatcttgaagccagtctaaatttgattctaaaaccagatgagaagctgagacagaaaagctataaacaatctcacaaacttaaatgtaaaaattctatgtcaaacattagcaaataaaatccaatgagattttaaaaaatatagtataccatgtccaaactgtgtttaatctggatatggcaggatggtttaatagtagaagatttttaaagtgctagtcaccatgttaacagagaaggagaaaaaaagttatcatattagatgcagaaaaagcattagataaaagtcaacaacatttcaggacaaaatgtcttagtaaaatcggaacagcagagaacttcttaatctgataaaaggtaactaccaaaaaacatagtgaacctttacttaatggtgaaatattagaagcactccctttaaaatcagaaaaaaatgaggattcccataatctgcacttctattcaacactggactttcctaacctccataataatttaaaaaaaaaaagataaagaagtaaacatgtaaggatcagtatggaagacataaaactctcattgtcagatgatgtaacctcaataaaaagagaatcctcaaagtattattaataaaagaacccagcaagatgtctagatacactaacatttttaaggttgcatttttttacatctacattaaacagtatgtgtaatttttacaaaggtaacactctttataatagcaagaaaagatatgtttactatgaacaaacatatccaaacctgttcagatttatatggagaaaattctataattttttggaagtcattaaagaagtcctaagtaggatgatatgttcataaagaagactcgatattagacctcagcacaattctaataaatatcctggcataatatttatatgggccaagaatagccaagataattgtgaaaaaaaatatagtgaggaagttgcctccttaaatatcaacgtgtgtgtgtaaagtaaccacgactgaactcatgtagcaccagcgcgggcacagatgggtagagcacattagaagagagagccagaaacagacyccacatattccaattagggcttctaatgtttacagaattgttgcaatccaatatgacaagataagcaatctaacagaaaaatgaacaaaaaattctttatcaaggaggaaacagatatgcttaataaatacaaagttactcaccctccttagtaatcagaaatgtaaattgaaatcccagtaaaacactataggttgtttacaacagtctcttcatactaaacgttgaccaggatatggaagaggagctcgcagactgcagaactgttgtggagactgatttggagctattgaatacggccgtagatagatgctttcctccaaccttaacatagctcaccttgtgctattccattggcagatgcatggccgacgggcgctgccactaggggctccaggagtatgcacagggatggtcccatgtccacatcagtgtagtttgtctatcaataaatgggaaatgatagaatgaatggattgggatatgtgcatgcactaaaatcccaggaggtcatacaaatgagtgagcaagagccctgcgcatgaatgaatgtgaaactcataggtctattttggggtaagaaagcaaattatagaaacatgcrtggaattataaaatttaagataatacatcttaagtttatggtacagtatgtttagcagtgtgcaaaataatatagattgcttagggatttggagagaaaattttgtagaactatgtaagagtaggaacacaaattcagccttgtggcctcttgtgtgggacagggagaggaagtaggtgagggacaggaatatttaacttttattaatacttataatttaagttttatttcataagcagggggtggtgatttattctttacatcttttgtatggctttaattagtgcaaaattttttaaattaaaaaacagctggaaggcccctgctgagaatgagaagggaaagtgtgatctttgtggacaaagggcagagttctactgatagccataaatattcacatccctcttggtcccctctttttaagtctaggcacagagctttctctaatgcagagagacccaaaggacctccccccacaaccagtggctccccataaaatgcctatgatgcaagaaaattcctatacacacacaaaattaggtgcaattttcttccacaagtcaaagaaagaatatacactagacagcttattattcctactgactttgtctgtctttaaccttaaaacaaaaataaaggctcaatgaccatttatagataaatccagcctctctctcacctccttggtaagccacatctcagcatcctattttgtgctcactgggttctgtctttcagggactctcacgttttatttgttttcaagcctaagctactgtcagattaacatttcttctctagtttgcccttaggatactttatttgctacaaaattgctttgtgatggtgtcaccacactgccaatgaagcagagcaatggcaattaccrtaaagcacaggcccttcaaaggccagcccagtgagagtttgsgtccgagttctgcagaatgactaccagtgtgagtgctctgtgtgcagacaggtgaaagaggacccctgtctgcagcccagggcatcctggccttctcactcattagcccttgggattttcaccccacacacacttactgatgccagcagggcyagtcactgtgctgtccctggaaagagagagaggagcaaatgctaacctctgtggttttccctcttgacaccaattctccaactctgcagacaccagctgggtgtcctaaactcactcctattctgactgtaactacctagaggtagcgtcagactccacagggttaagggctcagtcccatcagccggcccccacttcaaatgccagttacagtgttgggtctccaggttacccacagttctgtccaccgtggctacaaactcaggggggttcccataacccttgccccaggttcagtaacttactagaacaactcacagaattcaaaaaagcattttacttaggtttacaggttataaagagtacaaacaaagaaatgcaatggcaaagtacaagtggggtggtaggtcacgtggcttccatgccctctctgtgtatgccaccatcccagcatcatgaagcatttaccaacccagagctctccaatcctgccacttaggagtttttaacggagtttcattcagtagggatgaytgcttaaatcactggccaactcatctccagccccctaccctccctggagattggaagccatcgaggagaccccagctgccagctatcttattaacatgcaaaatgaacccttatcactaggagatctcaagggttttaggagctgtgtgccaggaactggtaacaaagaccaaatatttattttttattctaagacgccctccccaggtacttggagcagagacagggccgtgcaggcagagtggtgttcagggctgggagcaggtgcctgagctgaggcaggtggggagaggggagaggtggtccagtctagggtacttggttatcagccckttcatttgttctctaaaaccagggtgaaaaagagaacagacttaacgggagcctttagactggaccccacttacctgaagcacagccatcaggattcaggtaagctgtgagcctgctttctgtggactgtttctggtcttgttcccctcagagctgccctggaggtccctgggagttaggggaagaccatccatatccaaggaggctttcacagagaagacggggtgctgtgcattcctggatttgcccttgtagcccactccctgtgggttggttaagaggcttggggaggctccctgggggaggctcctgctctagaagcactgagaacctgctgggctcattgcaggagcaggggcaggtgggcacagccatgggattttaatatgggcatgcatactgcctgcagacaaggaaacgtctttaacataatgacagccataatgtctacaaaaaggctttgcatcaccttccaccaataccatgagggggcaaagtaaatgaagaaggttgagtagggttggtgagggaagagaaaataagatgaagccaaggctcagatcagcacacaaaggtgcacctaagtcatttggtcagtaggcctgctctctgtgcctggcgctggtgacagccaaggaggctcagcacccacctgcaatgtctagcagggaggggatgagtgggcagttatcaagtggcatcaggggacacaggctgctctggggccacagcacggaatgcacaattcttggcttttgcacttcacctatgtcgtctcatttgacttgggccagtgtatctggctaattaatggtaggcattgaactagaaccaaaataaatagaatttttttgataactgaaaattctgtcacaaygctggtgaggaggtaaagtggttacactagtcatgtaggctttgaagatgtattccttattattaaagatgtacatttggaaaatagagtcaacgctgggccagaaaattcctgtaatcccaccactcaaatgcaaatattgctaatatattgctgtatttcttaccagtcttgttcaatgcattgttcgctttgttttaactctgcaccacttaccaattaccaatatacaagctgcccttcccacatgtayctcatgaagttttacatcttatgaggcacataagacctattaagtagtccacagttcaagtaaaaccattgtcagaggaaactactggctaagaggtttgtcatttctttatgttaacagtaaagaattgtgcaaggaagcttctaactgggccagttctttactcgtccataaggaagyagattcacggagaagcarataggaacttgcactaattagacaccgtatctgaattcttctactgaaagcctccagtttttctttcctgtagaagtttctgcaatgagggaaatttataattctgcaccacccaatatggcagccaccagtccgcatgtggctactgagtgcttgaaacatggctcatctgttgaagaactaaagtttaatttcctttagttttaattaacttaaatttaaatgtcaacagccacatgtggctactagctaccatatcagatggtgcagtaatagaaactaaaaaggtgggccattccctcattttcattcatgacaatcatctggttctttgacaatttttttttttgagacagggtttggctctgtcacccaagctggaatgcagtggtgcaaccttggctctctgcagcctccacctcccaggctcaagtgatcctcccacttcagccttccaagtagctgggaccacagacgtacagcacaaggcccagataattttttgtatttttttttttttggtagagacggggtttcaccatgttgccaaagctagtcttgaactcctgagctcaagcgatttgcctgccttggcctctcaaagtgctgggattacaggtgtgagccaccacgcctagcctcgacaatttcttactgagtgcttcctgcatgcactctgttgagtgctgttgtttcatttgcagtggtctctgtgaatcattgccagatgctgctattgatgttatgtttgtttaacaagctcccttactaatgagaggccatgtgtcgtaaaggagagtactgtgtatgggttgagataggctgtatgactttgggcttccatctcagggtcactcataaaacagggggtggaggtcttgcatctcctcccagcactgccattttttatgctagtggagaaaataactattagggaatgataccaagtggtgacttcagatgttcttgtaaatacaatgtaggcactcctgtgcagtggatgaagtgcagggtggggcgtgggttgtattaggtggacagcttgtcccagctgagcatggtcaggkcctgctatggccctgccacagcccctgttgactgcggaagtaggggacactgatgtgcctggtccagcccacattcgtggatctactcccagagcacragactcccttttccaccgatctgtgcagcaggactgcagcatgttgtcataatcctcacctgatgtcttgygcaggatcacttgtattaatagaaactcccgtctctgagcctgcatycagggttcyttctyctttatkgtcctgggrtttgctgctttaggcatgaggggaggctcaaaagcaaatcatccatttttcataaccaatgtggagccaatgattcctggatgttaaaactgactcagcagatattcactgagtgtctgctctgtcccagatactgaactaagatctgctaagatccacggatacagagatgaataatcccaccaagagtttcatyctcctttttaaaatattctaatcactccgtatatcacaaattcaccttcccatgcatgaatgaatgaatgatgaacgatttacgtgatctgaatgctaactctctactgggcactagatgaaacctcagatgttcatgctatgtaactgcagaaagcaaaactaatgggggtctattgagagtgtaacatttccaatttgtgttttgggcatcctgttctcgggacacacccttagaatatgttaccctgggaagtgccgcaaagaacacccagacccagcctttggscagttttatttctggcttagaagacacaagaaatttacctggaaaatgaaaaggattagcgtgtgatcaacaaacctgtctaacgatttcttttttctttttctttctcttttctccagggcttatcactgactaccgggtaagtgrgagattccactgtaatctcaaatgctagtggagtgctggggggtacgccacagctgtcacacatctcctcccccactctcatgatcagcacgcactggtgggcaccttctaactgggtcctaactgacaaattaggggggtcctgccaggtggcgggcagctctgctgaaccccycagtcagaggtctcaggttaggagggggaaacctggaccctggactttgctcctggggaggagaaaggagcttckgcccctcattcctctggaaggaaaaggcccttctgccctgggctgctgtgtgcctggggctgcactggtggtggcagtgggagagtgagggaggagtcagggaacagmaaaagctcccaggtggggccagtcatctcagcagcctagtctcaaatgcattggtcctctctcgtttttatttgaaacaagtgttgaatgaggcatactttgaaaatgccaggttgttctagtgttagtctggaaaggaatttgggaccaaaggcagtactgcgaagcttatcaaaagaatagaacccaagggggagggtgaaactcagggggaacagaggtgtggccactgagctggctgtcttctgccatcaagagatgacctgtggccgggtgctgtggctcactcctgtaatcccagcactttgagaggctgaggtgggtggatcatctgaggtcaggtcttcgagaccagcctggccaacatggtgaaaccccatctgtgctaaaaatacaaaaattagctgggtgtggtggcaggcacctgtaatcccagctaccccggaggctgaggcaggagaatcattggaacctgggaggcagaggttgcagtgagccgagatcatgccactgcactccagcctgggtgacagagtgaaactctgtctcaaaaaaaaaaaaatgacctgtgtccacgtgtggtgggcaccagacatcatcaaagcagaggctgccatttcccgacagaggtgtgtgtctaagtgcgtttggagcaaacattgtcagcagccggtgtgataatgacccagcaggggcttcccctcaaaggcatgggtagcttgccttcttcctgtgacagctgtgagccaggaggcaggggggcagcagtaaaccttcccaagccatcaaggctggtcctaggacagttttggcaaagtttgcctgggaccacccagctctacacccagggagaaaggccagggtgtgtgcacataagggcacactgggaagatccatggatgatgccatttaaaactttcatataatcccattgtcaatctgacttatcttttggaaagttattattgaagggaaaatatgacaataatattaaaaataacctgaggaccagctcaccctgaccttgcatcctcgcgccgctgtggcctgtgtttctgtctcctcctctggttcatggcctttctcagacttcatgttgcatgagggccatgtgctgtacaaacgacattgcagctggttctcatggcactgaaactaaaattgcaataccttctccactcctccacagccttagtaagtacagaaaatctacacagwatcccatgttatatggtataattatttccctgttatttaactacttccctgggaaagtcccttgctttcctaaatgactatgcagtgggcatctggcacatccagctttctgctgaggatgagctgcttcctgcagcatgagactgaaaatggggtaacaggcacgaacacttcatgccttttattttattattttttaattttgctctttcccagcttagatatcattagaaaaaaaggcacaacaccatctctggttcacataaaataacataggctttgctaaaaactccgtattgactaacaagtcctctgggaaccaaagtccttttagataaacttggcactgtctttcaaaggcctggggcacaatcccyagcaatgctggcttatgttacattgcccaagacaaaaaccagcccagctctgcccgcatctagcagctcagggaacatgatctcctcagacagtttctaccgttcaccaagaatcacagatctgtactggcacccgcctgcaggaccacgaaggtggcagggcttgcctgaggcttccccagcytgttcttctgctccatccagggccttccagtcctcagggctcactccttcttcccaaccctaggttcttcatcctactccctccaccaccagtccctgaccctcatggggtctttctgtccccttctgtctttagtgctgagcctcactctcctcagcacctcaggccctttccgcactgctaatccagaagacttgagcccaccattcaccctgccttgataggccaagcattctttgaaaagcgtttgtccttctgttacttcaactagttatctctactagttatctctactagcttaatgaaaggcattggcctcggttaaggaaaggtcaagcatcagcaacctgtgctccagccctactttcaaagcatcctttgatcagcccctgtactccccaccctgttggtcctgctgtgagacctgggtctctttcaccccatctcaaggcagccccttgactggcactccctttccaaccaggagctatgagctgctcctgcagctactcagaggtgagtgaggcccaaagccacctccaagactcccaggccactgagggagacagaggcgcagaccacgcaggccctgatgcctgttctgaaacacacctgagacacctcgatcctccagcctgccctttgtggcccaagaggacatgccccaagtccttagctagtcctctgcctgccagctctcctcttgccgcttgtggcaggcaatgatgctgagatccctggcactatggctggcagtgcatgagtcaggagccatgtggggacagtccttgtttggctgcctgttgcttctaaaggaacccaggcagatgggaagcaccacagcagcccagtcccactggcatccatccaccaggcttgggaggctctctggggtgattggccttctgtgctgctgtgttcctagagagggctggagatggcacatcatgtgttcacagccaatgtttcatggctgatgaggggacaaacgcatgaaccttatgaaagatggaatgcagaaggtgaaagctgttctggagcagaggggcttctaaatgcgaagcacaggcattaggcctcagcataccagccccaggaagcaggagtggccatgtggggacagccccgggcagccaccgggaaagcacacacaagttggccgggtgtgagtatgggagcagcctcagggccctggtgtgcagagcccccagggcacctctcagcccagctttgctctttctatcccttgggtgcaggcacaagtgtcactgcctcttactgaaccctctccatctgccacaacccagggatgtccctggccgtatttcccggcatcttctctttgctgctattttagctacaatgcagtgacctctttccctctctgtgctcacatgcacctctcaggctcctctatgattcccaccttgagtgtgaattccaggcaaatgtccccagagcatttgctttgctgggctcagcagggaatgggaaggaatatcatagacattctcattttgttcaaagaggctggaaacccaaacctaaggcggtctggggagaagatccatcagtctggggagaagatccctggatggtgggctgcctactgggccagtgagaaagtgtggggtgaaaaggatgagcagaccctggtagttctatcccccgtcagtagatgagggcacgaggacagagtgttagtcccaggaggaggctgttcaggacgcgaggtatggcaagagagctctgtgttctttctgatggtgaacggcacactgaagatgtaagacagcaccatttgcctccagtttgcacggtcctgggtaaagtgggcatcattatgcctgtttcataggggaggagacagaggttcagaaaagtttgctgaacctattgaaagacaggaccacggacctaggtcacaagccactgagccatgcagccctgcatgctatttggatgaggaaactgcatcttctggaagatgttgatggcttatcaaaaatgggacaaaatacaggtttaaaaatgatcaattgtggaggaaaaagtaccaggaaatagatcatttgatgtccgggaagcatcaaatatgaattgacttctacataaagaatcctttcagatgacccatgaatgagggtcaaatgggttttactcctgatttatttaagtacgtccatcaacaatcttccacaaaatgtgggctggccgcgccatgccaagccaggtgctgggcttggggctgggactaaaaaggcaaatgagacagagtccctttcctctgggaacttagtctggcaggaggtgaggctgggtacacaggggtcacagctgtctactgcaggcacccaggagcatattgggggaggggacagtgcatcgaattcagtctctggagagaacatgacaacatttggagccacatttgagtgagcattcaattagattgtgtgcattttcactccgggaccacagaaattaagtttaccttggtattcttccaaatgttagactgaaatctaacattttaatttgtaggaagttgaccagtcgaggaatgattttggaacacagcgcccatgctgaaccatggcagggaagcgtcgttttactgactgttagatagtcagtcagctagtggtgggataaggggttcttcttttagatttcccaaaagacaagttagcttagttcttgagcagcccaacagcttgcaaacagtgctgaccagcagacaactgtgtgtgcaggttcggctcaggctctgctgcatgctggcttggtgacattgggcaagtcactctccatacctgcttttgctccaagaaagtggggatccgaacccttgtttacagtgctgctaggaagctcaaaggagataatgtgtcaacacaccgggcagggcctggtgtgcaactggggggaaccacactgaatgcctgagtcagaggttgggtccctgtttcccttttgacttgagaagctcctgcagaaccatggctctgggcccttgagctacttctcttgtgtycagaagcagttgccacctgttcattccacccacactttattttatttatttatttattttgagatggagtcttactctattgcccaggcttgagtgcaatagcgccatcttggctcactgcaacctccgcctcctgggtcctgcctcagcttcccaagtagatgggattacaggcatgtgccaccataccaggctaatttttgtatttttagtagagagagggtttcatcatgttggtcaggctggtctcaaactcccgacctcaggtgatccacctgccttggcctcccaaagtgctggggttacaggcgtgagccaccgcatccggccttcacccacactttaaaaaacacctgcaagccctcctactggggagcagtgcgggactcaggactccggctaagcagtcccacccggcagatggcccagctgcgctagagtgtcgcgcctggctgcactgtgtcacccaggcccagtagggagctggctcagctctcctcagtgtctcctttatagctgaaatagaatatgactgttaagatgaccacgcagtgctgctatgctcacttcccagcagtctcctcgtcccagtccttccttactcacttcaccacatctccatccctcagtgtgtgggggccggtcaactgactgggtctgggaaaaccagaggaaggacagggaaagcttctggagcaccagcatggagacacacattgtgtcttctgatgaggggtcttggggtcactccatggtgatcagtaggaccaagagggaaccagtattgctctagaaaacagtgccagaacatctggggcagaagtggcagacaagagcaggttctggctccctccttcctcgtaggcaaggacatcaatgaaaattacccccttatccccactggatggtgagctcactgggggcagggccgtgtcttccctgtttgctcaccacggaaccctaggggacagcccaaggtctggccctgctgtgcatgccgcaaacacctgttgagtgaaaacaatgaacatcactggctcccaggtcaacagtccccatctgtgttcctttctcttggagatttgyaaagaaagcctctgcccacatcaccgagggccctgccatccaagacaggccatggcaatgggagcaggntgrccaccagggaatyggctgcctccaagagaaataggcgagccggtgagccgaaaaggaagccagcttttaatatcttcctcactgatggtctgtttcatgtttcatttcagcattggcagataccactgggcagaagatttcgctctttgaaaatgtggtttgtatttaggatgtatggagtcaaaggactgcaggcttatatccgcaaggtgactttgtttttattatttatcacggtaaaattgcggaggtctttcgggactttagaaataaattcaaattttttttcttttttttttttttgagacagagtttcactcttgtcccccaggctggagtgcaatggcacaatctcagctcactgcaacctctgcctcctgggttcaagcgaatctcctgccttrgcctcctgagtagctaggattacaggcatgcgccatcatgcccagctaatttttgtattttaagtagagattgggtttcaccatgttggtcaggctgatcttgaactcctggcttcaggtgatccacccacctcagcctctcaaagtgctgggattacaggtgtgagccactgcacctggccttcaaatgtcttaataagcaaatacatggcaagagaaccagactgtagtttgggttgttgagatgaggttatttataagatctgttaagtcactttcgttaagattgcaggttatcaggtccaggaagatggtcacagtagaaacatcacataggttgtgctttagccacatctagccaagaatgaagttcattgagcaatggcaattatgagaacataaggactgtgtttttctcccccaaaattgccagaataagatagatattccctagtccagtggttctcagacatgcttccagaccagcagtgccggcctgcagtggggcccagcaacctctgttttaacaagcaaaccagacaccttctctatgcactaaaatttgagaaccacttatcagctccaagccccactcccctgctttttttttttttttttttttaaataacaattggctgggtgtggtggctcacgcatgtaatcccggcactttgggaggccgaggtgggcagatcatgaagtcaggagttctagaccagcctggccaacatagtgaaaccttgtctcctactaaaaaaaaaatacaaaaaattagccaggcatggtggcaggcacctgtaatcccagctactcgggaggctgaggcagaagaatcacttgaacctgggaggcagaggttgcaatgagcagagattgtgccactgcactaaagcctgagtgacaaagcaagactccgtctcaccaaaaaaaaaaaaaaaaaaaaaatgaggaaactgagtcctgaatatgagcctggatctgcctagagccacccgtttagccagctgcagaaggcctgctgctgttctgctggctctctctgatcctggtgtccttcctaagctgtggcctcatcttgatggacagaggtccccaggcttcatgggaacaagcacacttatgatattcagccttagtgatggtaacagccctccattttaagtcctgttgccacttcacaaccaggtgtgcaggggcaggtgtccccagccacctcctctgtggcacagcatatataaacacatccatctgcaagcttcatagaatgcctaggatgtgccatgaactgcctactcccaaagcttcggtgaggacagttccaggagctgccgagcactatgaggacctgtttgggggcgagaactgggaaaggagtatgtatatgaattcctgggtaggaaatccccctctacccatttgagacgaattcagcttttttggggaaagaaagccaaaaaataagggatttatctccccacaatgatgacgtctttaagctcaaggacaactagttatgatcatgctggctcctgtttaaaacacactccacttctttcttaaaggggacccaatcctgccttaggagcagagtccagcgatgctcaaagcctgtctccttgggcgggaaccggctttcgggatcgcccatgaggccgaggtctttggcgctctctggtggcatgacgaggaaccactcgtatgacacgtgtttttgtcccagccaccccctgcccgcgaggcgccgcgtttccgcaggtcctccccagcacctgcaacatgggggccctgctgtatccgcgggcttagaatgagcaaggcacsggcctacgccacggagggctccttctcctaggatcacatgctgtctgaatagcttctgagttctataactatttggaagtgaaataaggtcagtgtgatattcaatgagaggaaggccgtttctgaatgtgacagagcggacaggatgcccagctctaggtggcaaacgcggaggaggagcaacagctgtggcagccacagagctgcagctccatcaggctgccttagaatcccagctcagccaaggcctccgggtgcaccttgggcatgtcgctcaccctctcccagcctgttttcttatctccaaaatggggataatcatgatatcttctgtgttgtgggctgtcctgaggatgccgcagtggtgagcgctggcacctcaagcacagaggagcaactcgatgggcattagccattgtctcttccagaatgatcaaatacctcctcacggtgtttattctaacattataaaagacagtttgggtgggataagaatagtcccatgaacagaagaaaatgacaattggtgttctgaggacactagacctgtgctaatgtagggaatgagtttcttagcctgcctggaaacagctggtcagtgaacggtaaaagcacttgaggaaaattgccaagagcgtctaaatgaattatacatgggcagtctaataaggttttctaggtagttaagttctgaattaaatggccatgagaaaaacagattttccctttcctctttgaagcatgtccagctgtcccatgagtttgagtcactggtgcgccaggatccccgctttgaaatctgtgtggaagtcattctggggcttgtctgctttcggctaaaggtttgtctacatctattccattcttcattttctgtgaatgtgacagaggggaaagtgttgttcattacctccatgctcaaacactggcactggctctccagagatggcagagcaaagcctgcattctttggcccaccggcctgccctgccccatgctacacagccttgtttccacgcacagcggctgttcccgcttcctcaagcctgccatgagacttctaacttacatagcttattggccgcagaatctttaccatttttccttcctcaaggctccatcccacacctctgccactggccctccttggaggacagcggcctgtccatagcctcactaatctgagtgtcttctgtggatcaacagcatcagcatcatcagcattgtctgggagctccttagaaaagccagtcttgggccccaccctagagctgctggctgcgcacctttacaagatgcccacacaggagtctgtttgacactgtgttgtggcgtgctgttattttgctgcctgatgctgtgcattcaccaggtgagggcaggctggcccacacgggttggggcataagccatctctactgagaatcatgatacagttctcaaaaaggctctaagatgcactgcacacatgccccttggtaatctcccttgtgtacacagagccaggtgagaccaaatgctctgtttggtttataaggttttttttttttttttttttttttctttttggagacagagtctcccactctgttgcccaggctggagtgcagtggtgtaatctcggctcactgcaacctctgcctcccgggttcaagtgattctcctgcttcagccttttgagtagctgggattacaggtgtgcgccaccacgcccagctaatttttgtatttttagagatggggtttcaccatgttggtcaggctggtctcgaacttctgacctcgtgatccacccgcctcagcctctcaaagtgctgggattacaggcgtgagccactgcgcccggctgaggtagcttttaattcacaatcatttcaagcctttccaggaggcttccttgttcaaattaaagacagcactcaggagaaggagcaggctggggtcagtgtcattgtcaaggggctgccagtcagagtgtggcactgccactccacctactatgtccttttgcctcacctgactcttggagctctgaggmgaggaggagctgcagccgtgggaaagcctgcaggtagcagagcaggagaggagacttgagcccttggaagagcacaaagtgatgagacctgggaggtgcacagaggaccgagagggcaagacacgctctggatgtttgtgggagragcctcagtccatccatgtccaggatgtgtcyagtcaaccaaccttagtgttggcatcgtgcttattagactcatctgctgtcaagcagttgttttcattcttgtttttgttgacagttttcttctaggacttttatattctatttttttaacagttctattgagatataattcactttgttcatttaaagttwacatttgggctgggcgtggtggctcacgcctgtaatcccagcattttgggaggccgaggaggccagatcacttgaggtcaggagttygagaacagcctgaccaacatggtgaaacctcgtctctactacaaatacaaaaattagtcaggagtggtggcacatgcttgtaatcccagctactcgggaggctgaggcaggagaatcacttgaacctgggaggcggaggttgcagtgagctgagattgtgctactgcgctccagcctgggcgacagagcaagactcygtctcaaaaaaaaaggctacgtttgagtakttttagtatatctacagaattgtgcagccatcaccacaatctaattctagaacattttcatccccctaaaagaaaccccacacccagtcatgccactttccccatcctcagggctactaatctgttttctgtctctgtaggtttgtctattctggacatttgtataaatgaaawcatacaacatattgccttttatgactgtyttcttcacttagcataatgtcgtcaaggttatggcttttattttatttgcataatttgtagatgccaccaaacccatctgtgtactggtttctgtccattcttctctcatgccatatagtgagtcctctcatgaaggaagtccaaggcatttttcagctgacaaatgtttccttttgtaaaactttgcttgtgcctccagtctgcaaatccagtttctggaggaagcgcgttagtcaaacactgtggctcacttttctgcctccatatctgccatcttggcctcactctctcctggtctaatcctctctaatctgaatttcaggtcctctcatgctgaatgcttcagtgtgtcatgtggctctttactaaagcagaagtgatgttgctatggcatcacggtccctctccctccatcctcattatggccagaacttgcttggtctccatctgtgtgcactcagcctactttgttcattgtaattgtcccacctctgctaggcttcttgcctctacttcatggaagtactgccctatccagtctgtttgaaaatggcaagcacatttttcctaaataatttgcttccattttctgtgctctatactttgcagatgtttgctctcatactgagtctttttggtaaaattccattcccttggtatgataatttctttttttctctatcctcatccttgagtcctcatccagattcacccagccttggtgttcacccacggtttccaaatttcctctggcccatcactgtctacctgggcacaacaggagcagggcactcaggcccatagctagaggccaggggatttgcacagctctatggccaggtgccaacatccagcaggtgctcgtctgaggtggttccatgcagtggatagaactctctccttcccactcatcctccctgcttctccactytgaagacagggccacgaagtgcagtcctgtgaggtttgggtgactaggatgcagtgtcccacattcagttccttctatttaagactccatggcttagaagacatggagtcactgcctgcaaacagaagaaggacagaggagcaaagggagatggaggtgaagtgtcagaagaccggctgctatggaagcagggcccaggcaggacagcaagggcttcccattggcttattgataccaggcttccawctctagtgtagtgggaggggtggggcctctgcgcctaccccaggctggtgggccgtgcttgtctggagaggcaccagtggttgctcggtcctgtggttcatggacattcttctcagattctagcactagcttgaccgttatgcttcattttctaggttgctgagactcttctatgtttccgtgagaatttagagactcctcccctggtgccatcagaaaccccaattctgctgtttaagctcatatatttgtagattacatatccagggatccttattttccttaaaaaaacttagaccatggaagggtcatcttttgatggcacatcagaatatagagaaattgtctgtggggagaagatgcatgcagtcttttagggtgcattactattattttgttgaattttgtaacatcgtaaacgcaagggggatggttagtcggcttcttcctgatgtacggtagggttgccaagcactgtctttcctacatgaccagttgatttttgagtcctcagagacctgagcacagttcctctctttcaatccctccagggttccaacaaagtgaatgaagctcttctgcaaagaataaacagtgccaaaaaaatccacttggttccatgtcacctcagggacaagtttgtcctgcgctttgccatctgttctcgcacggtggaatctgcccatgtgcagcrggcctgggaacacatcaaagagctggcggccgacgtgctgcgagcagagagggagtaggagtgaagccagctgcaggtaggctgccctgggctcattttctgcctgtctccttgtccygtggcaagagtgtcctcctggagtccagacccagctacaggcccagcccggccactcaatgctgccagagtgcatttccctcaccttaaaataaggaagagaaggccgggtgcggtggctcacgcctgtaatcccagcactttgggaggccagggtgggcagatcatgaggtcaagagattgagaccatcctggccaaagtggtgaaaccctgtctctactaaaaatacaaaaattagctgggcgtggtggcatgcacctgtaatcccagctattccagaggctgaggcaggagaatcgcatgaacctgggaggcggaggttgccgtgagccgagatcgcgccactgcgttacagcctggcgataatgcaggactcagtccaaaaaaaaaaaaaaaaaaaaacaagaagaagagaaaaccatgttaattctggagaagtagaaggaatgatacattgtaataattcttttaaaacttagatttttactttttattcttacatcaatctctataatacttcaggtttcttcaaacagcatttgttgagataacttactatcataacaagctcatataagaaactggtgacctttagagaactaatgaaaacaataaaaagggaatttattatgactcacgacttgccgtccaaattcttgatggtttgaagaaaggatatgtttcgactaccgggcttcttgcagttgtgaggggtttacccctcatagttaaaccctggagacagcatgcagttaatttgtaaaaacaaagcacacattttaaataaatgcagtgttggcaacatggagggtatttaaaattatgtttgtgggaacctagacaaccttagaaagcctcttcattaggttatcttaagaatgtcatcctgttggggtatgtctacctttttctgtttattttcttttttttttttttttttttttgtctttttgtcccatttggtggaagaatctgtgatccctccttagggtctgcttctctttctctctctccctmtcctttttgcaatggctcgttcattataacccgtgggggatttagaatctgtggatcatgtaatgcatttcctgattgcctacaatttttatcttctttgctgttgattttaattgtgaatatctgaaaaagtatagtgctcaacaagtcagaagttgaaaatcatgtttggtatatgtgatagacctgtccatggctcctgaaagttgaagccaaagggctaccttctgagtcaaaatgtgccctgagaaccaggtcctttccctggtgcaaccagggccttcccctactcataagctgagaaagacctggggtctgaggaagaactgctgacccagagcaactccaaagtggtatctcaagcatctctggaaggtagtggggagaggcttatatgttgaasttattccattgctctcagcataagactatgtgaggggagggaaagtaccgctgtaagctctgtaygaaacaaatccctatcaggcaaacgctcccgactcgcatttctgcaacccmacgtttgcatctrtctcataagcatgtatcatatcaggatcttattgacatacgcccagaagaacatatgtggagagtgtagctctgaaaatttatcagcaaagstgtgtttccgataggagtctcagttcctctggagtcattatatttgctgtagattcaaaaggtaaaaatgaaattcaatttttaaaaagatatgtgatacaatagtaagtcctaatgcatgtatgttgttttggacagattagaacaayaaaaatcttaatatcttgattttacttgtacttatttgagtttattacacatattcatgtggtcatagctctgagagaaagtaggaactattcttattttacagagggtagaaaattaggcagagattctagttgacactaatacagttttcatcagagaagccagattggcaataaaaattcctttatttaagttcaaactctttggcattgcacaattgtctctgtttcattggagaaattatacgttcgttctttatattcaaataagaagtacatgcaattcttattctttatttttttaatttttatttttttatttatttwtttttttattgatcattcttgggtgtttctcacagagggggatttggcagggtcataggacaatagtggagggagggtcagcagataaacaagtgaacaaaggtctctggttttcctatgcagaggaccctgcggccttccgcagtgtttgtgtccctgggtacttgagattagggagtggtgatgactcttaacgagcatgctgccttcaagcatctgtttaacaaagcacatcttgcaccacccttaatccatttaaccctgagtggacacagcacatgtttcagagagcacagggttgggggtagggtcactgatcaacaggatcacgaggcagaagaatttttcttagtacagaacaaaatgaaaagtctcctgtgtctacctctttctacacagacatggcaaccatccgatttctcaatcctttccccgcctttcccccctttctgttccacaaaaccgccattgtcatcatggcccgttctcagtgagctgttgggtacacctcccagacggggtggtggctgggcagaggggctcctcacttcccagtaggggcggccgggcagaggcgcccctcacctcctggaccgggcggctggccggacggggcggctggccgggcagggggctgacccccccaccttcctcccggatggggcggctggccgggcggggggctgaccctcccacctccttcctggacggggcggctggccgggcagaggggctcctcacttcccagtaggggcggccgggcagaggcgcccctcacctcccggacggggcggcaggctgggccaggggctgaccccccacctccctcccggacggggcggctggccgggccaggggctgacccccccacctccttcccggacggggcggctggccaggcagaggggctcctcacttcccagtaggggcggccgggcagaggtgcccctcacctcccggatggggcggctggccgggcggggggctgaccccccccacctccttcccggacggggcagctggccgggcagaggggatcctcacttcccagtaggggcagccgggcagaggcgcccctcacctcccagatggggcggctggccgggcagggggctgacccccccacctccctcctggatggggcggctggccgggcggggggctgacccccccacctccctcccggacggggcggctggccgggcggggggctgattcccccacctccctcccggacggggcggctggcctggcgggggctgacccccacctccctcccggatggggtggctgccgggcagagacgctcctcacttcccagacggggtggttgccaggcggagggtctcctcacttctcagacggggcagctgggcagagacgctcctcacctcccagacggggtcgcggccgggtagaggcgctcctcacatcccagacggggcggcggggcagaggcgctccccacatctcagacaatgggcggccgggcagagacgctcctcacttcctagatgggatggcggccgggaagaggcgctcctcacttcctagataggatggcggccgggcagagacgctcctcactttccagactgggtagccaggcagaggggctcctcacgtcccagacgatgggcggccaggcagagacgctccgcacttcccaaccggggtggcggccgggcagaggctgtaatctcggcactttgggaggccaaggcaggcggctgggaggtggaggttgtagcgagccgagatcactccactgcactccagcctgggcaccattgagcactgagtgaaccagactccgtctgcaatcccggcacctcgggaggccgaggctggcggatcactcgcagtttggagctggagaccagcccggccaacacagcgaaaccccgtctccaccaaaaaaatacgaaaaccagtcaggcgtggtggtgcgcgcctgcaatcgcaggcactcggcaggctgaggcaggagaatcaggcagggaggctgcagtgagccgagatggcagcagtacagtccagcttcggctgggcatcagtgggagaccgtggaaagagagggagagggagaccgtggggagagggagaggggggagagggagagggaaagggagagggagagggagagggagagggacttctttattttttttaatgtagccatatgctcatgctattttttttccctgtaggaatcaaaaattgaagagagatatatctgaaaactggaataagaagcaaataaatatcatcctgccttcatggaactcagctgtctgtggcttcccatgtctttctccaaagttatccagagggttgtgattttgtctgcttagtatctcatcaacaaagaaatattatttgctaattaaaaagttaatcttcatggccatagcttttattcattagctgtgatttttgttgattaaaacattatagattttcatgttcttgcagtcatcagaagtggtaggaaagcctcactgatatattttccagggcaatcaatgttcacgcaacttgaaattatatctgtggtcttcaaattgtcttttgtcatgtggctaaatgcctaataaacaattcaagtgaaatactaattgtgtcagatgatcatcttgttctatgttgtatcaaatttattcttgtgatacagacattccctccaaagtagacaaagatacagcatccttggatgtttttaaacggcattcatttattcagcaaatgttcactgagtgcctagtatatgtcaggcactgttctggatacattaacaatacacaggttttacttgaagatgacttcaacttctgtggaaataaaattagaaccaagagtcaacctggagcaatgagatcgaggtctctgctgtgatgggaaggattctctggctttctgggccttgattttctggtccgacaagtctatctgtcctgtagtatcatgattgataagcaactgaagagtacttctgtaaacattaattccaacaaggatatggtatttactcaatctcactttaagttcactatctgtattgggaaccattttgcttttagaaacatgtgttttaatcctaagattagttattgtcctttgaagactacagaactatcaaaggcactgtcagaaagggtccttgggttattaccaagtatatttgaatttcaaagacctcagatatctatgtgaactaagtgaatgatacgatctgttactcaaaaatctggaaatatgtcagatgccaagtagttccccatctaatttagtcaggtcatttgttctctactcaacagcaaacaagacctgtcctccatcatgatgtggggacagaggctgtgtttttggggcccaccaggggccacccttgataggaccagtggagtgtggagtactcaggttgagttgaggctgggatgtctaaattttacaagattatttttcagcccgtgagttaagattgctgcaagggctccagtgtgagccaccaacatcattgataccagctctctgctttagtgggctcatccagcctcatccacaaatatacttcagaaagatggctgagacctgatgggagggaggagactgggtggcaggggccaacggggatgctgtacagaagcagggcaggaggccagcaagtgactgaagatttcctccctccgaactggctggatccttttgatggagagtctaagacatcagcttagacacagacccaacagagagaaaagcttgtctgatttctcgctcatttctaggtaactcatagcagttcaccccacctcctgacttctccaggttcctccataaagtggttctcagatctgaatcccccagccctagaaacaggaagaataacttcctcccagtttatttaacaagaacacacccatagcacttgctgtatgccaggcactgttacacgtgttttaaagtattaatttaatacttattttaaaattctacgatgcgggctcaattattatgctcattttacaagtgagaaaactgaggcattgcaaggtttagtgatttatcccaaggtcatataatcagtgaccaagctgggattggagcccagtcagcctggctctagaatccatgctcttgcccagtaaactatgctgcaaaagatgccatctgctacccaggattaaccatttctgaaggtaactggcagtgaagacatttattctcttctgggtaaagccctatctttgcctaccaaggtaaagtcttggaccctagaccatccctagggggcccctagaccccacatccaatgtggggaagtttttaaagttttggattattcagactaatctgtggtcaatacagagcatctttatttaaatacatattcaagttagtgtcaaaaagagtgcacaaagtgctgctggcactggaattagatgtttccttactgacctctggtatctcctgataacaggcccctcctgcttagtgttgggaaagtcccagattgatctagacacaactaacagctgatatgaaagatttgtcctggaatcacatgtctcctctctaaaatccagcaaacagcaatactccctaaacctggagaatctcattgttgctgaccacatgcccatcaccaaggagcctgcaggaaagcccaagacaaaaaggggagcaggtgtcactgggtggccccttgatcatcatgagggtgtgccacagttcaaagagaaacaagagaggagaagaccccaagggagggcagttctaatatccactgactccacacccgcaccccttaattcagaaatccaacagacatgacaaattagaaactgattctgctggtatgcaattcagaaagtctacatttgaggaaagatatgaacattgactaacggcttttttatctagggatcatttcattgcttttctaaattatgtaaatatccaaacgtcaaacactataatttttttttgccttttcaactgcatttgatatcaaaatctatttccttaatacctctgggttacttgccataacttacacttgtaataagtagtagaaaaaaattaataagaaagcactgtgagtgtaagttgcttgcataaactggatacatctggagctaccaatttagagaaacttgtgaatggttccccagagcacagatgtgcagtggatggtagaggaaagaggaagaagataacagagcaggctgtattgcagcagaccttgtgaatcccaaagtgctccaatgtggaagtgagatctagaccccaggatttatgagatggatgtgtccccaggtgttgtgagagaggagccaagtcacacaggaagagttctaaatggaagggtgtctcacaggacagactcaaagaggactcagcagctgtcttcacattttacactccctttaatttgaagagtctcctctctagctccaaagacaaagtgaaagagacagattttcaatacaaagaaaaacttagaagtcagcctatcagcaagtggaaggtgttttcttacagggcagtgaattctccattgtaggtgctcaaatggagataggaaaaaaccaagagttgggacatcggaaagtcagtcttctatgagactgacttttcagtccatgagattggactgaaaattagaaaattcttcagcttccttgtatatctgagattccaatgtcctgtgaaaataagagaatttggctactttatgaaacagcaaggttaagcagcctaaaaacagtagaaaaaaacaccaacaaggtgggttattttttccttcccaaactctaagcaaggaaacctaagaggaagaactggccagcccagccataataacacctggcacctgggcagtgcttaccgtgggccaggctccggtctaaatgatcttcagacctcagctgggttgattctgaacaattctcagtagtggctcctgagcagtggagctaggacttgaaccctggaaagctgactccatagcccctgctcttaatcactccacccctgccgcagtgctgtaagaatgcagggcattcgtttcctgtggctgctggaacaatggacggcagtctcagtgtcttcaaataacataaacgtgttctctcacagttctggaggcagaaactgaaatcgaggtgttggcagggccatgctgtctacaaagtccagctgttggtaacccagacattccttggcttgtgacagcatcactccaatctctgcccccatcttcacatggccttcttccctctgtgactcttttccttttctttataaggacaccaatcaatcagatgagggtccaccctaatccagaaggacctcatcttaactggattatggctgtaacaaccctctttccaaataaggccacattcacaggtgccaggggttaggacttcaacatatctgtttgggggatgcaattcaaccccttacatactgtaccaaactggaggcacctagaagtgttgactccaattggtagcgcagtccttgaggaaaatgacgacccaagcaaatgtttccttcaatctctgctctaccccgtttcaggtgctatagaaaaattacgggagggcattgttttagagtgagctcctgcactaggtcccaacagaccaaactaaagtggagtcactcatgctaagtgccatttaaccaagctgaaactttaagaaagctggtggtccccaaatagaccagtttttcttgaaaacaagagtcacagcaacccatcagaaagagttcagtctgcctgagtcagagtaataaggaagtcccatttgctttaaccatgacgagaaaagtagtctgaattaagctgacactaaccaatcaacctttaaaataatactgtttccttgttcccaccttacaaaaccactgttctgccattccccagtgggaactctaattctattttatagaatggaggctactggattcatgaatcatgaataaaagccaatttgatctgtaaataattttgtcttttgacaccaggagaacaccacctcccccctcaccagctgtgtttatgacaatgatgccagaggtagcctcttcacatccctttatgattcattcagtatggccaatgaaaatcttttactaaaattgtgcacttgcttcaccctgggctcacacatcttactcctctgctggagggctagaacaccatcccctcaatcctggtacttttttcttccttaccactgagtcagggagctgagaggtttggaagtcagtgggaatccacacagagaaagaactggatttagattgggctgttttccctctgagctttgtcctgttggcttccctatctcctcaacaccacctgcctcccgcacccaccgacacacacatctccagaatgtaactctcctggctgacagggaagcacattatttagggccgtattatcccctctgctcaaaaacaaatgagctcaccgaagtgtacacttgcatttatctgagaccatgtttataaaattcatgaatatggaaatgggcagccatctcccagaatccctcacaccaagagaactggcactgtctgctgtaggtgaaaacctcttcccttgaaggctcaacaacttctacccagaagaagaaaagaacagcatattctttctcatacacacacacaaacacacacacacacacacacgcacacagtatataccaccagtctgtggtcttggaagcaaagtttaataattgaatagctcaagcactaaactcttacatattattaagatactatcctaatatgtctcatttgtcaaagatggaaaagttttgatatgacataagggtttcaatcccaataggaatattaatggtaacaataaaaataacatagcaacacggtttctgttgaatgcctgccacatgccagcaactgctttgataattaaagaattatatcttatgttgattataatccttataatggcttcctgggtaagaaaggtttattactgttttacatttgaggaggagactagggttcagagagggtgccgaagtgagttacacttttgccaaccaggccagaagatgaaagccgctggattgggaaatgcttttgtatcaaaagcacaaaatgaagtggctagtgttacttgttggaaaaaaattaactttggcaagcataaatataattcagtatttgagcaatacttttaggagggtaacagagtggtttatgtgaattctccaaaatgccatcatgaaaattttgatgatgaaaatcacctaaaattgctaattacctgtcttagcctgtctagggctacaaagtaccatatgctgagtggctcataaacaatagaaatttatttctcacagtggaggctggaagtcagagtgccagaatggtcgagttctggtgagggctcttccaggttgctgtcaactctttgcatccttaggtggtggcaagagggctagaaagttctttggagtctcttttattgtattttattttttggagacagtctcactccgtcccccaggctggagtgcagtggcgcgatctcagttcactgcaacctccacctcctgggttca

SEQ ID NO: 94086 - DNA, 96189 bp, Homo sapiens
  misc_feature (1)...(96189): n = A,T,C or G
ggcttacacctgtaatcccagcactttgcaagacagaggcaagaggatcacttgagtccaggagtttgagaccagcctgggcaacatagtgagacctcatctctataaaaaacaaaacaaaaaaaaaaattagctgggcgtggtggcatgtgcctgtagtcccagctacttgagagactgagacgggaggatctttacctgagcccaggaggctgatgctgcagtgagccatgatcgtaccactgcactctagctggggcaatagagtaagaccttgtctcaaaaacaaaaacaggctgggtatagtggctcatgcctgtaattccagcactttgggaggccgaggcaggtggatcatgaggtcaggaggttgagatcatcctggctaacacggtgaaaccctgtctctactaaaaataccaaaaattagctggtcgtggtggtgggcacctgtagtcccagctactcgggaggctgaggcaggagaatggcgtgaagctgggaggcggagcttgcagtgagcagagattgtgccactgcactccagcctgggcgacagagtgagactccgtctcaagaaaaaaaaccaaacaaacgaacaaaactgtgaaattagaaatctagtccaaggtttgggccagaagttaaagacaaacaaacaatcaaacttctttctttaaccaagtcccatagttaattagcagggaggagtcactttgcttttccttctataatccctgaaactgagtaagttacgttctacttggtgagatcatacagaggatagctatcacctatttagttcttgctgtgtaccagacatcacctgaatcaacttgtttaatcttccgaacagtccctgtgatggttaacactgagtgtcaacttgactggattgaagaatacaaagtattgatcctgggtgtgtcttgggggtgttaccaaaggagataacatttgagtcagtgggctgggaaaggcagacccacccttaatctggatgggcgaaatctagttagctgccagcgcagctagcatataagcaggcagaaaaatgtgaaaagagagactggcctaacctcccagcgtacatccttctcccttgcgggatgcctcctgtcctcgaacatcagactccaagttcttcagttttggagctccgactggctctccttgctcctcagcctgcaagacggcctattgtggaaccttgtgatcatgtgagttaatacttaataaacgccctttatatataattactaagtattaactcacgagttaatactcgtgtattatatacacacacacacatatatatatatatatatatcacattagttctgtccctctagagaacctaatacagtcccctaaccaccgtgaagtagttattattgttgttgtcaccctcattttgaggtgaggaaatagaggcacagagagaggaagttctttgcccaaagacacagagataagacagggaataggctgggctggctgcatcatttgcagggtcaagcacaaaatgagaatgtggggctctggccagggggtggggaagtcaactccccttctcatagtggatgggtgagccctaagggatggctgcctctgccacccaggccatatttggtaccttgatgggggtgggcggaagcccctgccagtcactgaggcactgccaacctagggcaaagacagctgccgccttaacccggagacaccagagagggtcagggagctgtgcctcaccctgatcctctgtgagacagtgcccaggcacccaccgggaggatggatggtgacggcagcacaggaaattccacccgcccacacctctgggcaatgagacctggttgctgccctgggtagaagtgggcagcagtgtggagttggctaggcagaaccacagtgcagtggggtagcaggcacccaggaggatagaggcagggctgggaagtgaggctgtgcatgagctgaggcgccaagaccccttgtgtgtgccccattgctcatcaaccattaaccttcacttaaaacacaaactcaaagataaaattactaagaagctcaaggccggccaggtgcagtggctcacacctgaaatcccagcactttgggaggctgaggtgggtggatcacgaggtcagaagttcaagaccagcctggccgagatggtgcaatcccgtctctactaaaaatacaaaaattagccaggcacagtggcaggcacctgtaatcccagctactcaggaggctgaggcaggagaatctcttgaacccaggtggcagaggttgcagtgagctgaaatcaggccactgcactccagcctgggcaaccgaaactacaaaggattaaaccctaagtccctcgccccccgttcttttttttttttttttttttttgagacagggtcttgctctgtcacccaggctggagtgagtggcataatcatgggtcactgctgcctccagggctcaagtgatcctcccacctcagccatccaagtagctgagattgggactacaggtgcacaccaccatgccaggctaattctttgtattttttgtagagactgagtctccctatgttgcccggtctggcttcaaactcctggactcaagtgatctgcctgctttgacctcccaaagtgctgagattacaggtgtaatcccactgcacccggcctccaagccttcttaagtatgagattctgtgtgactgcactagtttcatgtccaaagaagccagccttggacatagtcacatttactaacaactatggtgaaaggtcatggaaattcaaaatactttgaaaagtaagaaaggaaacattttctcagtgtctaaaaatctgccctgccattctacttcgaaaagtgaagactgctgcaaaatataatgatattagtcttgacaaagaaaagtattctttaacactcccatgaagaatatctttttttatgaagccttactttgtaaccataataggtttgttgcccaatgcactggacaagtcaatacaccaaggcaccaggttacagcagtgaaagaggtttaattgtagggctgctggatgaggagacaggaggaaacctcaaattcatctccctgaggagtcaaggagtttggggctagggtttttttgcggggggatggtttttgagacaggattttgctttgtcacctaggctggagtgcagtgacctatcagttcactgtaacctcaaactcctgggctcaaacaatctttccacctcaacctcctgagtaccttgtactacaggcttgcaccaccatgcctgactaattttttaatgtttcatagagacagggcctcactatattgtctgggctggtcttgaactcctgaactcaagtgagcctcctactttggcctttaaaagtgctgggattacaggtgtgagctactgcaccctgcctggggctagggtatttaagggttttgaagtggaccaaagtgtggagatcatcaattggttgaaaagtgcagggtaaagtcatgagacagagagatgaagaaattgtattctcgcactgattcggttcctgtgtgtgtgtgggtgtgtgtgtgtgtgtgtgtgtgtgttggggcgggggcggtctttaaactggttgatgtcggctgttctgctggaacgtaggatctgcctaagcaattcttaaataaaacccttatgattccagagccagaaatcctacctattgaaacaacagggatgcaaatggtcagtacctagtgttacctgaagttattaatacaaagaagcaggccgaactgcagcctgattaatgcttagttataactctatttttgtgcagaattcttctcaaccttgtaaggatggcctcaacttggactccccaaatagaattgaccacactttcattgtgctcctttctaatttgtataattataatgttaagaacttgggatttcgaatgagacaaacccgggttgaaatcccagctctctcagtgactagttgtgagacctgggcaaattacttgcatctctgttttgtcacctggaaactgggataaggaaactcagaggcggctgcagcacagctataccaaatattggcttacaggtggcaatctagctggaaacggagctgcaggacttgcgttgaaactatgtttgcaaaagcaagcacatttgttttcactaagattttatatttacttggagtgtatttgggaagggggagcacatggagattaagagggtaaaaatcaaggtcaccaatgagagtacttagcacagtgcctgacgcctaaaaaattaactgcaaatatttatgtttttttccactagattgaatttcttaagagctggattctatcttatttatctgcaactaacaacgcttggcaccaaatgtagaactgaaatgaattttctttgcaatcttgactaaaaaatgagggttttatcaataacttcgtagagtaaatagaagtctcttaagggctcttgatattcttcctgttggaaacacaaagaagggaaaggtttggaaaaatgaagttgacaaagtcttttattatcaaacgctcaaacttattcctcactgccttgttaacacttgatttgacacttttttttttctgtttgagacacagtcttgctctgccacccaggctggagtgcagtggcgcgatcctggctcactgcaaccttggttcaagcgattctcgtgcctcagcctcccgagtagctgggattacaggcgcccgccaccacaccaggctaatttttgtatttttagtagagatagggtttctccatgttggccaggctggtctcaaactcctgacttcagatgatccacccgcctcggcctcccaaagtgctgggattagaggcgtgagtcatcgtttgtctcatttttgtttacatttaaaataataaaccttgaggtcgggcgcggtggctcacgcctgtaatcccagcacttcgggaggccgaagcgggtggatcatctgaagtcaggagtttgagaccagcctggccaacatggtgaaacccccgtctccattaaaaatacaaaaattagcggcatggcgcggtggctcatgcctctaatcccaacactttgggaggctgaggcgggcggatcacgaggttaggggtttgagactagcctggccaacatggtgaaaccccgtctctactaaaaatacaaaaattagccgggtgtgatggcaggcgcctataatcccagctactcgggaggctgaggcaggagaatcgcttgaacctgggaggcagaggttgcagtgagcctatactacgccattgcactcaagcctgggcgacagaacgacacacacacacacacacacacacacacacaaaattagctggatatagtggcgggcgcctgtaatcccagctactcaggaggctgaggcaagagaatcgcttgaacctgggagacggaggttgcaatgagcagagatcgcgccattgcactccagcctgggcgacaagagcaaaactccgtctcaaaagtaaataataataaaataaaaaaccttgaacgtcatcgctgtaagttgggaactcctatagcaagattccatacatcccatttttggacgttttattccaaagacacaagcaaacggaagaaaacgactgccgtgaacccctgctaacgacaacttggtgactgcaggatcattggacgacggttttatcctcgccatccaatcgttggaaagtccggagagaacgctctctggattggttggaggaaacatctctccaagtgcactcaagaatgggttgggagcggggttcggccggcagcgcctcgggccaatcagagaaagcatgagggcgggctctgccgcaggaaggtggtgaatctcggcgggtcaaactctcctgacgtgatgggggggcgtggcctccagttgcggtctcccggctctctgggcccgcgcacgggatgggcggggcccacgggcctgggcggggcgagcggtgtcagcggcggagccggatgcgggcggcatcgcggcggtcgcggccttggggatgggcggagccccagccgctagtgctggtggccgccgctgctgccccagctggagcccgagccgccgcctctgcgtccgcgcgtcgctgcttcccagggcggcggtatgctggggaaaggagtagtcggcggtggcggcggcaccaaggcccccaagccctccttcgtgtcgtacgtacgccctgaggtgagggggcgccgcgcaggcggggcgtcgggcaggggcggccggggcgaggggcgccgggagccccttccttgcagcggggagcgccgcggagcgcttcctgcccttgtgccgggcgacggggcagccaggcgggctgaggccgcaggagcgcgctggggcctccgcgcgggccggaatggggaccccggcgcaggcaggcaggtgcctgagcgcagggcccgagcgctggaggctggtggaggggcccgagccgagaagggattgcggcccggaacgcccctggggattctggagaggacctggggttgtgggcactgctgggaggggtagggccgtgggtcggagcccccaacggggcctgctcggagcccgcgtgggtccgtcctgcctctggactttctcagtgagcccagaagcccgccggcctccgctgcctgcgtctgagtgcctcgggtgcggctggcgggatgccctgcacctacgtccgcctcccgtcagcgctgcggggagaaaagggggtcggcctggcctcagccagtctctgcttgtctctcccttgggaattctccgctgtcgcttctttctcctcatcccctcaccatcatcctttccacccacttcttactcttctgaatcttcaggtcaagaaatttgttcattcattcagaaaatacttctcgagctcctactgtgtgtcaggcactaagtgcttgtgatagacatcagtgaacaggacagagatctctgcattcctggagcttatttgagggggaaaggagaaacggggtgaattatagataattaagtaaattatacggtgtagtaggaggtgataaatatcatgggaaagaaaagaaatctttttcctcctcgcaaaggtggcatttgagccgagacttgaagatacgagaggtctgagagaagagtcgtccaggtagagggaacagcccccgggaaggtcgtgaggtgggagtgtgtctgaagggttggcggagcgtcaaggaagccagcatggcagaggcccatggacaagggggacagtcataggagaggaggttagagagatcagaacttgtaggccttgctcagggcttcttgagcaatagttcttaatccaaatgcctaatgagaagccttcttgttttgcatctgtaaaggtttttttctgcccttctctccagcagaagtgcagaagcaccgccaaatttgttgcagatgtcttcccacctctgtaatgcagaagcacgtgggctgtggatgagagatctgatcagggactgcttccgtaaagaccacctggggcctgaggcatttgcatatgtatctttaaattcaagatatgtgtgttttctccaggrgaaagtgctcttaaaatgggtcttatttttagtcctagttgtaaaatacaaaccatttcctctgttagcacttgatgtggagtcagggtcatcttaaagtttcagcgggcttcccttgtggtatcacatttaagcaatgtggtcaatttctctttgtgtctttttaaaacatttaaacatttaaaaaatttttgtgggtatagtaggtgtatatatttaaygggatacatgaaatatttgggctgggcatggtggctgacacctgtaatcccagcactttgggccggctgaggtgggtggatcacctgaggtcagaagttggagaccagcctggccaacatggtgaaaccctaaaattagccaggcatggtggtgcgcacctgtaatcccagctacttgggaggctgaggcaggagaatcgcttgaacccaggaggcagaggttgcagtgagccgagatcgcgccactgcactacagcttgggcgacagagcgagactccatctcaaaaaaaaaaaaaagaaagaaatctttggatacaggcatacaatgcatgaatggggtatccatcactgcaagcatttatccttcctttgtgttacacactatccaattatactctttaagttattataaaatatacaattattgttgactgtagtcaccctgttgtgctatcacttactagatcttattctaactgtgtttttgtacccattaaacatccccacttccctttcccctgctacccttcccagctttkggtaaccatcattctgtctccatgagttcaaatgttttaatttttagctcccacaaataagtgaggacgtgcaaagtttgtctttctgcgcctggcgtagttcacttaacataatgacctccagttctgttcattgttacaaatgacaggatcttattcttttttatggctgaatagtactcgtgtgtatgtaccacattttctttatctattcatttgttgatgatggacactttggttgcttccaaatcttggctgtggtgaatagtgttgtaataaacatgggagtgcagatttctcttccatgtactgatttcctttcttccttttttagagacaggatcttgctttgtcgcttaggttgaagtacagtggcgtgatcacagctcactgtagcctccacctcctgtactcaagccattttcccaagtagctgggactacaggtgcatgccagagcacctggctaattttaaaatttttagtagaggtgatgtcttgctgtctttgcccaggctgctctcaaactcctgggctcaagcaatcctcctgcctcagcctcccaaagtgctgggattgtaggcgtaagccaccgtgcctggccctgatttcctttcttttgggtgtatacctagcagtgggcttgccggatcatatggtggctctatttttagtttttgaggaacctccgtactgttctccacagtggttgtattgatttacgttcccaccaacagcgtatgaaggttcccttctctccacatccttactagcatttgttattgcttatcttttttggatataagccattttaactgggatgagatgatatctcatactttttttttttaacatttaagggtttgttaaaaatatgaaacgcttcacgaatttgcatgtcatccttgcgcaggggccatgctaatcttctctgtgtccttccaattttagtatatgtgatgctgaagcgagcactcattgtagttttgatttgtatttctctggtgatcaatgatgttaagcacgttttcatgtacctttttttgccatttgtatatcttcttttgagaaatgtctttcagatcttgtctccatttttaggtggattattagattttttcctattgagttgtttgagcttcttacatattcttgttatcccctgtcagatagatggtttgtaaatattttctctcattcagtgggttatctcttcattttgttgatagtttcctttgctgtgaggaagctttttaacttgatgtgatcccatttgtccatttttgctttggttgcctatgcttgtcgggtattctttatgtctttttttgatagaaccctggttgaagtgcaactgatctttaaacttttctcttcagggaaattaaactacaagtggaaagtcttctgaaatgtggccagagttcaagaatgttcaaattcttcgtccaccaagtgcacatgttgtaattagacatgtttccctctttgcccacagtgcctgatgtatttcctttgagggataattagggaaggggagtggttcagtctaaaataagcctgaagtggtcacatttttcagatccttatagttggcagctttgttttcttgcattaaaataatgctgtgcagacactatgcctcgttgttgtagtctgactctaaacatgttttgtaacagaggataaggctctgtcctaaattgtggatggttttttaaaagataagggtaaggccgggcgtggtggctcacgcctgtaatcccagcactttgggaggccgaggtgggtggatcatgaggccaagagatccagactatcctggccaacatggtgaaaccccgtctctactaaaaatacaaaaattacctgggtgtggtggtgtgtgcctgtagttagtcccagttactcgggaggctcaggcaggagaatcccttgaacccaggaggcagaggttgcagtgagccaagatcacrccactgcatttcagcctggcgacagagtgagactccatctcaaaaaaaaaaagaagataarggtaggaaggggtgagaaggcaatgtatttttaagtatataggttttgccaggtaatcatattacgggaaatgcaggtgagcaacatcgaggcatggcttatgtgcttctgagagccctgggtctggtaaccttctcttggcttacccagtgggaggagttcctcaggacactcttctgaactgttctctcctatttcctacactgctttccctcatgttgcctttctctgaactgccttggtgtatgtcatgctgttgcttctttctttttttttttgagatggagcctcgttctgtcacccaggctggagtgcagtggcatgaacttggctcactgcaacctccgcctcccaggttcaggcgattctcctgcctcagcctcctgagtagctgggactacaggcgtgcaccaccacacccagctaatgtttgtatttttagtagagatggggtttcaccatattggccaggctggtctcgaactcctgacctcgtgacccgcccaccttggccaaccaaagtgctgggattacaggcgtgagccaccccacccagccaactgttgcttatttcttcatatgggttttggtagctgggaaatctcagtttcttagacacctgtttgttggtagatgactgagctgccagaacaacctttataccttatgatgtaatgatacctgtacctggtgataagcttgttcttggctaatcagataggttcagcagtggtggccttcagtatgccagagaatctgtcaagagtcagcactttgtggtggaaacaaaagtgcttaactggataaagtattttaagattatgcttttaaacacggtgagcttatttttttttcctcatgatcagaaaggactggcatcggacagcgtaaaatgaggacgagtagttaactctgacttttaaaattggattgctgccagagtaaaatggattcttctatccttgattattctaaatcagtgaatgtgacagttaaaaccataattttgtatataggaccataattttggacctttgattatgttttgaaaactctgctcaggggattacatgttggtaaagctagttaagtgggcagctgatggctctgaaagttgagatgaataggagggagggatctggggccatcttgatggtacctgatggctggtacctaaaaacatcgcagcacccccaccccagcccagccccagacacagggtgcaaaggatgtcggtgcctctgtcgggggacctgctgggtgctgagctctgctctagggagggatatggttatagtttgggtaccaaatccatctttcttgttaaataaaacacctgtttgaattatttcagaagccataagcattctttgtagaaaaataaaggtacagataagcgaaaacattttttaaagaacgattataaacataaacaactcggagtgtattctgtacacttcaagcagatatatgtgtaggtatatatatattttaaccaaattgggattaatattgctgatcatattttgtaatctgcctttttcaccaaaaatgtatattgtaaacatctttccatgtcagttgctatcccacaatgtcattaaaattagacctttgaaactggccaggcaaaatttagctttcagagggtggctgtacttgtacccattttgtgggtacaagggctaaaatatactttctaagagtttaggtcagtgtttgacctgaatgaactaataatagttaacgggcacttatttgtggatttttagctttggaagagaatttaaagataatatactctgcctccattatactcatcctccatcatacagatgtgcaaactgaggccctgtaaagtttaatatcttgcccacggacacagtgttattgcagaacagagataaaaactctctcctactagccagcagtgccagtgctaaaccagggtcacatgagctcaggaaaggttttatttacatgtgggaagaaaagtcaagagagatgaagattgagaagagtaaaaaatatatatatatggtgttaatagctatttttttattttttcatttatccctcaggaaaaaatgtattctgttgcctagttcttatttaaggccatttcttttggtcaggagaagtgaatatatgatcctgtagtcttcccagagatatgactgtgggtatatacaaaatgaaaatgaataattactagtatttattaggcacttctgtgttccaggaactacgcatatctcattttcccctttcaacaagtttcatgaagggaatactattattacccatcttttttgtttttagatatggaaactgagactcagaagttgagtaccttgtttagggtcatggagtttgtcccagggtttaaactagagcagtctgatctcggggcccattctcttattcttacatttatgaatgtaaggaatattactagtgaaacatgcttatatcatgattagcctttgtacactagagtacttccttagtagtgttctctagtagcaatttcttttttggcttttgctagattgtcaaccaggtaactgctgagcagatacagggatctcttggttgttttcatctctagagctggtgtttttgaaagatagaattaattagttcagcacatatttactcagcacttgcggtatcccagatttttttttttttttgagacggagtttcactcttgttgcccaggctggagtgcaatggcgcaatctcggctcaccacagcctccgcctcccgggttcaagcrattctcctgcctcagcctcccgagtagctgggattagaggcatgcaccactacactctgctaattttgtatttttagtagagacaggatttctccacgttggtcaggctggtctcgaactcccaacctcaggtgatccacctgccttggcctcccaaagtgctgggattacaggcgtgagccatcgcgcccggccgcggtatcccagatattgttctaggtattgagtggggatacatcagtttgcagaaaagatgaaattattgggatgatttttattggaccactaactttgatgtctttggcggatagatgataacaagaagagattggcttgtcttaaacagacctcctgccttagtcctagcggtaaagataactttaaaaacaaagtctagatcctttgccttctttttttaagaattcataacctggccaggagcggtggctcacacgtagtctcatcactttgggaggccgaggtgggtggatcacaaggtcaggagtttgagaccagcctggccaatatggtgaaaccccatctctactaaaaatacaaaaattagccgggcgtggtagcgaacgcctgtaattccagctactcaggaggctgaggcaggagaatctcttgaaccgaggaggcagaggttgcagtgagccaagatcgcgccactgcattccagcctgggcgacagagcaagaccccgtctcaaaaaaaaagaaagaattcatagccttttctccattctcaactaattttttaaaatctcccagaactcacccagctaatttcttaattgcagaattttctctttgagcgtggaggtcattggtaggccatcagaagacattaaaggtctctccagagatggtcactttcttagctgtggctttagcccgatgatctgtccaaagcttctgctttttctctcctgcccgtgcttcctgcagcatctccctgagtcttatccaacaccacacaacttctgcagatggagcctcagaaagcatcatgaggctctgtcaagcagcacttcctgcagcctgatcaaacagctgccacatggacagccactgtctaagagcacatacttctgcaccctacttctagctcgaacgttaaaatcagggctaccatcagaattttaggctgtggggaccccacacttagaagtttaaagttctggatctttctctaaacatcttaaacaggatgttgggtgttcttccacattaaaccaccctatgtgatggtgtgctttggagaaaattccattatcataagggctaaaaaacttcctattgctacaaaaaaatgtataccttattatgataaagacaatatagtaaagttgcagagtttggaagttagaaaaataaaagtgccaatgatggtaccttaaccaaagcaatgattccatttataagtatgtctgtgttttgttcgtgagtgtgtatctcatatggttgcatttcttttcttttctttttttttttggagacggagtctcactctgtctcccaggctgaggtgtaatggcgcgatcttggctcactgcaacctctgcctcctgggttcaagcgattctcctgcctcagcctcccgagtagctgggactacaggcacgtgccaccacgcctggctgatttttgcatttttagtagagacagggtttcactgtgttagtcgggatggtcttgatctcctgaccttgtgatccgcccgcctcggctcccaaagtgctgggattacaggcgtgagctactgcgcccggcctatggttgcatttgtaattgtgtaaaaatttatagcctacatgtggttgtcatgtgtgaagatattatgcttgatccatattggtagattatataggttaagtttttccagtaaatacccactctcagtttctcatcaagttgtgcttgtgacttctgatgtgttgtggttttttttttttttttttttttttgagatggcaaagagggcagtgagtttgtagccattgacaagagaacatgcaggttctgaaaagggctcaagctgagatcttggctttgttaggatgatgcccacggtagccacctgtgggggcctacatgaggtttataaaaaagcagtggtagacatccctggtagatggagttttgatcaactacaaattcagcaacattgataagccaaagttgtctcagcctagcaccatgagtttattctcactgaatcaagtttatgatggatgagtgctatgtaaacgtcttctaagctttcaaaatgaatcatttgaaataaacctcttgagattgggaggcaggattgaactgaaataattcttttaatctctaatctcctgttggctttgggaggaggaataggggaggtggaaatagagagggattctgggggggagtacagtgctgggagagatggaaaggcctcagggcctcacccttcctttattcccctttgcttacctcccgtatcgcaactctaaggaaagcaagagcttgtcagtagctcttcatactagctgtaatgccagttcctttaagcttcagttatatttctacctcgaaaatgggaataatgatatgtccatgttatataatagacatgtatgaacatttattaatatcaaatgccattatgcatgtaaagcccctagcacaggatacttagatgtagttaacctttaagagatgtgggccattattgttgttattcagaagtttcgtcagagccacttggatggcttcagaaagtgcttaatcattaatcttaagagtgcataaatctttcccagctaaggtattaataaaaggggagtattttgttgtgattgttgccatgttgtcatgccaggaaagttccttgtgtggtaactctttyttagaaaattttttgctatctctaaaagtttcttttccttgttcctttatacatttgcgaatgatttggttatatttaaaattccaatgtaatgagarcacttagttattgacttttttcattattaacatttggcctttgacattttgctagtttcattgtgtggacttatttttcttccctcttccctaattttttttttttttttatacggagtcttgctctgtcgcctgggctggagtgcagagtgcattggcatgatcttggctcactgcaacctccgcctgccgggttcaagcgattcgcctgcctcagcctcccaagtagctgggattacaggctcgtgccaccatgcctggctaatttttgtatttttggtggagacggggtttcaccatgttggtcaggctggtctcgaactcctgaccttgtgatctacccacctcggcttcccaaagtgctgggattacaggcgtgagccaccgtacccagcccctctttcctaatttctaatggtctctcttcaaaggttaaattttgtccatttatcacatctctttagtggttcatttaagatatgagtaaatcaaatcaagtaaaatcataactagcataaataaaatcaaattgtctctgaaactaatactctctttatttcaaaggcagttgtaaaaccatgctgttttgatttcatatttaaatgcttttcctaaaataatagccatcacttttccctctcgtaccctgtccttcatttcctataggcctggctggtgcacaggctttcagaggtggcatgcaaaacctcagttgttttgggaagggagggatttcagccgtaagatagggcttatgtataagtgggggcaagggaagccctggccacagtgatgaaatatgttgaagatgaccttcctcttgtgacagattgccagctcctgtttcagacaatgttttttgttttttgtttttgtttttgtttttttgcttttgctaagagtttttttgtttgttttttattttttgtttatttttatttttattattattttttgagatggagtagtctctgtcacccaggctggagtgctgtggcacaatctctgcctcccagtttcaagcgattcttgtggtatctcagcctcctgagtagctagggttacaggggtgtgccaccatgcccggttaatttttgtatttttagtagagacagggtttcgccatgttggccagactggtctcaaactcctaccctcaggtgatccacccacctcggccccccaaagtgctgggattacaggcatgagccactgcgcccagcctttgctaagagtattgaagtatttgagaacacttgaagtgaatgagtcctgtttttcaaataaaaaaatctatgttcctccaaacataaaattgaatcccttgagatcaacttcccaatgtgtccctgtccttggaagaagtaatgattctctttcactcttggtctccccgtgaatatttgcctcctgtctatgcaaaccactgggaatagcactttccctagggggtcagtcagtctgtggtattgggtatcttgctagttaaagaagggaatctggggttcagatcccagggatgagttgtttggcatcagcaagtacccctgttttatctctgagggactcctgggctggcctcagtgtttatactttgtgccttctcctttgatgcccaaatgtattctcttggcccctcttttttcactctttacctacctacctacctgtcatctgtctgcagcccccagccccaccccagcttgcctagtttagcttcaagttcacttgccctacaaatctttttctttctttttttgagatggagtcttgctctgttaccyagctgcagtgcagtggcgagatctcggctcactgcatcctccacctcccaggctcaagcgattctcctgcctcagccttctgagtagttgggactacaggcgcatgccaccacacccggctaatttttgtatttttagtagagatggggtttcaccatgttggccaagctaatcttgaacttctgacctcaggtgatttacccgtcttggcctcccagagtgctgggattagaggtgtgagccactgtgcctggcccctacaaatctctttatgcagctttacgttctggagaagagaagtggctgctttttctctttttgttttaatgatcactttctgctacctgctgaataaagatgatctatgctaaaagggtgacaggaagaaccwgrtgtacctataagtagtacctgaggagcgcagtaagtatggcagatgtaatctgggtggcagacagagagggggtatgggagctctggggtgcatgagagaggccctcagtgtggtgagggtgtggctgtctctgtgtctggtcctgttacagaggagcaactgaggaataaaccaaccacagtaggagtctggggatggaaacaaggtgccatagcattgtggaagagactttgattttgcaaagttctgatccaggctcagccacttggtggtgaccttagacrtgtaacttcacctatccgagacttccttttcttacctgtaacgtgaataggtgtcttccctgcaggctgatttagaggatgagaagaaataaaccatataaacccagctaaggacttgacacatggcagatactcaacaactgctaggtgctgttattattaataacttgaactggaagatttgttatttaagcaacatttttatgtatctaccatttgctaagcactattaaaattaggaatgcaaagaaacagtctgtgcactcaggagcttcaccttctcttggggagatggctggtcaccagagttctctgcacagaggtcggagctgcctacttatgagggaggcatgcccaagtgctctgggggcacagagcaagacccactgcagaacccaaggcagcatctggtcttatgcaaaagctgtgtaggacttggaaaggtcgacattaaagcgggatttggtgtggggaggagggggataatgtagcaagcaggcaagaggggtgtgaaaggctcatagctgtgttaggactgggtgacatctttccccatctcttatgtaaggtgtgtgcacacatgtgtgatggtgagagagaagtcttgaggaatagaatccaagggtcgctgctcggacctgcaggagtatctccaagattctatgaggattccttctttctgtgacatgctgctgtaccatagatcagtctggcccttagtgagcctgtgggcacctctcatctgtccctggttcctcttgccttcttcctgctccaagccttttaacttctcccagctcttcccctaacttaatgtttatagagcagttttggaggcggtggtagaaggggaggcacagatggcaatgccatgtgtctctgcagctgctgtcagtcacatccgttagcttaaatcataaagcagtgacagccccataactgccacctgacaccttttttctggcacttgtacatatcccagcacaacaatctttactttcagtataatgtggtagttaagagcatggctttggtgtcacacagggcttcctacttgctaatggtgaatttgggctgggtgtttaacttctctgagcctcagttttctgatctgtgaaatgggaataaaataaaagcccgtaaggttgctgttagtcttaagtgatgcaatctgtggaaagctgtttacacagtacctagcaggtagtgaacatttattaaatgttatttagttgctattattcctcaccaccccagaagctgcaggtatgtgtgtgtgtgtgcgtgtgtgtgtatgtgtatgtgtgtgtgtgtgcgcattcatgtgtgtgttctttgggccaccagtgcaggtcctgattgtggcaagacttgacctcatttctttccagcattgttctttttttttttttttttttgagatggagtctcgctctgtcgcctaggctggagtgcagtggcgcgatctcggctcactgcaagctccgcctcccgggttcgtgccattctcctgcctcagcctccagagtagctgggactacagacgcctgccaccacgcccagctaatttttttttttgtatttttagtagagacggggtttcactgtgttagccaggatgatctcgatctcctgacctcatgatccgcccgcctctgcctcccaaagtgctgggattacaggcgtgagccactgcgcctggcctcagcattgttcttctctggcactctaagtgtgtgtctggagccaggcatgctgtccctcttataggactgccatacccaccatgggtacctttacagtctacctggagggcctcccttcctgcacagttttctttttcagtgagtcgtttcatggatttcctttctgtcctgtaacagtatcttcatctgtctcaagggcttctaggaggacttggggtttgggcagtatgttaagtccagagcttgatacctgcaattcagcttggcttctctctcctttcaagtgagccttcccagcttctgccaacagcacccttctttccctaatcactcatatgcccaaccaatcacagcccccactgtgccctttgtggggccctctgtggtgatccgtctgtgtttccatggccaccttctgtctagcatctcctggtgcatgcaaccacctaccacaagagcttgactggcctctccacttcccactgctccccgtctgcaccacccccagatgcccacacaccacagccagccttctgctgaacgcggccttcatgttgtcatcttcccatttaagagccctccacgcttcttgccccttccactgatccaaatcctaactagctttcaaggcacagccaagatcctgcctgcttctggttctgttgaaggagcattagcttggatttgggaggcctctgcctctagccatttcttttctttgtgaccttttgcttcctgaggcaggtccttatcccatcaagcttgccaaccgtctttgggtgtggttcaccgataataagagaatcaagccagttaactgtttggtgagatcaggtctgtgggatctgaggcttatactggtatttgggtcctaacatttattttctaatgtaagttttatttatttctttctttaatagggagagtttaatgaggtattgggattgtttaaaggcctagtgaatgcctggtgagagtgatccttgctaagaatcataaatgagtaatgctttcactgcacttcaagaaatgatgagctgtcaaaacagagtgaggaatttagtttgcatcttaatgagcagatactctcttccttcaaaaaaaaaaaaaaaacctgaggtcaggaaaaaagcagggtctaaatgtgaagaaaaggatttagaatggccaagtgaataagtattgcttagctgttgggggtaatgaattgtccaaggtcattgcctgttcccctgccctggagacttgttacaactgaaagaacatttgtaggtattactttgtaataggaaaaaagttgaagatttgtggttgcctagggttagaggtacaatgtaaacagagggattgagtggggaataacaggtcagctttggtatgaggtgctttgccttagaatattccttttgggatgatgaaaatgatctaaaattgattgtggtgatgattgtacaactatgaatatactgaataccatttcaacactttatattgttaaacattatattaaatactttggtgaattacatggttggtaaattatatctttttttttttttttttagacggagtctcgctctgtcacccaggctggagtgcagtggcgygatctcggctcactgcaagctccgcctcccaggttcacaccattctcctgcctcagcctcccaagtagctgggactacaggcgcccgccatcacgcccagctaattttttgtattttttagtagagacggggtttcaccatgttagccaggatggtttcgatctcctgaccttgtggtccgcccaccttggcctcccaaagtgctgggattacaggcgtgagccaccgcgcccggccactttttttttttttttttaaagagaatgttttcctctgttacccaggctggagtgcagtaacatgatcatagctcactgcaaccttcaactcctgggctcaagggatcctcccacctcagcctactgagtagctgagactacaggcacgtgttactgttcctaagtttttttttggtagggacaggtttcactgtgttgcccaggctagtctcaaactcctggcctcaagcaatccccactcccccaccacctcacccttccaaagtactgggattacaggcaaagtgtaaatcgccatgcccagccaattacacctttttttttctcgtttctttttttggagacaaggtcttgctctgttgcccagactggaatgcagtggtgtgatctcagctcactccagcctcaacctcctgggctgaagcaatcttcctgccttagcctcccaagtagctgggactacaggtacacacaacatgcccaggtaattttgttcattttttgtaaaaacaaggtctcactatgttacccaggctgatctcgaactcctgggctcaagagatcctcccaccctcggcctcccaaagtgttgggattacagacgttagccactgtgtctgacctcaattatatcttaataaagtgtttgtttttttttttgagacagagtcttgcctcatcgtccaggctggaatgcaatggcgtgatctcagctaactgcaatctccacctcctgggttcaagcaattctcctgcctcagcctccctagtagctgggatttcaggcatgtgccaccatgcccggctaactttttttttgtatttttagtagagatggggtttcaccatattggccaggccggtctcgaactcctaacatcaggtgatctgcccgccttggcctcccaaaatgctgggattacaggaatgagccaccatgcccagccttaataaagcttttacaaagacagagtttaaagttcaaaagtgtaagcttggtgtcagaattgatactgagttctggctttaccatctatttagttctgtgaacctgggtttattatttaaacccttagtgcttcattggccttatctgtaaagtggggatgaaaataccatacagattgttgtcaagataagtgacataggacattgaaagtggacatagtaaactcctatgacatatttttatgtgtttaatttaggcatatatcattgtggataatagattcgtagtctgaaatgctctgttgagtttccaagtagccctctgaaatgaatacaggttgagtatttctaatctgaaaatccaaaatcccttgagtgtcatgtttggattaagaatactcarcttgtccattttagggctgagaactgatttgcataacgcgtaaacagcagaatactgaaagaccaggtaccaggttgaatttgtgtatgtggtttgttaccttgagaccagacgttgtcagttagcctcttactgcatgtctgcctccctggcttcagatgctgttctcttggtttgttgtcagagtaattgttgcttgtaactgccgaaagtatatagctagtggaatagagctgtggtcagcagcaaagctgcctcctgtcatgctttcagaagcatggggaatgagcctgctagtcaggcctgctcggagggagccaagccttctggccaggagtggggtaccagcagccttgggaatcagcttcaggaaacaaatcctgttttggtttttagcttcctacagctggatagtagatggattcattcagtctttagtctgtattctcagtgagaaagctccaaattaaaagtctgaccttggctatgcccctactctattagtgagaccagaatgtgtttctggaagccagctaagggaagaatgtgacaatagttcggtgatacttggcactaatacacttaggtaggaatttttaatagagcaattttgttaatttcacaagagctatgcataggattgaagaatattatccggatcaagaattattgtctctatgtatgttttcatgtgtccattctttcagcagacttactgacaatttactgtcttgtcaggaattatatgctagaagttgaggctaaaaatccataaaggtacagcctcagccctcagtttgtatcattggttggcaagacagacaaggtaagagactcttgcagttcagcgtgaaaagtgctatgcttggccaggtgcggtggctcacacctgtaatctcagcactttgggaggccaaggtgggcagattactggaggtaaggagttcaagaccagcctagccaacgtggtgaaaccctgtctctactaaaaaaaaaaattaaccagatgtgatggtgggcaccagtaatcccagctactaaggaggctgaggaatgagactcttttgaacctgggaggcagaagttgcagtgagccaagattgtgccactgaactcctgcatgggggatagagggagactctgtctttaaaaaaaaaaaggaaaaaaggaaaagtgctgttctggaggcatatacagagtgtggtttgggtatctagcaaaggggcacctcagtgttctgatggagagagttttgaccacagaaagcctcacaggacctgamctgtgtggacagtggatttgacagtgagttggatggacaggagtggagacagtgggttgggtggtcccagaggatgcagtaggggccagttggaggcagtgcgactggcagtcgggagcatgcgagctaggaaatgatggtggcccaaagtcagagcgacaacaggaatggatagacgtgggcaatatggagcagagcacaggctgtgagaggcagggagtaggtaagagtgactctcaggtttctggtgtggccagctggatggctggtcctgaaccagagctcagagcattagatttggcaaggggtggygatgagctgattttgaaatgtcaatttgaaggatatgagggacattctggtgcaggtggccaggaggctgttgaggtgtccaggcctasagctctgaaggcagatctggagtgaagtaccacttggggatcatcagcctatactgttgaaacacctttgagtgagagagctcatccagggaacacagggtttgtgaggaagtaagaggaccctgcccagaagggagacttgaccaagaagagccygagaaagtgagtgttagcctgtattaggattccctagagggatagaactaataggatatatatctcctatatatatytggagtttattaagtattaacttacatgatcacagggtcccacaacaggctgtctgcaagtctgaggagcaaggagagccagtcagagtctcaaaactgaagaacttggcgtctgatgtttcagggcacgaagcatccagcatgggagaaagatgtaggctgggaggataggccagtctcgccttttcaccttttttttgcctgctttatattcactggtagctgattagactgtgcccaccagattaagaatgggtctgcctttcccagcccactgactcaaatgtcaatttcctttggcaacaccctcacaaccacacccaggatcaatattttgtatccttcaattcaatcaagttgacactcagtattaaccatcacaagtccaccccttgtcaacttgaacccatacacatctcctgagatcacacataatcttcaaataaagacaatagtaaggtcataattacgcctaacataacacaactatccttcatacaactggaaactcaccaatccccaacccaaataccattacataaagttaacaatacttaaatgctgatatgaagtcaataaatcttatatgataaaggaaaaggaaataaaacatgtatatatgcacaaacatgtttttaacaaaagaaggaggaaatactcatgacaattacagttctcatttctgcagctggtcacgtggtcgtagctggtattgatgactgccttcttctactacttattctgtattccctttgccttcagcaaacacctcagcaggtcgtggttttttttccctagtggagtgacccaaacctttattcctgaggggtctggaccatttgtagtcctgcctggactgggctgttgtcgtttcccattgaccttaattgcagggcatggtaatactaagagacgccctaatggatctcctgtattccatgcatactcttccttacctccattatggagagtagactgttttcattttgatagtccaggtcagtcaccccggccaacactgtaactcccttcttagcctattgacttaaaggtaggaggggcccaaagtgtccgggtagcaatcttaacttccagtttaatggaattgttgtgtctcctggtggcagcgttcctccctctggaactaagacctctagaccagcagaagataatgttgcaggaacaggaggcaaaaattttgctagtggatcactaggggtgatggtgagtggtgccacttccacttccaccctttaattcctggacccgtgaatcctggctatgggagaaacagtaccatgtattgaacgctgattcagagcatacatggccttctagagaactttgccccagccctgcaaattattgtcacctagctggcattgtaattgtgacttcaaaaggctattacaccattctgtcaatccagctgcttcaggatgatagggaacatggtaagaccagtgaattccatgagtacgaayccactgccgcacttctttagccgcaaagagagtgccttggtcagaggcaatgctgtgtggaataccatgatggtggataaggcattccgtgagtccatggatggtagtcttggcagaagcattgtgtgcaggataggcaaacccatatccagagtgtgtattgcagtgaagacaaacctctgccctttcaatgatagaagaggtccaatataatcaaccagccaccaggtagctggctgatcgccctgaggaatggtgccatatcgagggctcagtgttggtcactgctgctggcaaactgggcactcaacagtggccgtagccaggtcagccttggtgagtggaagtccatgttgctgagctgatgcgtaacctccatccctgccaccatggccatttcgtttatgggcccattgtgtgatgacagaggtggctgggggaagagtctgagtggtgtccacagaacgggtcaccctatctacttgattattaaaatgctcctctgctgaggtcacccattgctgagcactcacatgaagatataaatatcttcacagtttttgaccactcagagaggaccatccatataactcttccccaaatttctttgtcaccaattttccaatcatgcttcttccaagtccctgaacatccagccaaaccattggctacagcctatgaatcagtatataatcggacatctggccatttctctttccatgcaaaatgcacaaccaggtgcactgctcaaagttctgcccactgggaaggtttcccttcactgctgtccttcagggatgtcctagaaaggatctgtagtgctacagctgtccacttttggtggtgcctgcatgtcttgcagaaccatctgtgaaccaggccctagttttctcttcctgtcatctgatcatagggaactccccatgaggtcatcggtgcaggctggggaacagaaggtacggtggcaggtgtggagaccatgggcatttgagccacttcctcatgtaacttgtgccttcaagatctgctcgagcccagtcatgtgtataccacttccatttgatgatggaatgttgctgtgcacgacccactktatggctagatggtcagaaagtgcccaattcatgatgggcagttcaggtcgcatggtgacttgacccatagtcaaacattcagtttctaccaaagcccagtaacgggccaagagctgtctttcaaaaggagagtcgttatctgcagaagatggcagggccttgctccaaaatcctggaggcctccactgtgattcacctatgggggcctgccaaaggctccaaatggcatccctatctgccactgacacctcaagcactattggatcagctaggttttgtggcccaagtggcagagcagcttgcaaagcagcctggacttgttacagagccatctccttttctggaccccactcaataaatgggtcactcaataaatgggctggagtaacacactcaaacgaagaatatgttgcctccaaaatccaaataggcccactaggcattgtgcctctttcttggttgtaggaggggccaaatgtagcaacttatccttcatcttagaaggagtatctcaacaggccgcacaccaccgaacccctaaaaattttactgaggtagaagttccctaaattttagttggatttagttcccatcctctgacatgaaaatgtctcaccaataagtccattgtgtttgttacttcttggataatgtcatcaatgtaatggaccagtgtgataccttgtggaagcaaaaagcgatcaaggtctcttcaaataagattatgacacaaagccagagagttgatatgtccctgaggtaggacagtgaakgtatattgttggtcttgccagctgaaggcaaattgcttctggtgggcctcatggacaggaatggagaaaaagccatttgccaagtcaatggctgtataccaggtaccaggagatgtgttaatttgctaaagcaatgaaaccacatttggtacagcagctgcaactggagtcacctcttggttaggcttatgagaatccactgtcattctgcaagatccatcttctgcacaggccaaataggagagttgaacagggatgtgggaatcactacccctgcgtctttcaagtccttgatggtggcattaatctctgcagtccctccagggwtgtgatactgttttcgatttactatttttctaggtagaggcagctctaacggcttctgtttagccttttccaccataatagccctcaccctaccagttagggaacgaatgtgggggttctgccagttgctaagtatgtctatgccaattatgcattctgccactggggaaataacaggatgagtctgggggcccactggacccactgtaagtcagacctgagctaaaactgcattaattacctgacctccataagcccctactttaactggaggaccacagtgacactttgggtaccccggaatcattgtcagctcagaaccagtgtccattagtccaaatgtctgatcatttccctttccccagtgcacacttaccctggtagaatgtcagaggtctccttggggaaggatgagagaaagatccactgcgtaaattgttggtaatgtggtggggtccttcctcaaggggacccggcctccccttccttcaaggggttctgggtctgtaaactggctcaagtctggaaattgattgaggggccgtgattctctgtttttataattcaaactagtcttttgtgcattagacctggaagttttctgtttatataaattaagtaggaatgcagtaggcttcctatcagtttcacttctaggaacagcatgattaattagccaatgccagagctctacgtgagtcagactattctgattgctgctttgtctctaccatccattacagtagctacgaacaccttgtctttgacagttgagtgccgccacttggcccctgccacctagggatccagttattcccattgtatttaaattttgtagttgagtgattgcagttcccactgttagatttgacatacagagacaagcaattacagggctcttcaaagatgcagatgctgccctcacaaatctgttttgcaaagcattggtcaaggatatatcttctggaccctcccagctgggatgagtaggtctaaagtgcctaatccactccaccatcccaatctccctaagcctttggatcccttactctacattaaaccaagggagatcaggcatttccagctcactcatagtgggccatcttttaatccatatttcagctaaccaagcacataaactattagaaccttttttaactccccgagctgcaacattaaaagcagagtccctacttagtgggctcaaatcaataaatttagcctgatccaactctatgttccttctaccattatcctatacccttaatatccattcccatgcctattctccagatttctgtttatataaattagagaactcaagcagttcttttcaagtgtagcgcacctcatcacgtgccacagtctcaacctcacctcacctgctgggactttagtccagttataggtctagaagcaaacaggggtgttgggggtgactcctgaggagaatcaacattatcttgcctggcagctgcctcaggggaggccatcagtgttgcctcaggcagtgcagagtttatctcagacaaaggtggaaaggctgatggcagtatgggttagggaggggatgttgccactactggggatggggaagctgttccttctggcaaaaaaagttcatcagagtttacaagctcagtgtccccagcttcatcagggtcctcccacacgttcccattccaagttgcagggtcccattcttttcccatgaatgccttcactttaacaaaagacacctggcgaggctgtgcatgcaccttttgttgcaggtcagccactcacatgataagagcttgtatctgtttttccacaatttcagctctttctctgccagagataagactctcactcaggacagtcttagcagatttgaggctcggtgtctgcttctgaagggagattctacccaggaggtagaatccctgagttcgtcattttcattcatcactttgtccactgaacttaggagcaaccaaccagcttcattatgtcccttggttctccacatatggtcaaaggtattatgtatagagtcactaaactccttgcctctcatgagcgatgaatcaggagtgtcaaatgtgtttgttttgcataactttctaaacagttcatgccaaggactatcagtgttctctacttccattatcagtggaggccttagcatttttgggtctaatcatattaagcagccaactccagaaaccccacgacaaatgaaagaatgccatccttactattctgttcctctagaaccactcctggtaccaaaatccgtattagggttcctagatggacagaactaacaggatgtatgtatgtatgtgtatatatataaaggggagtttattaaatattaaattacatgatcacaagttcccacagtagtctgtctgcaagcttgaggagcaaggagagcctgtcaaagtctcaaaactgaagaacttggagtctgatgtttgaggccaggaaacatccagcacaggagaaagatgtaggctgcgaggctaggccagtctcaccttttcatgtttttctgcctgccttatattcactggtagctgattagattggtccaccagattaaggctgggtctgcctttcccagcccactgactcaaatgttaatctcctttggcaacactcacagccacacccaagatcaatattttgcatcctttaatcaagttgacactcagtattaaccatcacatggccattctgcctggaactaatttctgctcattttcaggtctcagtataaataacacttgctgagtgcagcagtcttctttgaccctttctgaatgcagttcagtgtttctaagtgttcccattgtaccctgtatttcctctaacatatagcacatttctaccaaggctgtcagactcctgtgttctctgaggacttaggtgctgtgtgttgtgttcattcctgtgtttgctgtgcgtggaagagagcaggtgcataagagatgatcattcagtgaataaaagagcatgtgaactcgagaggagcagtgcccagaaggaggaggcatggtcggccaggggaggcaggttggattgtggttgagagtacaaccctcgtcagataaacccttgtcaggtaaagcctttcaggtaaaggcttgagacccatttcttttaacctggcttactctcattttcctcatctctaaaatgaaacaataatagtagttaactaagctctgaataataaatgagatgatgtgtagagacagaatcttttgtagccttctggtacttacagcactcattacttagtattctagttattttttgtcatctgaatttcgtgagggcaaaagtcaatccttttttttttttgagacagggtctcactttgtcgcccaggctggagtacagtggcacagtcatggctccctgcagcctcaactttcaaccaatcctcccatgtcagcctcctgagtagctgggataagtgcatgccaccacgcctggctaataaaagtcaattcttattcatcattttattatttattttttggagacagaatcttactgtcacccacactggagtgcagtggcataatcacagctcactgcagcctccacctcctgaggttcaaggtgatccacctacctcagcctcctgagtagctgggactacaggtacatgccaccatgccctgctaatttttatattttttatagaaacagggcttcgtcatgttgcccaagcttgtctcgaacttgggctcaagtgaaccacttgccttgggcctcccagagtgctgggattatagacatgagccactgtgcctggccttattcatcattttatccttagcgtttggtacttaacatgttcaggagctatttgttgaaatgaattggtatatattagagatgggtcattttgcaactctgagtaaccagatacacaacttaaatattgactcaggcccattggagacctgtgattttgggccactcctcagaaacatagttctgagaagcgattaggttggcaacttttttgatgctagaccagctgtgtgatatgggttccagcaggtgtgtctcctttgggccataagcttgctaaagaatgggtggcagttctcaaattctcatctcttgtctggcctagacattgccagaatgggagtgcttctggctcagcatgggtgaggttcttagataatgtgggggtagacacagctgtgggttctgggaattgctgatactcgcagtgggatccagaacagatgtagccagtttcttttgaactgtaggggaaaacttgcggaaactggaagacttatttttcatgtcttcatctttttttaaaaaataaaataaacaaataaaaagtagccataacattggagtaaatgttgaagtaaggaattaacagtggcggggcagggggctcacacctataatcccagcactttgggaggccaaggcagaaggatcacttgaggctgtcatgcttctgttccctctttttttttttttttttgaaatggaatctcgctctgtcacccaggctgaagtgcagtggcacattcttggctcactgcaacctccgtctcccaggttcaaggaattctcctgcctcagcctcccaagtagctgggattactggtgtgtgccaccacacccggctaatttttgtatttttagtagagacggggtttcaccatgttggccaggctggtctcaaactcctgacctcaagtgatccacctacctcggcctcccaaagtgctgggattacaggcgtgagccactgtgcctggcccatgcttctgttctaattgaatttaagccccactgagatattctagtttagaaaacctggacgtgctgtgatcctggtgccagcagtttttgcctttcctttgtgccataatggcaagctttgttcaaattcaaatggagcagcaagaggtggtatacaaagcacaaagaccatttttaactgatgcatttgttgaaaatttccataattttcagagttagttttttaagaaaagtctgtcagcctaaccagtagaaccagttctgcttgagtattaaagaactataccttttctacctttttgctgcacattgaacatgatagttagtggaataagtgaggaatgttacctcgtgtttcacagctgcagaagtaaggttgtcaacatctactaactrggtagttggtagggagtgtcagagttaaaggcgcagaggcttaagggcaactctagacccttctgtaaaactagtttatggtttaagaagctcccaccaccccaaagaatagggatagtacacaggcagctctcactggatgctgattgaattggctgttagatcctgggatgtgctgggcctatctactgctctctctgaaaaggcttcacaagtaatagtctttccattaagctttagaggaatcctccgtttttcagtatattgcaatatgagtagagcatttggtgatgccatccatattagtggctaagcctagctattgtttcttttctattctttttttttttttttttttttgagacagggtcttgttctgtcacccaggctggagtacagtggtgcaatcatagctcactgcagccttgacctcccaggctgaggtgattctcccgccccagccttctgagtaactgggactacaggcacatgccaccatgcctggctaattaaaaaaaaaaaaaatttttttttgtggaaatggggtttggccatgttgcccaggctagtctcgaattcttaagctcaagtgatccggtccatccaccttggcctccaacagtgctgtgattacaggcataagccaccgcgcctggccaagattatatactcttgaaaggaagcaagaattgctcaggcatacataccagtgttattcatggttagagcctttcctggagtcccattgaactcttgagtcagttggcttgaaaattagagactcatgcctcagaggacccagtggagtgagtcataagaggtaacactttcagtaggtgttgaggagcctcaaggttcttctccatgcagctggccagtgtcacttaggttgggtgtaggtgtcttttgttgttgttttccctttagcttcccttggcctctctataactctcattcgaggctttccctggtcactttgtgttgctcgcttttacctggtttcaggtggatctagcaggtacttcactgatcattctgccttgtttttcctttttcctttcattccttctttccacatgacagtgtggcattgaataagaatgcagactgggccaggaacgcagactgcgcacagggtttgactttcacctgtgccacatactagcagggtgtcttcatctgtaaaatggagacaatcatgggtataataactctattgcaaaggtttgctgtgaggattaaatgagttaataaataaatacaaagctttttagacagtagctggcacttagagcccaagaaatgtttgttattattcacttctcaacctcagtaagggctggccctgtacccactttggaaaaaggaacagtagactttggcgttcacagattggacatctgtgatgtctacagtccacaagtgactcttggtcacagtgtagtaatttgtaatgccactaagaaagagattatatttactcattcaattgtaaagtttggacagcctttaatcactcacccaacaaatttgccaatgaaaacaacagcttatacacattcagaatacagcatggttaggagtaggatgcacataggggaatttcaggggaacccactccaagatccacatgtaggactcagcacatccagatacgggtgctctcgtaccttgttggtatccacctctgctctccttcattcagctatgttcattctcctgtgatcaacaagcaaagaatggtaaatccgttttctcttaagaatattgaaatatattagctccatatttgtcagttctttctttgtttttcttgtggagttcaaaaagcgattgtgaaatatagggatgaagagactacagacattgccagtgaatactctccgttccgtccttcctacccacccaaacaggtaacttgtgaaaatcaaattcaaagaaaaactccaattaaacttatttttgaggcaaggatttctttatgattcttatttgtataccctgattttttggagtcctctaggttatttctcttcttgggactggtttggatttttgtttgaggggggaagcagttgatagtggtgatgatggttatttgttttttacctgagttgattatctgtaagacttgcatagtgtatatttataatttttttgaagtgttaaccagaaaggattagatactcatgatgatttttattttttattttatttatttatttatttatttatttatttatttatttatttattttagatggagtcttgctctgtcgcccaggctggagtgcagtggcacaatctcggctcactgtaagccccgcctcccgggctcacgccattctcctgcctcagcctccagagtagctggactacaggcacccgccaccacacctggctaatttttggtattgttagtagagacggggtttcaccagctaattttttgtatttttagtagagacggggtttcaccatgttagccaggatgatctcgatctcctgacctcgtgatccgtccgcctcgccctcccaaagtgccaggattacaggcatgagccaccgcacccagcctgatgctcgtgatgattgagtacagtgtggcaccttaaattccagtgctcccagtggttatataggtttctattctcaatttgttaccaccttttagcaacttgatctactgtcaacaaaattagtagctgagaaagcttttttgtgtgtgcatgcccaagcaggtccttcctctcggatgtggtctcttttttttttttttgagacggagtctcgcactgtctcccaggctggagtgcaatggtatgatctcagctcactgcagcctccacctcccaggttcaagtgactctcctgcctcagcctcctgagtagctgggattataggcatgcatcaccatgcctggctaatttttatattttcagtagagacggggtttcagcacgttggtcaggctggtctcgaactcctgactttgtgatccacccgccccagcctcccagagtgctgggattacaggcatgagccaccacgcccggcccagatgtggtttcttaagaaagccattggtctacttttttggtcttgcagagggttcaaagtgctttctattgcaaaagataagatgcataatgaccagacataaatcatggtgtgctgctagaagataaatcctattaatagaaaaatgctatttcctttaccctggcttcagatattcctaatgtagttaaagtcttacagatttagggccaacttcagtgttgctaatttcaggaattcctgatccacagaaaaaagaattgtgagcctgagtagagtcaatttagtttaatatgggaaacaagattgggagaaaagtagaagttactagtctcatgtaacagttttttttgttttttttttttttttaatgatagagtctccttctgttgcccaggctggagtgcagtggcacgatctcagctcactgcaacctccacctcccgggttcaagctattttcgtgcctcagcctcccgagtagctgggattacaggcacatgctgccgcatcctgccaatttttgtattttcagtagagacgtggttttaccatgttggccaggctgttctcaaactcctggcctcaagtgatccacccacctcagcctcccaaagtgctgtgattactggtgtgagccaccacaccctgccgagagattcttgaataattcccctactctttgtttactcatgaaaggaaatcaagcagaagcacagatcctgctacccccaacaactataacaaattacatgaccaagtacctgtgtcaccgaagttatgtatgtatctcttaaagctctcatactaggtagtattgtttccattttagtatatcggaggaaactgaaactgacactcagtcagtttaaatgacaagaccaaagtcacatctgtggatgccagagccatatttggactgtggccccaggtcggtattctttctgtttttagtacatgcacagagaaaatattggagaaacatagagaaagacaaaaacttaaattattagtactatgctgtataaaaaatacaactttctacttaaaaaaattttgttttaagatatacatggatacctacctaatatgtagatgcaaattcatttttctccctcagattttctacttagctggaaaaaaatgagtattaagtgttcattctagaaaagtagggcagcttttaggaaatgaaatgtctgtgttatgtccttttagcactgtgtcaaatgcaatggaaagaaattgttttggaacctttagagatgttgcttcttagagtttgtccctctggctggataaaattaatctgagaacaacaatttcagtttttgatttaaagctgataggagcatttataagcattttgacctatgagagcttcattgtacccccacacaccctagttcttttcaagatctttctggcagggccctaccctttttctacctctcctaaggtgccccaggatcatcacacatttgagatgatgtgcactctgaatgtgaacttggtaagagtccaaagaattgacttttcaagaaccagtgaagtaaataccaccaggctgcctctcagcaagtcctcaagagtggtagttgactttaacatccatgtgcttttgtcctgtatgtccccagcccctagactgcggactggtactagtctgtgccagcactgcaggagttgaatgtaggagtagggggcagcaaggattacctcctgagttccacctcctgtgggatcagtggcggcattagattcttataggagcatgaaccctattgtgaactgcacatgcaagagatccaggttgcacgctccctatgagaatctaagtaatgtctaatgacctgaggtagaacagtttcatcccaaaatcatcccctgcccccctgccaggtccgtggaaaaattgtcttccgtgaaaccaacacctagctccaaaagtttggggaatgctgctgtgtgtggcagatccttgaatgtgaagtagttctcctaacggaatttttcttatttgttctgatcagttttgtggtaagagtttcctttacaagcaatggatgctacattgattttctcttttgcaatgggaaactggagaccatgtttgttagaattggtasatagcagcgaagaatgtaggctctgagttcaatggagcttgcagatccttggttagtaacttttttttttgagacacggttttgctctgtttctcaggctggaatgcagtggtgcagtcatggctcactgcagccttgacctcctggcctcaagtgatcttttcacctcagcctcccaggtacctgggacttcaggtgtgtactaccatacctggatgattttttaatttttttgtttgtttgttttgtagagatgagtctcactctgtttcctaagcccgtctcaaattcctgggctcaagcagtcctcccacctcggcctcccaaagtgttgggattgtaggtgtgagttgctgtgcccagccataacttacctttttttttttttttttttttttttttttttttttttttgagacagagtttcgctcttgttgcccaggccggagtgcaaaggcacaatctcggctcactgcaacctctgcctctcgggttcaagtgattctcctgcctcagcctcccgagtagctgggattacaggcatgcaccaacaccccggctaattttgtatttttagtagagacggggtttctccatgttggtcaggctggtctggaactcctgacctcaggtgatccgtccacctcggcctcccaaagtgctgggattacaggcgtgagccaccacacctggccaagaatttttaaattaccaaaacagtcgtagcttttaacatgcaggaatagttcctcttgcttaagccccagaccagtacatcagaatcatctggggagctttttacaaaatcagagagccagcctgcatccctgcactataagtccgcaggcttatgggtgccagagagtgtttagataacaagcttcccacgtgatctgaccacactgcctcagagggacttggtttactggcatcttagtcacctccaatttataccatgctcaaaaatgagttctcaggaaaagccctaacattcttcttcagcctcaagataggctgtacccaagtttcttctaatgccatatttcagtctgaattaacaaattcagaaaatttcccacccagggccttctaccaaagaaaaaaaaaaatctgattttatttgttgacaaaactggttgtgtcttgtagaatttttcacagtcagaatttgactgattatatccccactgtattatttgacatgtttctctgtcccagtgtttctgatacattggctgattgctgtggaagttcaaggagactgaggttagatattttggcaagaacacttcctggatggtgtggcacactttattaggaggcccatggtgcctctctttgttatgttaacagccatatatgatcattgctttggtctattcattcattcatgtttgtaattaattatctttgaatatcccataaatactgagccccaagtagaggcatttgaatatatttttactgagaagcagtgacccagaaactggccttgattctctgttagaaatgactgtatcccttggcactgtcttgtggttttaggtaactttgaatggacaaagaatgtcccagctctctttactgagccctggtgtgctgtagattagctggatcaatactgacttgatacattcatgttttcctattcttacctttgggccttatttatgtgtccatattctttcaagaacacatcatcttttgctttcaacccttgatcctcactggaaggagaggggatcatgctgtggcgtgttgtctcttttgctttctttctttttcttttttttttgagacagagtcccactgttacccaggctggagtgnnnnnnnnnnnnnnnnnnnnnnnnnnnnnnnnnnnnnnnnnnnnnnnnnnnnnnnnnnnnnnnnnnnnnnnnnnnnnnnnnnnnnnnnnnnnnnnnnnnnnnnnnnnnnnnnnnnnnnnnnnnnnnnnnnnnnnnnnnnnnnnnnnnnnnnnnnnnnnnnnnnnnnnnnnnnnnnnnnnnnnnnnnnnnnnnnnnnnnnnnnnnnnnnnnnnnnnnnnnnnnnnnnnnnnnnnnnnnnnnnnnnnnnnnnnnnnnnnnnnnnnnnnnnnnnnnnnnnnnnnnnnnnnnnnnnntagttatcagtcctaaataattagtttaatacattaaatatccataacttggagttttctgtcttcctttagttagaacacttcctgtttttaaaaagtatctagcttgggccaggcatggtggctcacgcctgtaatcccagcactttgggaggctgacgcgggcagatcacaaggtcaagagatcaagactatcctgaccaacaaggtgaaaccccatctctactaaaaatacaaacaattagctgggcgtggtggcacacgcctgtagtcccagctacttgggaggctgagacaggagaatcacttgaacctgggaggcagaggttgcagtgagctgagatcgtgccactgcactccagcctggcaacagagtgagactccatctcaaaaaaaaaaaaaaaaaaaaaaaaaaaaagtagcttgtaacataaacgaaaagctcctgagggtatgtgatattttagtgtgtattctgaaagcatggcttaatgttattcattttaaacccttaaacaaagaaaaatatcctttgctcttctcttttaggaaattcacacaaacgaaaaggaagtaacagagaaggaagtaactcttcacttgttgccaggtaactgtcatgttagcatagtaactcctatgcaaggcaaagccaatgataaattacatcatccctagccttgctatatttaaactcctttgttttcatcttctcacatataacagtaatgaattgaaaaaacatatcaaggtttgtagttcaataactacacacctgggtctgagtattacaacatctgcaaagaatttttcttgtttcctcttcccccaaactgatgaaaataaacctggaatgttctcactgctttcacaagcaaatgaggactttttcaggccattctaatggcctcttccagtatgctgatccccaatctgtagggaattgaggaaaacaattcaactgctatggcctcccaaggcaaccattggtgggtggctttacctctcagtccatacccacttgtgcatgtgagcacgtgtactggggatgctggggtttaccagccttggggctgccagcacttcgccctgcagtcattgygaaggagcctggattggttaaatatttttgaggtagaggacagtgactttagcttaagttaagttttagtcatttccatgttcaggagtagtaactacttggtggtgtatcctctccatatatgggatattctgtgatccatgtatttaattctttttctactttctttttcttaattcaaaatagcttttttaaaataagttctttaaggtacatttccccaaaacaatacaggctttattctgttgctttttattttattccagtttattgaggggatataaatctgtgcaagtttctgactgatccacgttatttggtaaaagaattctataactttttttgatgtttttaaatgtcaaaggctttttttctatagtgatgacttaaaccttatctcctcttgtttttctcttcttggtgttatagattcagaaattttatttttagcttagcattatgcatattctcccccctcctgaattacttcacagtctcatctaggtgtgggtgtgcagcggtgagttcacagttaacttctctgagcctagtttcacaaactagacaaagatcatttctagctcccaactcttgtgcttctagactctgtgatctggtataaaccagctgattatggcacaacatgccatgtttgcagagggcctcaccaggaatgttgtattagctagtgcatgctaatttctggtcgctagtacatgagcatgggacggggctggcctggtcttggggagagcctcaccattaaaagtatttcaccattaaaagtattgggaggtgaaagcacaggaagccttgcttacatgtcttyccccatggacttggcagagacactttttctgggactattttaaaccctaatgaggccctgtcttcattatttccttcaaactgtgatctcttgagaggctgacctagtgactgagccatcttccggtatttccttagtgtttcagccagaggtaattaaccccttgaaagatgagagaacagcaccataatatttgtcccttctgagtgtctgaaactgttcgttttcatattgaaggtagactaaataaattttgagccaaaaagtaaatttaaagaccttgaaggagctatcaagtgggagattccaaggagaagatggttatctgttgcatgagaagaaaaatcctttgggttttttttgttgttgttgcaaaacattttacttagtttttcatttcccccatagtcttctcttttgcctgcccccgtgagctcctctgcttccagatggcagagaatactgacctattccctaatcctcatctttttgactgcaaggagggatactttctgtctccaggggctgcagcttctcacgtcggctgggtgctgcagatggaggaggagaggtgacgcattgaaaggaaatacgcttaactaagaaagagaggaaacacgttttttccccacaaacctctgacctctgttttcccagcgtggagccagaacgagggtggtcatgctgtggaaggcggcaacacctcctggatctatggaagctgcctggaagtcccatggccagggaggcactgtcactctctctcagcacttccagtattagaagctgccccctctcacaggaaagtgggcttgggatctgcgtttttttagggcagactggggcaagcccatctgtgttcacttagggtattgcttctatggaacatctgcttgggtcaaagtaatgaaaacactaagatttctgcgtgaaagtgcagctcagatcattagtacctatttggaaatttccattattcccagtgagaagatagagaaatgtcctgcacagaggtgtatctgagccatttcaatttcacttcttggtggtttccactctgccgcatcttctctcttatgtttttgcagctcctgccatgctgaaaagtgtaaagttctaaagccctgtgttgtattgtatgtttgtccttatgtaaatagggctggaaagcctttagtgtttgcatatcgtatgttccctgagaactctaaggaggacctgttttggtttctaccaggtgaacagctgctttgtgaagccagcacagtactgaagtatgtccaggaagattcctgtcagcatggggtctatgggaggcttgtctgcacagacttcaagattgccttcttgggtgatgatgaatctgcattggataatgatgtatgtatgggctgcatttggcagagtttgtgggcaacagtgtggttgtggttccgttgtctttttttcccagcttctcagttactctaccccctaacacacataaacacaaaggacagaaatcctgaatgtatgaactgcatttggtgaagtttggggggaatagcacagttgtaaaatagctctgttgtcttttttcccccagctactcagttactccacttcccatcatccccaccctccccaccaycccacataaatacacacaaaggacggagtccttctcatcactggcctgctctctgtcgttcagggtctcctttccgtggcaggaccgttaagaaatttctcacccgtgcctcatgtcatactggcttacttttgacctcatgtgtcaactttcaattttcttctgtatttcagtgcaatatatatcactcactggaataacatcttccaaatatactagttccccacgttttctctatactaagctcttccttaaacccaggaactgagttcagtaatgaaaccgatggtgaatgcagcctttgaatttgggttcactctgtttttgttttgttttttatttttaattgtttttgagacagagtctcactctgtcattcaggttggagtgctgtggcgtagtcgtggctccagtaatcctcccacctcagcctcctgagtagctaggaccataggcgtgtgacattcacgcctggctaattttgttatttttggtagaggcagggttttgccatgttgcccatgctggtctcgaagttctgagctcaagaaatccacccgctttggcctctcaaagtgctgggattacagacatgagccgcctcacccggctcaccttatgtttaatctgaacctagtagcagtagccttgtgaaatttgttcctattcatgaagaatgagcaatcaggtaaggagagaactgcccataccactaggagagyaccatatgttagtggaaacccaaccaaggcacatcctggccccaatgtgccaactgtcccagatcacccttgttttttaaacagcagcaccagtactgcctcttccatctggccttgggcttggttcatagtcctgtacaaagagagcattcaccagaaacttgaatctcttgttcttcctgaagctgacttcaggtagctctgtcaatcccctgttcacatttgtgtggagaaatgttaacctgtacataacttccccacacttctcaaagtgattgtgtgtggcatggtgggtttgcctaggaggggcccagaaatggcatgttctggaccacgcgcggtggctcttacctgtaatctcagcactttgggaggctgaggcaggtggattgcttgagctcaggagttcaaaaccagcctgggcaacatgtggaaatcatgtctctaaaaaaacacaaaaattagctaggagtggtggagtgtgcctgtagtcccagctactcaggaggctgaggtgcaaagttagcttgagcctgagaggtggaggttgcagtgagccaagattgccccactgcactccagcctagcctgagtgacagaactaaaccctgtctcagaatgaatctcaggagcttttctcacatacttcatcgtcccttttttaggaatgtcgctgcatttccccatttatttttatttatttatttatttatttttgagacagagtctcgttctgtcacccaggctgaagtgcagtggtgcgatctcggctggctgcaagctccacctcctggtttcacgccattctcctgcctcagcctcccgagtagctgggactacaggcgcccaccaccaagcctggctaattttttgtatttttagtagagatggggtttcaccgtgttaggcaagatggtctcgatctcctgacctcgtgatccgcccgcgtcggcctcccaaagtgctgggattacaggtgtgagccactgcacccggccccccatttttcttaatatccaagtagagaatggtgatttactctgcctataaatgtctaacagtatgcagaggagtcacagttgtttccttttgaatcttctaggaaactcaatttaagaataaggttataggagaaaatgacattacactccactgtgttgatcagatttatggaggtaagtatctgtttttccctggggtgttggcaacctttgagagtataggtgataatgataataatatttttatgaccatttataatttttaaaaattttttcacatatatcatcttgtttaaatctgttttatagatgctaaaattgagatgtaaagtggtttatataaggtcacttagctagaggagtttggacctgaacttggaacctgttctttttaatacttcacacgacaccattatatgctagatgttgatcagactttttgatatcagagttagctgtgtaggttttactttataggctgctctgataaaaaggtctgttgtattgcattaagatgtcttttctgctgactaaacaagcctctcctgccaagcctctctctgttccacttccgaatgtttttgtattcggggcatcttcagaaatcattcagtgatcatttatgatgttctccagactactaggtgctgagtgggtccacattctgggacagtagggggtctcagcaggggtcctagctgtaaacccaggagttgactgtcatgaaagcatgtctctagtcatttccctttcatcttttataagctcaactttcagagtgggttttctttgggccactggaatcagttctgccaacagtggccagtctgttcttgtgcttactccagaggagtgaagcacgctgactgctctcagagagccagggcccctgctggaagagattgggcttcctttggcagtcacttaaaagtcaggcagcacctttcctctcattcttgggaagtatccctagaagttgatcatctacttcatttctttagcattcacttattgctgtgtaacataatttcccttcctgatttcattgctgatctgtagtgtttgatgagaaaaagaaaactctctttggacaactgaagaaataccctgagaagctcatcatccactgcaaagaccttcgagtgttccagttttgtctgaggtacacaaaggaagaggaagtcaaaagggtaactagttgcatgtgtttttaggttttatttcccatcaggttttccccactagctctagtttttgcttacgttgcatgaaggttgaggggaggctttcactctgtgaacttgaaattggttgtaatcccatattctttgattagaaygtgaaaagtaatttgataaagcatgcstgtgtatcatcttggcacatgctacctttaatacttcaattcataatgtttttattcctggagccactaaatggtgggaggtggtaaaccaggtcagtaggcggtaggggaaaatgaagaaaggatgagacagctaaaagtttatccctattctcccacctctgacagtctttccaaaagacagtagtgttggagaattccaacttctatgagtaaatgagtttacctctgggaggtagtagttgtgcatggaaaggaggaagtacacaggtcagatgagcaaagccaaataatcagacatgcttttagagactaaataaacataatctcctggtcgccacagcaagttgagatatgcaactaggtgaactcagaaagtggttgtatcaatttgatgtttgttgtaatttccaagatttttttttcttttttttttgagaccgagtctcactctgtcaccccggctgaagtccagtggtatccaagatttctcttactaagatattgatctcagacttttccctctgatggtataaatacatcaggggaaacctatcaggaggcctgttcatgtatactgtcttggctgcagtgagtttgcacacttagtggtaactccttaatttcctttaagtagtgtggtagttcagttagaataataaacataactgatatctattctgagcaacaaaagagtatagatatagaaaatttcctgagaaggcagaaacttcaatttgaacaatggttttagtcacttaaccaaatatactttagtttcacacgaaacagcgtgatagattgatttctttcccttatcttccataagaagatcctaaaggcctcaacaatggatcagaacagctgtgtcttggttataatccaatatcagctgtaagtctttgacatgtcagagttttggagtatctgacttaatgtggcacttacgttttttagcactttgcttttgagaaattagactatgttttaaaattttccctagaaattcagagttcttagaaaacctgacacactgggctgggcacrgtggccaatgcctgcaatctcagcactttgggaggccgaggtgggtggatcacctgaggtcaggagttcgagaccagcctgaccaacatggcgaaaccctgtctctactaaaaatacaaaaaattagccgggcgtggtggcgcatgcctataatcgcagctactcaggaggctgaggtaggagaatcacttaaacccaggaggtggaggttgcaatgaacaacaagagtgaaactctgtctcaataacaataataataataataataggctgggcaggatggttcatgcctgtaattccagcactttgggaggctgaggcaggtagatcagttgaggtcaggagttcaagaccagcctggccaacatagcgaaaccccgtctctactagaaatacaaagattagtcaggcgtgatgatgcaggcctgtaatcccagctactctggaggctgaggcaggagaatcgcttgaacccaggaggcaaaggttgcagtgagccaagatcatgccactgcactgcagcctgggcagcagagagagctgtctcagaaaaaaaaaaaagttaaaaataataaaaatttttaaaaaagaaagaaaacctcacaaaatggttagcatcctgttgatttgccattattccaaaaagctaatgtcatagatacagatctcaaatgagaattaatatgttgtccattggaacccctttggcatgactaagaacttagacaccttgactcttgtctttgttagtgtttatctgtcaaaaccataactatatccattgttcgattcttttttagattgtcagtggcataattcatcatacccaggctcctaaactgcttaaacgattatttctgttttcctatgcgactgctgcacaaaacaatacaggtaaatatcttctgggttctaatttgagggtaagcagaagccttccaattcccacctgaagccagtgggggagaacacatctatgggttgttttgttttttcctgtctcctctaccaattggtcaccccttgcttgagtgattcatttagatatctacattttctttcctgtgatcttttttttttttttttaaagatggagtctcgctttgtagcccaggctgaagtgcaatggcatgattttggcccactgcaatttccgcctcccgggttcaagcaattctcatgcctcagcctcctgaataactgggattacaggtgcccaccaccatgcctgactaatttttgtatttttggtagagatgaggtttctccatgttggtcaggctggttccaaactcctgacctcaagtgatccatccacctcggcctcccaaagtgctgggattacaggtgtgagccactgggccaggcttcctgtgatctttgtttaccttcttttaggtttgtttgcttgctttttgcaagggattgtttgattggttgcgttttatgaaagataagatcaaggtccagatacagttgctcatgcctgtgatcccagcacttcaggaagccgaggtgggtggatcacgaggtcaggcgatcaagaccatcctggcaacctggtgaaaccctgtctgtactaaaaatacaaaaattagctgggcatggtggcgcatgcttgtaatcccaggtacttgagaggctgaggcaggagaatcgcttgaacctgggagatggaggttgcagtgagccgagatcgcaccactgcactccggcctggcaatagaatgagactccgtctcaaaaaaaagaaaaggaaaaataagattaatatattataactaggaatgtgagactatagggaaacaaaattgagaaaagtttaaaataaccatgtttgtccctgggtttttctgtttaaatatgcttgattttatttcataagaccatagagaatttcttgcattctagaaagtttttaaacaaccagagcatactttatagcaaatattttaggggaaatgggacagttatacataagaagagcacatccagcaactaatttagtaagacaaaacttgaagttccaaatgtttttcattcagtttggtgaaaaagagagcaatcttttaagaacaaaactggtcatctgaattagccattaacaatgcctagcattggacatgttttcacagatgtctgttttcttcctcttgttctttcacctcagtctgttcacttggttctgtccattactctttttttttttttttttttctgagatggagtctcccactgtcgcccaggctggagtgcagtggcacgatcttggctcactgcaacctccaccttccgggttcaagcaattctcccaccttagcctcccgaggagctgggattacaagcacacaccaccacgcccggctaatttttgtatttttagtagagacggggttttaccatgttggccaggctgctcttgaactccttacctcaggtgatccacggcctcggcctcccaaagtgatgggattacaggttcaagggcccgtccgttactcttttatttttcttcaagacagggtcttgctctgttgcccaggctagagtgcactggcgtgatcttggctcactgcaacttctgcctcccaggttcaagcaattctcctgcctcagcctcctgagtagctgggattacaggtgtgcgccaccatgcccagctaatttttttgtatttttagtagagacggggtttcaccatgttggccaggctggtctctaactcctgatctcgtgatcctcctgccttggcctcccaaagtgctgggattacaggtatgagccagctcgcccggctccatccattactcttaacatgaagctgatgtttagtgatcctgagtcctatgtactttttgtcagggaagtggcagtttttttttgttgttgttggttgttttttttttttgagacgactctcacactgttacccaggctggagtgcagtggcgggatctcggctcactgcaacctccacctcctgggtttaagtgattctcctgcctcagcctcctgattagctaggattacaggcgcatgccaccacatgtggctaatttttgtatttttggtagagacagggtttcactatgttggccaggctgatttcgaactcctgacctgaagtgatctgcccgccttggcctcccaaagtgctgggattacaggcatgagccaccgtgcccagcctagcagtttcttttaaaaagcacacaaggctttgtcataaggctttctggaaggcagagttgctttgtcactatccattcttttagtaaatatgtattgactgcttgctgtaagccgggttctgtgggtatatggagataaacaggactaaatccttgccctcaagaagcgtaaagttaaaaaacaaaacaaaacaaaacaaaaacgtaaagtcatataggagaggaagctgagtgatgtgtcctctgtggaggcgcccaccctctgggggagggtggactatcgaggggaaaagtctgggccttagcagatagtggagcatctggtaggcttaaaggagtattttgggcagagggattggcgtgtatagagatgtggctatctcagagagcatgctgcattttgggagctatggtgatttcatagaaaaggtatagatagattttggtgtccatttgacctgtgttcaaatcctggccttgctgttttccagctgtgtgatcctggggatgacacttaactctgttaaaataagaaaacctctgctttcttattttaaaaatagcagcaataagtcttgtgagaattataaattgttagtggrtggcacataaggtgcagtcattaattgggaattaattaagagtaaaactgcatattattgaggacagattatgcttagagaattacactgacataaaatacacttcccagtaatattaggttgaacataaaatttatcccttaattcattcagtttatctttgtgaatgacagatttttactgcaactatatatacaagtgctgattaactgggtgctgtcttagagtttgtggcaatatgacatatacaaatatgacttgttgattgctataatttgtataaacatttattgagtgcacatttgcaaaatcatatctattttcaggaattctgattttccttgtatcctgatttttgttctgtacccagcataggacactttctcggcctgccaacatatgtggattagcatgccaaaacccttaccttgatcgaccttggcagtttcattaccttctggtggctttttgtgccagaggcccaggatatgtattaatagcatcttttattctgatttaattccactcttcttctacttccttccagccctcatttgttttgagaagtaaaggttataactcgtagatgctaattgaccaaatagctttttcattgaataggggtttgtagaggtgggtgtttcgcaatttgaatacctttaattattccctggcttcataattcacaaatgtgttttggttggaaggtcctaaatgtttatgacatggcattttagggaaggacttccttgcattgcctagaagatggcctactgtggtaaatgggaatgttgttactaccttatatccatggggatttttttttttttggtggggtttggaggggcaggattagaactttatggaaatttcttttatagtttcctgggtttgaatcccagttccatcattgcctagctttgtgacgtaggcaagttacttgacctttctgtgctatatctgtaaaatggaggaaatgatcttacctattgtattatctattctatagggttgtgaggattgagttaataaaatgtaatataggctgggtgtggtgttgcatacctgtaatcccagcactttgggaggccgaggtgggtggatcatgaggtcaggagttcaagaccagcctggccaaaatggtgaaaccccgtctctactaaaaatacaaaaattagccaggcgtgttggtgggtgcctataatcccagctattcaggaggccgaggcaggagaatcgcttgaacctgggaggcagaggttgcagtgagctgagatcacgccgctgcactccagcctgggcgaaagagcgagactccgtctcaaaaaaaaaaaaaaagtaatatgctcagaacagtacctggtacctagtaagtgctatataagcactattatcatcatcattattcttatttttgctatgatctggttttatgaaaaggagctggggtagtttttgtaaacccttcgtttttcccagaaggcttggttttttagatgtgcaaagacttgaactatttgtgatagaatttgtgtatatactcaagactattgtggtatatgtataaatacccggcaagcagtgctgtggcttgggagaagaccaaggacacatctgctaggctgcaagagcggtgctccagggcattttgtcctagcaggtagtggcagggccgggttggggatagaagtatgtacccataaccatgattcagccttggctagcaggccctgatcctcaccatggccatcatctgtttatggccttcaggaaccggttgtcacactagacaaatcctcttacaagcagtgcatcttcaaactgaaggaggatttacattgaagatcctgagatactattcaaattagttggccgtcttatgcacacattggcagggctaaaaatattttgtcactttagcatttgtgccaagcctgtcttttagtgcttcacatgatctttttgtgttatataaattaactcatggtcagatgactagaaatggagctataaattacttttccaaggaatggaactcagttcctacaatgtraaaagacagctggcctggcgcgatggctcactcctgtaatcccagcactttgggcacctgaggcaggtggatcacttgaggtcaggagtttgaggccaacctggccaacatggtgaaaccccgtctctactaaaaatacaaaaattagccatatgtggtggtgcgttcctgtagtcccagctactcatgaggctaaggcgggagaatcactttaacctggcaggcggaggttgcagtaagccaagatggcaccactggccactgcactccagcaggggcagtagagcaagactccatctcaaaaaaaaaaaaaaaagagactcagtcataattttggattaatgacaaaaaatggaacaaggttaggattaagcaatcaattcattctgcttggataaaaatgggcttagtggaggaaaccaaaacctaaggagggactttcacataataaaagcaccagtgcttcatggaaagattttattgtcttttacattttgttctcttagtcactgatcccaagaaccataccgtaatgtttgacacacttaaggactggtgttgggaactggaacggaccaaaggcaacatgaagtacaaagcagtgagtgtcaacgaaggctataaagtctgtgagaggtaagctttccatgctgggcacatgctgtacaattcacccattaaaagtgtacagtgttttttagtatattcacagggttgtgcagtcatcaccacagtcaatttagaacattttcatcctcccaaaaagaaactccatacccattggctgtcactccccattttccccgaatacctctctttcttccccagtcctagacaaccactaatctactttctatcactatagacttgcctgttgtgaacatttcatataaatggaatcatatcatatgtgatcttttatgacttggttctttcacttagcatgatgttttcaaagtctgtttattttgcagcttgtatcagaatctcattcttttttattgccaagtaatgttccataatgtggatatagcacatttaatttatccatctattagttgatggactattggattattttcactttttggctctttgaataatgttttttggttttttgtttttgtttttgtttttgtttgagacagggtcttgctccgacacctatgctgcaccatgctggagtgcagtggtgccatctcggctcactgcaacctccgtctcggctcaagtgattctcccacctcagcctcctgagtagctgggaccacaggcgtgcaccaccatgcctgtctaatttttctgctttttgtagagatggggtttcaccatgttgcccaggctggttttgaactcctgggctcaagcgatcctctcacctcrgccttccaaacttctaggattacaggcatgagccatcatgcctggccatgaataatattgatatgaacattcaattataaatttttgtgtagatgtatgtttttatttttcttgggtatattacctagaagtggactgccagatcctgtggaaatttgtgtttacccttttgaggcactcacagactttttcacagagactgttccattttatattcctaccaacagtgtatgagagtttcttcctccacatcaatactagctttttattatgtacttatttattattcattttaagatggggtctctctctgtcccccaggctggagtgcagtggcgtgatctcggtccactgtaagctccgcctcctgggttcacgccattctcctgcctcagcctcctgagtagcttggactacaggcacctgccgccacgcctggctaattttttgtgtttttagtagagacagggtttcaccctgttagccaggatggtcttgatctcctgaccttgtgatctgcccgcctcggcctcccaaagtgctgggattacaggtgtgagccattgcgcccggcctttttcttcccttttattgagcacttcttttattcattcaccaaaaatttttgactgccttccatttgcttggcagtgtcctagctattagagatggcagcagtcaacagggcacctgaaaacctctgccctcttggagctatcattctggagggaggaagatgatggtagaataaagaagtaaattatagcatgttaatagataagtgctatggagaaaatcagatccagcacatggttagggagtgctggaggtgatggtgggagggttggtcaggaaggttttacatggtggaagtaaggttttgcatggtggcttgtaagcatagtcgtaaaggaagtgaaagcttgagtcagaggacacccgagggaggagcattccaggtggagggaggagtaagagcaaaggcctgggggaggaacagcaaggtgcccagggatgggggaggagcaagctagggagaggagtgggagatgatgggcccagagactttgatgggaggacagtgagagggaggctgagtagaagcagacatgatctgacctacatgtttttttgagactgagtctcactctgtcacccaggctgaagtgcagtggtgctatctcggctcaccgcaacctctgcctcctgggttcaagtgattctcctgcctcagcctcttgagtagctgggattacaggcgcctgccaccacgccccactaatttttgtatttttagtagagatggggtttcacaatgttggccaggctggtcttgaactcctgacctcaagtgatctgcctgcctcagcctcccaaagtgctgggattacacgcgtgagccactgcgcctggctgacctacatttttaaagcatgactgtataatctgttttcagaaacttgaatgttatcattttggaacatactccctaacaccctgctaacagattcatacaactttgtatttttgtagagctctttgtatcatggttctgataggcctcttcagtaatcagttttgattctgatcactctcagtatttatcaggttgctgccactggtccccctcccccccgccctgcagtgccttcacagtgtgagctgtggtggcagtggggaagggcctgccagggtcctgacccccaccaagaacctcattgtcagccacaccctgttcttttctctttcctggttttaaagcttgaaaggataaagctagctcttgctcagaaagaagttagaaacccctgctcctaggagatgatagtttgtaataagatgttgatactaacataagttcccagaattgtttttaaaaaaaatcctgccacatactaatcagttggcatttgcataggtgttagcatgtcagaaatatacaggaaaagctgtggtttgtttcactccagaccactgtagtcgctgctccgtggtctcccccatccactggtgccccagcatccattctccatgtcgcatgccaagcaggctactccacatgcatctcatggcacttgtccctggcttcagtggcttcccgctgttcttggtatagaacagagccctcaacaagcactctcaaggcccttcatggtttgactgcagctttgtgtcccacccctctggccatactgacctccctgccacaggtcttacccacaggctcctgtctggaagtcctttttgcttctagctgcacaagtataattaactccacttcatcagtcggatcttaccccaggtaccgctttttttttttttttttttgggagactgagtctcactctgtcacccaggctggagtgcagtggtgtgatctcggctcactgcaacctccgcctcccaggttcaagcgattctcctgcctcagcctcccaagtatctgggattacaggcatgcgccaccacgcccagctaatttttgtatttttggtagagacggggtttcaccatgttggccaggctggtcttgaactcctgacctcaagtgatccgcctgcctcagcctcccaaagtgctgggattacaggcttgagccactatgcccagccccaggtaccacttaagttgcaagctttcccaaggctaagtcaggtgtccttgtgagttttcattgcactgtctgcccctcttcacagcgcttcctgcaatggcaagtttgttgttattttgtatcatcatttggttaatgtgagtttctgcaacctacagctctgtgaagttaaaggatgctgtttttgcccattgttatgtcctcagtgtaacacggtggctggcttctaagaggagctcaataaataggagacagaaggaaaagccccatttgtatttagagggggacctgcgtcagtttgggtaagaacaaggaactgtctacttcactttcccacaaggtcagagctggctrttctggtaccacaggtctcttccttctctttttcattctcctcctaacaaacctttctcccatcccacttccctgtaaacgcataggatggtatgtggccctgtggagtgtgtaccacacagagggacctaggagctgttgctggcacaggaagacattgctgttctgggaggttgtgcctgagtagatacacaattttccatgagtaaagtcatctggtatttgcaggaactgtttactttgtgttctaagctcatcttaatgactgaaatgactgctttccaaggagggaggattgattgcttgtgtccaatgggaatgtcacagtggggactccatggaatccacctggaattaagtggtcaggagaggacaccctccacacctctcactgactgcagtgctcttcgtctctgtacagccttctctgctcggtgatggatgggatatttgccaatacatttggttctgacttttttttttttttttttttttgkgaaagaccatctataagaaaactcaccgatgaactaacagtgtaaaatattcaacctcactagttggggaagacatggaaattttttaaaaccatggggccccagtccagctttatagcatgagccactgaggaaggagctcaggatctggtttaaacaactgcacagatgactgtcctgaaaaggttgagaaacagtggcctgtttgtaagctaccatctagagcagtgcgtctccatttaatgtgtgtctaatcgctggaggctcttgtctaatattcagaatctgactcagtaggttgggggaggctagagcgtctgcagtcctcatcagcttccaggtcatgctgctgaaactgtgagtagcaggatcttctggaacaacagtgttcatcccaactgcttacctggagagcttttaagcttctgatttaatagttcttggatggagcctggacattggtaatcttttaatcttcccacttgatttgaatgagcagcctgagtttaagagcagttgatctgyggagaggtttttacttcaatgactacacctgaaaaagggatgccttaccagtcacccattcagtcagacttataagaaaatatttcaagtacttcagaacttcagaaggcaaacattcttcacagttttgatggtttgaagtgtcttagtgaccattagtttccaaacctggttttctatcacaatcttattggaactttttcttcattaattacttttaagattttttggttttgcatttttttttttgagacagggtctcactgtgtcacccaggctggagtgcagtggcacgatctctgctcactgcaacctctaccccctgggctcaagcgattcttccacctcagtctcctgagtagctgggaccataggtgcccgccactatgctcggctcaattttttatattttatatgactacaaaaaacttatatctacattttatttatatttgtatttttatatttttagtagcgagggggattttgccrtgttgcccaggctggtcttgaactcctgaactcaggtgatattacaatgtgagctaccatgcccagtccaagttttttgttgttgtttgtttgtttgtttgtttgtttgtttttttgagacagagttttgctctgttgcccaggctagagtagagtggcgcaatcttggctcactgcaagctccacctcacaggttcagcgattcctctgcttcagcctctcgagtagctgggattacaggcacccgccaccatgcccagctaacttttgtatttttagtagattcaaggtttcaccatcttggccagactggtctcaaactcctcgcctcatgatacacccacctcagcctcccaaagttctgggattataggtgtgagccaccatgcccggctgatgattttttaaatgcaaaatttcaagtagtataaaaggaaagaagatatgatgaattcccatttaccctaaaatacccagactcaacagttatcaactgatggccaattttgttttctctatacccccacctgcttcaccctctcttggattatcttgttttaattttaattttttaaagacagggtcacccaggcttaagtgcagtagcacagtgatggctcattgcagccttgaattcctggaggctcaagtgatcctcccaagtagctgggactacaggtgtgtgccacttcgtccagctaattttttttaatttttttgtggagatggggtctcactatgttgccaaggctagtctcaagctcctggcctcaagcagccctcccaccttggccccccaaagtgttgggattataggcgtgtgccaccatgcctcagcctcccaaagtgctggattacaggtgtgagccactgcgtccagccgtgtcttacaaatttttaaaccctttctctgtcatctttttaatctttttttaaaagtaatcaagattaaatgagattggtaggtttgttaaattgcttcatctatagattttcaagccatcatatttttcttgcaatatgttgaagaaacttgactgacagttttccacagcctgggttttgatgatcacatccccrtggtgatatttatttgttgccccatctcctatgaactgatctacatcacacatgcagcatgcatacaaatgccattgattattttccattgtaacttaacaccataagcaccttatttcttgtgaggctttatttcaagctctttgagggaaagatgcttacagattcttatagcttcacagtgatagaaacttaggcagttttcttgttaacagaaacctacatctgctgcctgagagatgatgtccccaagtaattttgatctttcattctaccatgtcctactacttaacaagtttgttctttttagagactaaattttctcctatagaagttgaagtcccaatgcttgggttcaggtcccagctgcactgtgtgctaactagttgtgtaaccagggaagagtcttagcagaatagtgtctcagtttctttatctgtaagatggaaataatattacatatctcatagaattgttgggaagattaaatcgataagtaatgttcagtacttattggtaagtatattagataagaggtgttaagtaattagaacagtggttggtacacagtagcacttaaatgttcttgtcagagcacttgataaaatgtctgggcagcaaacctcataattactgtttttcctattagtttaactgaaaacaacacaggtgcttatatggctactatatgagaacaatactcccaatttcagaattcgatgcttttaggtatcatattttcctatcccctcatttttgaaagaggaaacagacccagagaggtagaataacttacctggggttgtacagaattgcaggcagagccacagtttgaacttagattccccactgatttgtccagagtacttcacgccacaccgaaagcagcagttcctctgagctggttctgaacagggaaatatggtcccatctgcttaacactctgcttgtattcatcgtatccattgaagttgagctttcatattttgtgaattaagtgttgtactaaaacttgatgacatttctttcttctagattgccagcatactttgttgtccccacccctcttcctgaagagaatgtgcagcgctttcagggtcatggcataccagtaagtgcatctgggaaccctgaaaggtgtgggttgtgcattggtctatcctggcaaaatgatcctactgaaagcccttggcttttgttctagagtttgttttcagtccaagaacaatccagaaatatcttagggactccctagaagagtctsttaaaggtcattgggacagagttctaaagttttcacaaatgcacttgagtttttagaagagacatgaacagagctttaagaggatcatagatctgtctggtgttgaaagcaagcccggtttaacactaagtcattttgaacctgagccaaagcacgccaagggtagtaggatttaagcttctttttggcccacactgttaatctttgtatgggcatggtggtgttttctcccagagacaacatggagtgctgcttagttttcacagaatagagtgggattggagccatatttaatgtgtcactgatcaaagaaagcaagactctggcagttactccggtttctaattggtggttgggaattgccaggcctgcagggtatttagtaaggaatgagaattataaataagtgctgtgctgtgtgcacagctggttcaccaaaagggtcactcccatatgggtggaggtatggttaagcagggtcacgtgcccagaagcccatggagtccaagcaggtaatgagtatgaccttgtggtgaaccagaggccctccgcctggtctagggggacatctcttcagtgctaggcagtatatgccacatgggaatatgagccaagtgttgccagatgtcctgatttttcaggagaagccatagatacagatttttgttttgttttgtttttatttttgttttttttagacggagttttgctcttgttgcccaggctggagtgcaatggcccaatctctgctcactgcagcctctgcctcccaagttcaagcaattctcctgcctcagcctcccgagtaactgggattagaggcacccaccaccaggcccagctaattttttgtgtttttagtagagacggggtttcgccatgttgaccaggctggtctcaaactccaggcctcaggtgatccacccgcctcggcctcccaaagtgttgagagccaccatgcctggcctagatacagatctttatgtgagttttcctaatttctaaatatatgccactgattcagatgtttaaaagcatgttttggggacagagttggtcacaatgaataaaattcataatttttagctctttattaaggacattctgaagggaaactttttattttctgctggtgtggcagtgaagaatacagtgagcatcagtacagttgggtggccctgccttgattggtactgtcaccagcaattttaccaccactgcttttgtaccaaaagtcaccwcggtacatatgacaaattatatcttagcgttattatgaaaatagctgtggcctctcagaccacctgaaaggatcttgagacctcccagcgtagtgtatactacacttcgaaaacggatgctttagaggaatgaaaatgagagtctctatctttcagtctttcatagaggggtctrgaaaagaggatatgctctgtgggaagaaacagaggtgaactgttcacatatgtaggaataggctgcttctccatccctgcagtatatgaaatgtagatactctgcattctagccaggccttgggcctgagaagtagcaaatattctgataagattcgagtgaggagcctgaggcattactttgatagaaactgtgggaaatgcagggcgtagtggctcacgcctataatcccagcacgttgggagaccgaggcaggcagatcgcttgaacccgggagtttgagatcagcctgggcgacaaagcgagactccatctctacaaaaaattttttaaaattagcctggtaaggtggcacatgcccatagtcccagctactctggcgtctgaggtgggaggatcccttgagccaggagttcgaagctgcagtgaactgtgatcgtgccactgcactgtagcctgggcaacagagtaagactctgtctcagaaagaaaagaaaagaaaactgtgagaacgtgttctcacttcattagttcttcccatatttatacgtcccaaaagttacagtggagtttgtgtgaatgaacagcaaaaaagtattacacaagatggaatttatacatctacccgggaaacatagagccctcaatctctctctctctttctccctctcttttcttttaacataaaattttcatttgactggaacatttagatcaccagaaatggccttaagcaaattaaaaggtaatttattttatatttggaatcggtgaaattatgtaccttaacctagaatacccaatccttttaaatgtacacagtaccactatagcctcttgtttttcattttctttaagacaggctttcttaacctaggcactattgacattttaggccagataattctttgttgtggggggctgttattgtagaatatatagcatcagcactgccagtagcattttctgaggtgccagtagcacccctatcccgtgagttgtgacaaccaacaaatatgtccaggtattgccaaatgtcccctcgtgggtggggtgggggcacaaaatgcaggttgaaaacccctgctttaggtgatctggactgttttctgtttagcatgtgtcttctctgactcttaagagacttacagaaaatgtgacaactagttgatgtgagtgtccgtaagcccctctctggctttgtctttaccttgttcttctttctctcattcctattgaacctactcatatttacacttattctctgtgcttatttttgttgttaagagataagaacatcaaactgttttctcttaaaccagatatttaagagatttgcaaaaacataaaacaaagccgtttatcttcctatgtgtttttgggtggaaaatattatttacagtaacaggtaattggtaattattgttttaaaatgaattagtatttaaaagtttctcagttttaatttctaatgtggtaaatatcaatagctatagcttatgtagacacaagctcttcagggtcctcagtaatttttaagaacatgaaggggtctaagatcaaaaagtttgagaaccactgatctgcaagattgcatgtacatacattttctctaggacctggcatataagcactcaaatcaatagtaacaggtaatttgcagtaggtgcataggaagctaagattgaagagatagtttggggctagattatgaacagtcaatctttcatttcattcacagaatctttaaaaattgtggtaaaatacacataacataaaacttcccatagtgacatttagtatattctcagtgttgtgcaaacattaccacagtytgttccagaacatttccacatctccatgctgtctaccctggcttttcacccagtctgttcttccctgccttcacttcttttcaaggaagacctgtataattggtcagtttattcatgtccttgccgctattctaaaggctttggccgctgttcttcaaccctgagtatcttttttttcctctgggacaaatgaatattgttatggattattcaaaccaaacagcaaactgtgcttaacggaccgtgaaaaccactggtgatgctttgtcccgcccagcagtatgctatttaactctttttggttcctatatcattgttctctgcgtgaacaggttttcatccctttaagttttttgtatcattcttgactcccagtgacgaccttttccctagtccagtgggatccaggacagcgacaagaactccctcagcttccttctactcagcctcctgttgtttctctctgggctcccgtttccttcatacagaatctgggtctctgggctcttgattgccttgtttggagtcccgttccatgggccttccctcttctatggttgcctttcccaagtctattctgctatgtctgtttttgaagacatccttctgtctcccttaacctgaggcacttccttcgtagtcaagcggctgtcttgttcttcctgtactgccaagtatatttaaagagtctatacttgttttctctaccatttcttcttgtaacatgacttctactccccacacactgtggacatttccctcccagaagtccttacgtcgtgtgcagccccagttccctacatgactgcagtgtttgactctgatgacattgtcttttaagttcctgtcctggccttggaaacattgtactcccttggcctgctgacctccttcatggtcctttcctgcttatgctgccttctgcctcagactgtagatgttctattaaagctctgtttttgactctattaagagagggaccttaatcccagcactttgggaggccgaggcgggcggatcacgaggtaaaacggtgaaaccccgtctctactaaaaatacaaaaaattagccgggcgtagtggcgggcgcctgtagtcccagctactcgggaggctgaggcaggagaatggcgtgaacccgggaggcggagcttgcagtgagccgagatcccgccactgcactccagcctgggcgacagagcgagactccgtctcaaaaaaaaaaaaaaaaaaagagagggaccttaaaatgtaccgaataatgagtaatcctttttttaaaaaaacaaataagattaacaaactgtgattcttgcctatgaagtcactcatactaagaattctggccctcacagttcccagagagaaattgcagcaacagaagactttttgctaaatttctgtgagaagcctctttgaccaggaactttgtttttttctatttactgtttcacgcagagaatagtaagggagttggcccttcacgcctcagatgagatgagacagttatgattargagttattacatgtgccccagatggaaaatgagttatagttggatatcaccaagggactatgctttctgcccttctgctccagaagaggagataaaaagggttaagaacacttagtttcttagaactcaccatccagtcatggctaagagtatctccccctttatccaagtgagctgcgccaactaaggggggcacaattgcctgggcaccaaaatttcaccaccttaggcagagagctgaaaactgtatggtggtttctgcacatcgcttagcatggcattgagaaagggaatgcaagaacagcaaagggccctttgattatcttacgttctaacacttccacctcatcatgaatcttaaagtgtggcttggccccaagaaaggagttgttgctgtttacagcagttcctaaagcagttctgtgtcactctgtccttgctctctggctgggctcatcagctcccccactgcagcagaccatcagctcccatttctagagtgccaggcctgttttcctctcattttaggggcctcctgaatatctccacatggaggtcctgttgatgctagacacccaatatgtgctgattccatcaccttccccagaaatcccgaaccagttcccctttgtgattttctaagtgtagtgcacaatatcacctggattgtcatgccgatctctaactctcggtctacgccactgctagcatatccaacacatggtttatacctggcagatgaatggcaaaaaggtgctccctctgggaagccgaattataaaaggtctttcctccaggtttatctttgagcccaggccaatggcttggtcagcaaagcaagggctggaccttagccactctcaagcacttagccaggcctttatgcaggactcaaagtccacaactgtactcacccgtccaaccagtctgtctttcttctccattctagcttccactggcagattactttgccccaagatcagttgtaatctccttttgttcctgaaaaacaaacaaaaccccccactgtaacctgaaaaaagcctgaacaccttaacctattgccaaagcagaagaaagcctaaacagcctcacctgccactgttggtcactcgtgtgacttctttctccttgccttgtttttgttgtgccttgaaatttctttcttcagttatataatacattctaccttattttatattcctaagcttatttcccttttgaaacgaagctctgaaggtagacacagtatcttagtatctttgtgccctctcacaacctaatgtggtgccttgcatgtcacaagtcttgaattcagttatgtcaaatagccaacattccattcttcctagtgtggattttctctaatgagagttgccccctttttgccatccatatacaacacagcctttagagtcacactgcagctacttttgtacaacttgggaaagtccttccatctctccaagcctcagtttcttgctgttaagggggataaataatcatacccatcacagagagttaccataacaattaaatgagttaattcatgtaaaatacctgacatgtaataagctgcacttgaatgatagctactatcctaataataataatgttgttgttgtcatcatctgggttaccagctgatgataagtcaaaaggtatatgttagaccataagtctgtgtctgactacctagacctgttttattttttaaaactaaatcattctttttcattgtgactaaatactcccaggcttaataaagttaagtatgtccagccatttcatactgaagttacagatttccctgtatgcatttaaatgctaagcttatgtgtcccctgttgggttgtgtttattgtatctggtaaagctttatttgtttctacagatatggtgttggtcctgccacaatggaagtgcccttttgaaaatgtcagcactgcccaaagaacaggatgacggcattttacaaatccaaaagagcttcttagatgggtcagtactagttctacattttgttcttgttcagttcttgttttccaagaagcagggaacagctcttagtagtatgtctatttctgtttacctactggtagcttaatgctaggggaatacaacttaacagtgatcattttgagttaatttgaaaggagtcagtataacataataattaagagtgtcacctgcgtcgtttttagaggtgcacgctaaagtcttcagtggggaggtgacatgatgtctgtaatgttaacagttgtcaaatttaggtcatggtacatgtcacaatactattctactttctacatgtttcaaattaaacaaaacaaagcaaaaaaaacccaaagtagatgaatttaaaacaaaaaagaaggaatagactcagagttacattgccttggtccaaatcatggttctatcagtttataaattggatgatcttgggccaggcagttttactttatgcacctccatttccacacccattgactgggaacaggagtcctgcagcaattgcctggtaggtgaagattaaatgggagaatgcctactgagcccttaacacagattgtggcacgtagtaaatccttaagcaaaatttgagtttgctcttctaatctcatattcctttttgatacctagaatttacaagaccatccacaggccaccctatgaaattgttaaaacggaagacctgtcaagcaacttcctgtccctgcaggaaatccagactgcatactctaaatttaaacagctatttctgataggtgagaagaatactgagcaaaaacttttgtrttatatggggaaagacatgccatgcagatcaggtgaaagttggtgccttttccctgggttccttacgttagtacgcagagcccagggctgtgatgtcatggagccaggggtctggctgccattaccacacttccctctccatctctctccaggctttccctccccgcctccttattgtggcagtgatcacacggccaccctcctcttctccccttcctcagcataccatttgccyagtggtgagcattttggtttcttcctttaaaagtttttgaactatgtagtatttatatttgttgacttgcagtaatttataaagtgaataatgttcgttttcctctgtagactttttcccaaagtggaaatactttaattttttcccctgattgggaatatacagtttctaacaatattaaaagttctaccagaaatgtacaaagtagaaaatgaaatatgcctgtcccagctacccccattttcctgcccaggctgcctactggtgcctcatatttaacactgctcagtcactcattgattctcttcattctggaatgagtctttacgctctgagatttgtcatgcctatagataacttttcctaacttggacattgttttttgagacagggtgtcacctctgtcatccagactggagtgcagtggcatgatcacagctcactgcaaccttaaaactcccaggctcaagtgatcctcccacctctgcctcccaagtagctgggattacaggcacacacctcctcacctggctaatttttgcattttttgtagagacagagtcccatcatgttgcccagactgatcttgaactccggggctcaagcaatcctcccactttggccttgcaaagtgctgggattataggcatgagccgctgcctggactaacttggactttttagcctagcaaattcttaactgttttgggattcgttcagtgacatttattgagtttccattgaacaaggggtcttcaaaaagttcatggaaaatgtatattatgaaaaaactacrcatgaattccaaaacttttttaccccaaaataactcatactaacttactataacatgcctgagcaggatctggtttgaggagctaagaagggtaagaaattagtttgaaaacaggccctattagagcaacatgaattctgctgaaattgaagcaaaaacaaatattgaatttatggtgaagcttgggtggaagaatggtgaaattattgatgctttagaaaacgtttacggggacagtgccccaaagaaatcagcagtttacaaatggacaactcatttttaagaaggagcagatgatgttgaagataaagcctgcagtggcaaactgtccacgttaatttgcgaggaaaaaattaatcttgtttctgccctaattgaagaggaccgacagcagaagaaacaatagtcaactccatagacatctcagttggttcagcctacacaattctgactgaaaggataaagttgagcaaacctacttgctgggcgcagtggctcatgcctgtaatccagcactttgggaggctgagacgggcggataacttgagttcaggaatttgagaccagcccggctaacatggcgaaacccatctctgctaaaaatacaaaaattagctggacgtagtggtgggtgcctgtaatcccagctacttggaggggctgaggcaggaaaatgaacccgagaggtggaggttgctgtgagccaagatcacgctactgctctccagcttgggtgacagagcaagactccatctcaaaaaaaaaaaaaactgtctactcaataggcaccgaaaccattgtgcccagatcagcttcagatgagagcagagctttcaacagaaattttaaataagtgggatcaaaatcctgaagcatttctttgaagaattgtaacaggagaagaaacatggctttgccagtacaatcctgaagacaaaatacaatcaaagcaatggctaccgagaggtggaagtggtccagccagggcaaaagcagatatgtcaagagcaaaggtcatggcaacagttttttgtgatgctccagccattttgcttgttgacttttctgaccaaagcacaaaaacatctgcttatgagaggtttttttttttctgagacaaattctcactctgttgcccaggctggagtgcagtggtgtgatcttggctcactgcaacctccacctcctgggttcaagtgattcttgtgcctcagcctcttgagtagctggaattacaggtgtgcaccaccacacccggctaatatttgtatttttagtagaggcaaggtttcactatgttggccagactggtcttgaactccttacctcaagtgatctaccctcctcggcctcccaaagtgctgggattataggcatgagccaccatgcccagccataagagtgttttaagaaagttggccaacgcttttgtagaaaaatgcccaggaagacttcatcagagggtccttctctactgctcattcctcctatcaaacaagggcaattttgcaagagttttgatgggaactcattaggcatctaccttaaaagtctgatttggcttcttctgacttcattttctaatcttaaaaaatccttaaagggggctgggcgtagtagctcacgtgtataattgcagcactttgggaggccgaggtgggcggatcaccagaggtcaggaattcaagaccagcctagccaacatggtgaaaccccatctctactaaaaatacaaaaattagccaggcatggtggtgggcacctgtaatgccagctactccggaggctgagacagaagaatcgcttgaacccgggaggcagaggttgcagtgagctgagattgtgccattgcacattgcgctccagcctgggtgacaagagcaaaactccatctcaaaaaaaacacaaaaatccttgaagggaacacatttttttttttcagttaataatgtaaaatagactgcaatgacatggttaaattcccaggaccctcagttctttagagggggttgagagtgtcttaaacttgatggagcttatgttgagaaataaagtttatattttttattttcatcttttaattccatgttttcacatactttttgaagtccccttgtatatattaactatgctagtcgttggtgataaagagaaatataacaccaagagcttatattcttgcaggggaaacagcaatgtatgactcttaactcaaactaaaacattacaatacatgtttactatttaatcaaggacactcattctagttttatttcagtcactcaggactttcagggatatctgtcttttattgatttgagtttgcaactttttttttctttttttcttgagatggagttctgttcttgttgcccaggctggagtgcaatggtgcgatcttagctcactgtaacctccgccaccctggttcaagcaattctcctgcctcagcctcccaagtggctgggattacaggcatgggccaccacccccagctaatttttttgtattttagtagagacggggtttctctgtgttggtcaggctggtctcaaacttctgacctcaggtgacgcgcccacctccgcctcccaaagtgcagggattacaggcgtgagccaccacatctggcctttttttttttttttcttttcattttttagaaacagggtctcactctgttgccaaggctagggtgcagtggcgccaccatagctcactgcagcctcaaactcctggcctcaagtgatcttcctgcttctgggattatagtgctgggattataggcatgagccacagcacccagcctgagtttgcagcttttaaatatattggatttctgtaagatttaaggttctctgttttataaggcatgtaggaggagtcatgtcatggtatgctgggtggacgaacttgtgcattgagattctaatgaaagttaagcctgacccttaggcttccgtggcatcaggatggatccagttgcattttccacttctagaattaacagcctggatgtcaactatttctgcctaaagcatgttactctctgtcgacctacaggatgaaccatggctttgtgtatgcattgtaggaatttcttatttcagcaataaagatctctttttgaccaccacaatcttctaggggcctacagctcagaaaccatttcagctgaagttttgaaatgacccttactcaaaatagagtcctgtgcctggattctgcagtttgagtcaggactgttaatctgaatgacacagttgaggagcacaggatttttgtggcaagtatgtcagtgaacaatgacctgacgtctttactcctttttcttttttcagataacagtactgaattttgggacacagatataaaatggttttctctgttggaaagtagcagctggcttgacataatcaggtatttcaaaccattgttttactcatgaattttgtaattgtataactcagggtagtagatcaaaccgacaaataatttaactgtttgatatttgacagttaaatattcttagatcacatgttctacagctagattttatatttgctacttatttctgtgcacatttgataggaatttatgaacatgccacctgcttacaaggagatgtactctacagacaaggcattgaaaaaacacagaaagagtgtgacaacccagaattattattgaggcagcagtgctggcctccagggaggaaaytgagggtgagaacaggagtgatactgacttttcactgaataccttttttaatcttgtgtcttacgcatatattatctgtgtttttaaaaaccatgattaatgtcagttatttttggtttgggagttaggttgagagttccagaaaacagttatattgcctttcctactttctatattgaatagctcttctctgttgccattaaatagaggatatggcagagaaaggtgcaaaacagaaatgatgatcaggatgacagagtagctctaatgctaggctacatttcaggagggagagcaatgcttcctactgcctcacacacattctccctccattctgaagtgagtactgcggaaaggagccttggccctccagacactgaactgtgctccagacatcctgctacacgtctcataatttgaatatataatggcagacagggataaatgttatggaagcaaagaacccttctttgtgtggggtgggcagagaagggtgagcatctctagccagatgaagagtcggggtgtgggaagggaaggtggctggggggtaggagaggacacgtctgcaagcagaagacaacagatgtgaaggcccccagttatacaagtcaaagctgggaatagcggcaacagtcgcaaagggaataacgtgtagagagagacaaaaaggatttctgagcatattggagctttttagccattctgatacattcagcaggtcaccttaagtaaagcaatctggacatgtctcacattctccaggtatggatttttatgaatcttgctcaccagcagactcaggcgtgagtttttaataagaatgtctagtttagaaattacctaggagcattttcacatcaactttaggattccctcctgaaaattttcagtttctaatgggcaggaatatatcccagtatctaaataatgtaaatggaagttagtttcttttctagaggattttagcgtggaaaaaaaaaaaataagagagaagactgaagatcaagtcagactctctctcaactacgtagtgtttgtgttaccaagctcatgaactaatgcccctttttcttgtctctttcctattcagacgttgcctgaaaaaagcaatagagattacagaatgtatggaagcacaaaacatgaatgttcttcttttaggtaatatataggaagcacaaaggatgatttccattttccttcacttgagattcaatttttgtatatgtagctttatgtatttggaaacaaaaggagtgagttagtgtagaaatccttcctattcctttctccctaaccttggaatcctttgccttggatttcagtgttagagtttaaaacaaaattctttcactttgcacttggcagacctattcacagtccacaaaggaattgttggtatctttaccaaagctcacatttcttaatgttttggattttgttttatattaactgagcttggttaaatttaaaatctttttagaatccctcttatataaagagatccatggatgacttggttgttatttttatatctttgtggttgacaactttattcagttaccatagaaacttggtggcctgtgagttccttttcctcagtgggcttaactcgctgtacatgatgcaaacattcagaatgtgcgaaagcaagtgtgaaccaccatgcaaggaagattggtgctgtaactagttacatatgagctaaaatattacctgctgtttagaaatactatgtttcgtttagccccacactataaattaagtagattgtctcatgctttatacccccaagcttttatcattctctgaaactctgtaactgttggccctgggttctaagggcagcctggaaaatgtatctttctgtggcttctgtccatctgatattggctgaccgacttagatttgaatacatttattgagcctctgccatgtgcagggctctgttccgccttcaagaagtttgcaacctaatgagagagttgccttaagtgtgctattgaaaaagacctaaccagccgtgacagaacagagcattatttgagtactgagcaactagtgaaaagggggagggataaagattggaggtctaagaaacggaaggactcagggccagaacacattaatcacagagttgcatagagtgaaatttgaatctttgactgatagaactgagaaatccttcactcctggatggactactgaattgtctcaccttggaaatctcttttagtccttcattccattacccacaggagtatcattaacacccttcagatccaagaagaaagagttccttaaaaatgaaacttgtggctggacacggtggctcacacctgtaatcccagaattttgggaggccaaggcaggcagatcacttggggccaggagttggagaccagcctggccaacatgacgaaaccctgtctctactaataatgcaaaaattagtcgggcttggtcctgtgtgcctgtagtcctggctactcgggaggctgaggcacaagaattgctttaatctgggaggcagaggttgcagtgagccaagattgtgccgctgcactccagcctgggtgacagagtgagactctgtctccaaaaagaaacttgttttgaaaattgatagcactagaagacaaaaatgaaaatctgtttctctgtaacccatgtcatcccatagttgaggcttgtttcctggagggagaagtgtaagcttggacccatagtgctctgtgattataggggtcaggatgaaagagttatcacaatatgagcacctccctagttacaattcattcctttttttttttttttttgagacggagtctccctctgttgtccaggctggagtgcaatggtgcgatctcagctcacggcaacctctgtctccctggttcaagcgattcttctgcctcagcctcctgagtagctgggattacaggcgtgcaccaccatgcccagctaatttttgtatttttagtagagacggggtttcaccatgttggtcagactggtctcgaactcctgacatcgtgatccacccgcctcggcctcccaaagtgctgggattacaggcatgagccaccgcgcccggcctacaattcattcttaagtttctctaacaccaatgatactagcaccatcctcctcatggacattttttaaaaacaactcgagttgcacctatttttgtgaaagggaaactatggggatgtagaccctgacttttaggatcttaaaactcttaagacaaatgcacggataaagatatgtggttcttttgctctaagtcatgaatgttaaacaagtatgtgagtggacttttcatcaaatgagttttggaaagtgcatggcaggtgggcatgtagaagtagaccaaggagagtttgtctcctaggataggcaggagaagcaggcacctctgtgcccctcaaacagaaaaggacagagccttagagctgaaaatagaaataattttgctacagtcaagaaatattaaactttctccaaagtagagttagtggaggacttaggagtggaggaagggatgtctgaggtgagtttgagaagcagctgagccatgaaatagtgagttcagtgacggaggcgtccacaccccaggaggagttcagtgacggaggcttccacaccctaggagggaagagctttagtcttggcctgcggagcctggcaggtcatcattatgtgggtgattctcctgtctctgtgtggcacacctagacccccacaagctgaaagtagctttgcagtgctgcatttatttattcagtatgcaaatccacatttagtaccagcgtatgccagaacctgtactagacatgctagagcagttcatgtctcagtctgaaaacataaccctttgttattggcccttgcctttagggaataagaacatgactgttaatagtagaccttggtgttgggaatcctacttttaactgtgcaagtgagagcattctgaaactttttaacattttatgccctccttcctctttgcactgctgctggggcctctcctagaggagaatgcatccgacctctgctgtctcatttcctctctggtgcaactgatgatggacccccactgcagaaccagaattggtttccagagcctcatccaaaaggagtgggtcatgggtggccactgtttcttggatcgctgcaaccatctccgccagaacgacaaagaggaggtgagttccctcactgcagactgtttccgtcatagggagaactactgaatctcttatttaatacctgtcatcagatgtagtaggattgctgcttgcaaagtgtaagccaaacaggtttgttaagaaaactaggatcgtttcattgtgtgatgactttggatactttaaataatagtgaaacctttcccagaggaaagagatattaacaagtatgttcagagttttctaaattgtgtacaccaagggtgtatacatatttcacagtgggaataatatttattaataagacttaaatataaagtaactcagtgagggagactcctaccttttctacaaaattagtctttgcaataaaaagatattcagggtgcaggttttctacagaaaatataggttgagcatcccttatctgaaagtcatgggaccagaagtgtttcagatttcaaattgttttggattttggaatatttgcattccattactggttgagcatccttaatccaaaaattggaggcctggcatggtggtttgcacctgtaatcccagcactttgggagaacaggagtttgaaaccagcctgggcaacatagacagacctcatctctaccaaaaataaaaataaaataaaataaactgggcatggtgatgcctgactacagtcccagttaccagggaaggtgaggtgagaggattgcttgagcctgggaggtcaaagctgcagtgagccatgattgtgccactgcactccagcctgagtgacagtgagaccctatctcaaaataaataaagttttagattttggaactgaatgatttcagattttcagagtcaatttttttttttttttttttttttttgagacggagtcttgctctgttgcacaggctagagtgcagtggtgcagtctcagctcactgcagcctctgcctcctgggtttaagcttatctcctgcctcagcctccctagtaattggcattacaggtgtgcgctaccatgcctggcgaattttttgtatttttagtagagatggggtttcgccatgttggccaggctggtcttgaactcctgacctcaagtgacccacctgcctcagcctcccaaagtgctgggattacaggcatgagccgccacacctggccattcagagtcaattttccttgcacataaacctttttgaaataaagcacaggggccaggcacggtggctcccacctgtaatcccaggactttgggaggccaaggcaggtgggtcacaaggtcaggaggtcgacaccatcctggctaacacggtgaaaccccgtctctactaaaaatacaaaaaattagccgggtgtggtggcacatgcctgtagtcccagctacttgggaggctgaggcaggagaatcacttaaacccgggaggcagaggttgcagtgagccaagattgtgccactgcattccagcctgggtgacagaatgagactccatctccaaaaaaaaaagaagaaagcacagggttatgttaatgccatctgttaccagggccttagtggtagcgtgggtgggaatgtccccatagcctcttctgcttctgtctggactaatcgctccaggcctggacctccaagttcaggcacaggagagttagcattttaggtcacctggtgaaaatgagtcccccagattgtggtgtacatgtctagatgacagctgtacacactcccttggctgccttattgatgattgttggaaggaaaaatgaaaacacacaaactttctttaatcaactcacctgcagcgctgacgtatgctagcagtgttacttgtggtttttcatactccaggtagtcagcatgtctgtctgtggtacagaacagcttgacacagaatgctgtgggcacacagagccatggctcctgatcgtaagggcttggcaggttccttgggtgatccaggtctctctcactgagcaagatggtttctttcaggcctggcctgtacttatctgtgtcccattgagctgaatagaaatcacatctttcagtcctggaagggacttgaagaaactaatttgaaaggttgatggcatttacataacatgggaggcagagagagctgatactttgtggagacgagtatggttgttttttttcttttcttttcttttctttttttttttttggagaaggagtttcgctcgtgttgcccaggctggagtgcaatggcacaatcttggctcattgccacctcctcttcctgggttcaagtgattctcctgcctcagcctcttaagtagctgggattacaggcattcccctccattcccggctaattttgtatttttagtagagacagggtttcaccatgttggtcaggtatcgaactcttgacctcaggtgattcacccatgtcagcctcccaaaatgctgggattacaagcgtgagccacagcgcctggccttgttttgtttttgagacatggtctctctctgttgcccaggctggaatacagttgcacagtcatggcttactgcagtttcaaccccctgggctcaagcaatcctcctgcctcagccttctgagtagctgggactataggtgtacactaccatgcctagctaatttttgtattttttgcagagatgggttttgccatgttgcccaggttggtctcaaactcccgggctcaggcgatccatctgcctcagcctctcaaagtgctggaaatacacacatgagccactgcgcctacccatatgtttttgtatatcttgagaaaagggggactggcaggcaccatgtctaatggggaaagagtctgaggtctaagaagagacctgatctgctgctgttcacccagcccttggagaagtcacttgtattttctgagcctattgccctgcctatacattgcagttcaaatattttccactctatttaatgatattatgcataaaatgaagtgtgaaataaagttgctgtacaaatgtttcttagcatctcaacatggacatattggagttttgaaggaaaattgaaaagaaacatgagccctgtgtgagaccctggggaccggcctccaggcatctccaatcttccctttcctcctttgtaagggagagactaacatagcttctcttagccccctggcaggatcactggttaatcagggaggataagcgctttctaaatgataaagcacactagaaactactctccctgctcatcaagggctcgcctctgggagctaataaatgaggcttgtggatttgtaaagatrcattttgaaaacattttgaaactcactttcactgcttctcccttgtctcccatccccrttgtcttctgggccctcactgcggggtggacaggaggcttctccttccacgttggtctccaagatcaaaccctgtcagttagtgtgtgggcaggtggggaatagaagttccctcccaccccccgtaannnnnnnnnnnnnnnnnnnnnnnnnnnnnnnnnnnnnnnnnnnnnnnnnnnnnnnnnnnnnnnnnnnnnnnnnnnnnnnnnnnnnnnnnnnnnnnnnnnnnnnnnnnnnnnnnnnnnnnnnnnnnnnnnnnnnnnnnnnnnnnnnnnnnnnnnnnnnnnnnnnnnnnnnnnnnnnnnnnnnnnnnnnnnnnnnnnnnnnnnnnnnnnnnnnnnnnnnnnnnnnnnnnnnnnnnnnnnnnnnnnnnnnnnnnnnnnnnnnnnnnnnnnnnnnnnnnnnnnnnnnnnnnnnnnnnnnnnnnnnnnnnnnnnnnnnnnnnnnnnnnnnnnnnnnnnnnnnnnnnnnnnnnnnnnnnnnnnnnnnnnnnnnnnnnnnnnnnnnnnnnnnnnnnnnnnnnnnnnnnnnnnnnnnnnnnnnnnnnnnnnnnnnnnnnnnnnnnnnnnnnnnnnnnnnnnnnnnnnnnnnnnnnnnnnnnnnnnnnnnnnnnnnnnnnnnnnnnnnnnnnnnnnnnnnnnnnnnnnnnnnnnnnnnnnnnnnnnnnnnnnnnnnnnnnnnnnnnnnnnnnnnnnnnnnnnnnnnnnnnnnnnnnnnnnnnnnnnnnnnnnnnnnnnnnnnnnnnnnnnnnnnnnnnnnnnnnnnnnnnnnnnnnnnnnnnnnnnnnnnnnnnnnnnnnnnnnnnnnnnnnnnnnnnnnnnnnnnnnnnnnnnnnnnnnnnnccccctgaactcaggatggcttgctctgggctctgcccaccaagtaacggtatcttgttttcatgcaggttcctgtgttcctgcttttcctagattgtgtctggcagctggtgcaccagcatcccccggcatttgaattcacagagacttacctgactgttttgtcagatagcctgtatatacctatttttagcaccttcttcttcaattcacctcatcaaaaagatactaacatggtaagagtccctcttaggaacctgtgtattaaagaggcttcttctcacaagtaggatgcagtaatactgatgctacaaataaaatggtgctcacttggcagcacatacactaaacaaagttggaataatacagagaagattagcatggcccctgcgagaggatgacatgcaaactcatgagacgttccatattttaaaaaagatattgaacactaactacataccaagcattggtctaagagcttcttaggtattaatacttactccttacagcaccctatggcatatgcatttttattatcctggaggaagctgaggcaaaaaaaggataagtaactcactcgtggtcacatggtaaatattggaactggaagcaagtgttgaagctggggaattaagcaaaattcaaagctgtccatttgaaagacagttagaccagatgtcctccgattttgcctgatgcctggaactcctctgtgaagagaatggggaccagcagatcagggaagctagccttttccttccatcttaacccttttggcccttcctggactgtgcccccaattagataatctcagtgcttctgagcagcctcctgagggctacaggctttgcttgagctgggaggattaccaaatcccccagtgaagtaggagcaacagccctgctttcagagctcagccttgtgactcaccagctttgtgaccttgggcagttcagttttctgagccttggtttcctcaaatgtaaaattggaaaaacaacagttgcctcgcgaggctgtggaagcacccagcacagcggctggcgtgtagactgctggaaaggaagtgtccttgttcttgccctcctcccacaccaaaagcttgtagtgaataaccacaggtagcctcagccttaaatgcccatgattattcattctcagggcagagcaggagcatgcttcctggtgcctgtgtccagaagtatgtgtttgccttcctcagccctccctggaaaacagcatgacctgtgcttgttttggcagggtagagaaggccaggatacacaaagcaagcctttgaatctgctcaccgtgtgggattggtcggtgcagtttgaacccaaagcccagacattgctcaaaaaccctctttatgtggaaaagccaaaactggacaaaggccaacggaaaggaatgcgcttcaaagtaagatgtccacatgtctaaacccccttcagctgcccagaccccgtgcatgtaatgataaaaggtacttacggattctgtctgccagcattttctacccctcgaagcagtctgcagagttgagacttgtgatggtcaaattgtcaagggccattagaatcctttgctttcagcaaatcacctttgccctggtacaacagggccatttgccagatgtcactgtggatgctgccaccctggtcatactccatggaatcgtgcctcttgtcctgcctgtgtgtgtgtgtgtgtgtgtgtgtttgtgtgtgtgtgtgtgtgttagtagagtaaaaggaacattgattgtgtgggttttacttggccgataccagttcatttattataataaatagtaagacttttcttaatgagctgtgcctgtaaaccacaggttgcaaaactctgtcaagggctgcaaagtctctgtcacaactacccctctactgttgtagtacaaaagaagccttagtctgctctgcccttggagtagccattctttattcctttacttgaaaaaaaaaaaaggagccttagtaggtgaacaagtaggcatagctgtgttccagtgtttacgagaacaggcgccaggccagatttggccggaggggtggccagtttgctgacctatgctatgagccacaaatgtcagaaagtcattttagttgataatcccaaagttccctaactgatgaattatttaactgacatttcctagctctgtctccaggcccagaatttctcccccacagagtccacaaaggagagagcagtgatggtaagtctaagtcgatgtgtgtcactgccttctccatgccatccttatcctgcctgatctggagggcttcagaaagcctggccctttctggtgtcagagttggttccattctaaagaggactggggacctgggtgagccacggccagcagagacgatgttggctgctgaacgactcagaatggccactttgcccttttaggggccgcaggcccagggtggagtttcccctttctggctgagcctcttctgccagtttaaccagaattgccctgagccccagaacagcttggccagaaattggtttttcttcagtgtgttgtgccccctggtggctgcatgcacattctcatgagagctggattggcaccagagaaactgccctgtgccagagtggcaggggacctcagagacagcgaggacaacgtctgttgtgttacgggaggaacctaaggctcccccttccaataatggatttcatttctctcctcagacctagcttttctaatcatctcttttccttgggagatagggacagacagcctaagctccaggagttggcaggtgggaaaggactgagctgaaggggtggagcaatttcaggttgcactagctaaatcacagctgggacgggggcgacaagaaaccttgaagcctttgggtaagaagaccagatatcaggtggagcaatgtgttgagcggcctggtggcctgggggaagttctgcagagactctgaggaagcaggggctgagcagcatgtggtgctgccgtgcaaatgccacacggtgggggggacccattccagtgtgcagcctcggtgtcagccgcaggcccgggccaggctttggcctgcagagctgctggcatgtcagctggtcttgagtgctccctttgcttaggagatagagagaagggggcttccaggaccaaggagagctcagtagagagcccaggctctggagccagactatttgaaccacctttggcactgagcagcagtgccttcggcagattgcttacctctgtgccttagtttccttgcttgtaaagtggggcaataatagtgactttgagaatgaggtgctcagtgaatgtgagtactgagcacagaaccgagcaggcaggaagcactgggtggtggttcagtgtagtccctgccctgcctgacacatcttcacgatggagaaaaagagaggccactgaatcctggccttcatctttcctgaccctggatgraaagtcaaatcctggtcacctccgagctgtggtcttgtggatggttttgttttctttttaatatttttattgttattccatatttcataataaggaaataattttctttacaataaagaatatctttttacaaggaagaaccattgatggaaatatgttagagagttttagagtgaacctgaaaattaagttgttatctcttcttacttcaaatgaacagtagcaaaagagctggacaaacagcttctccccacatgtttttacttctgctttgggcactggggaaccctcatgaccttccgaccacatccatcttttacaaccctttttttttttttttttttgcgagccagagttttgctgtcattgcccaggctggagtgcaacggcgtgatctcggctcactgcagcctctgcctcctgggttcaagcaattctcctccctcagcctcgggtgcccaccaccacaccctgctaattttttctatttttagtggagatggggttttgccattttggccaggttgaggttggtcttgaactcctggcctcaggtgatctgcccgcctcggtctcccaaagtgctaggattacaggcatgagctactgcgcccagcctcaaaaccctttctcagtgcacccccaaatataatactctgctctggccacagagagaatgaccaaggggggaaatatgaaaatgtgaaaatgctctcccattttctactccatgcaggttgccagacaagtctggtcagcttagctggctcatcacatttctttgctctcacctgcctgttttctgtatctaaaagaatctttatgacttcggcttaaactcccactggatgcctgataagctgctatttcacccatgtgatagtatcttctggtagttagcagtgcctccttgcagttgttcagaagattgtagtggttaacagccttaaagttctcaaagaagaaacatctttttccctttagaacatgaatgggcctgacccacaagttcccctaaatcattaaactatcttaagttaaacagctttttcagaagtgctttgtgtcctgtggtgcccctgtgacagaggaggagggcaccaaaagctcctttctctgtgtcccagcatgcctttctgcacagctgccacgtgcacctgcttccccatttgtttctggtacagtgtgcaccatggcaatacacaggaataccccacctctggatgtcacagcgtgttaatgagtgtgcattcacatggcaacactgatgtctcttggaacttgttaaagcagggttatgctctttttgttatggtaacagctgttaactgtgcctgttatgttaaccagtgatttttatttgtgttttctctcaaagcatcaacgacaactttctttgccacttacacaatctaagtcatctcccaaaagaggatttttcagggaagaaacagatcatttaattaaaaaccttctgggcaagagaattagcaaacttattaattcttctgatgagctccaagacaactttcgagagttctatgacagctggcatagcaagtccactgactaccatggtttgttgttaccgcatatcgaggggcccgaaatcaaagtctgggcccagcgctacctacgttggattccagaagcccaaatcctaggtggtggccaagtggccactctgagcaaactcttggaaatgatggaggaagtccagagtttacaagagaagatcgacgagagacaccacagccagcaggccccccaggctgaggccccctgcctgctgaggaactctgcccgcctctcgtctttgtttcctttcgctctgctccagcgacattcctctaagcccgtcttacccaccagtggctggaaagctttgggagatgaagacgatttggccaaacgagaagatgagttcgtggacctaggggatgtgtgacctgtttgttgagtgattgtgaaagaggaatgtgggagattgggacagctgatccctggatttgtgtcacgctacagctcatgctggctgggtccttagcccggcactccgttagaataaacctgggccttcgggaaaagaggtggctctcattatttttcatgattctaaaagactatgcaattaaaaccgcatctgtagtattaytaattggaaggaattattacttgacccgtaatagggttgtggccgttttctgatgcctaagtattatacagagcccacaatggccagtttactaccagaaagggcttcagtaagatattcttggacttgatactttcttcagatcctctttgtgccaagataatttatccagtcattgggaatagtaagtttctgtgtaacccatctcaattatagaagcaagttcagctttatgtatttgtatggggagttgaagattcagatagaggtattaagatgtgtggcatttacttaaaccatcacatttttttctttctacgcccccttgcctgtaaaacacctgggaagttccactggtgtcatccatcctgatgcttcagaccaccctcccttcttcacagaccgtgtcactttgcctgtgggtgggggctagccagccaccaccctcttttctgtgctgccagccccaggtcttcctccgcctgctccacaccactcgccgctgtccctctgcactccctgccttggtgcgtgtagtcccagtgtctcactgccaaacctcttggttacgctgcggggatctgtttctttgcctgagatccttcctgaggagcgtccattcctctggagtctctccttgtttggaacaaatcgcttcgcctttttctacttgcctgctgaagctttggagcacttgtgattgcagttttctgccgcaacccctgagccgagttcctcacattcttttacctttatggactgatgggattgggtcacttttgaatgtggctttcataggaaagcagcttaaacataaatatcagaagtgatgattatcatatgatacctcagtgattttaaaagccatagaagaaacttgactatgcctggtcaccttcttggatctgctgtctaaatgatatatatatgatatatatgtgatatatatatatcatatatatgatatatatatatatatcacatatatatgatatatatatgatatatatatatcacatatatatgatatatatatcatatatatgatatatattttttttaatgcaggaaagtatactttgtaaggagcagatttttttgttctcagtggaaccctgtcaaatcgcataaaagaggaaaaaaacaaaactcattagaatgttttaaattgaatgttcgccttttacatatatttgctcttcagtatggatcccaatttgaatgttacatgttcggaaaaactttcagttgctcaagggcaataagaaaatttgaggccgggtgtggtggctcacgcctgtaatcccagcactttgggaggctcaggtgggcgaattgcttgagcccaggagttcgagaccagccggggcaacatggcaaaaccctgtctctactaaaaatacaaaaattagctgggtgtggtggtgcatgcctgtagtcccagctactcgggaggctgaggtgggaggatcccgtgagcctgggaggtggagtttgcagtgagctaagatcgtgccactgcactccggcctgggtgatggagcaagacctcgtctcagaaaattggaaactattgactaagagaagtttctaggtttgcactgaattgtcttttgtacatacagtgaattgttttgctgttctccccactccatattaatgcaggagccaggttggtctgttaggatgaacaaaggttgaggggagggcaggattcgtgcatctgggggccaaacacatgttccgtcttgattgccttaagagttactagcgaggtcagtgttaggcttgcaatagggattttaaaatacactaactagttccttagctaccttcacatacattctataggccttcttaaattagcactaacctccacttccttctctgccccattgcctcccaaatatgctatggagctatttttgttaccacgttataacgtgaatatttatacagtagcctcttcaggctttgtaattttcattccaaaaatgcccggtgtgatgctttacactctacaaagtatggtttaaaggcacaaggtcatggcctttgtcatagcagttgaatgtgcattgacatatttttctatgattttttaaaattacaatagaaaaataagctgttgtaacgtgtaaggtcatgacaatttttgtatttatatttgaaatcagatttctataactcgtatttgtgtacagaattctcaatggatttatatattgtgaaatttttatctgagattgggatgtggattatgcttaacagtgagagctgaaatgagaccatttactttgtttaaaatgctgtactgtgcaagtttggaaatgtaaattaatttactgtatataatatcttgagtttgtttatacctccaagtttttacactgaagataaactagctttaattcaaaactttttttttctttataagggaataagctgttgagctaaacctgtatacttgtgctttttattttctggatgcacaatgaaagtttatacttgtatctcactgcatcatatctgattgcagaaattaaagcacaatttacaagcaatactgtacttggtgtggttggtataacacatggagtaatccgtttcattctttcaggaaatattgagcatgtactgggtacttggcagggccagtggggacagcagggaagagtgcagtttgcgttcttgtggggcacagggaggtttggtggtgggaaccgataaccaaacaaatatttataataggtgatttgcagttacatgtatatcacagcactattcacaatagcaaagacatggaatcaacccaggtgcccatcagtgatggattggatcaggaaaatgtggtacatatacaccatgggatactatacagctataaaaaagaatggaatcacgtcctttgcggcaacatggatgcagctggagtccattatcctaagtgaattaatgcagaaacagaaaaccaaatactgaatgttctcataagtgggagctaaacattgggtattggacgtaaagataagaacaacagacacgggactcaaaatggggagggagtcagggaagggttgaaaaaccacctattgggtactgtgttcaccatttgagtgatgggttcaattgaagcccaaacttcagcatcacacaatatacccatgtaataaacctgcacatgtaccctctgaatctaaggtaaaaataataaaaaatctagctgacactgtggctcacgcctgtaataccagcactttgggaggccgaggcgggcggatcacctgaagtgtcgggagttcaagaccagcctggcaacgtggtgaaaccctgtctctactaaaaatacaaaattagctgggtgtggtggcgcatgcctgtgatcccagctacttgggaggatgaggcaggagaatcgcttgaacctgagaggtggaggttgcagtgagccaagatagcaccacggcactccagcctgggcaacagaggagggctctgtctgaaaagaaaaaaaaatcccaggtgatgataaaatgctgaagaaaaaatagggtggggatagggtgattaaaagaaaagagtttttaaccctgaaattaaatattattacctctctgctttttgtggggatctgtaaaattagaattctgttactctggaataaaaattgctggaagagatctgagtacatttaaaccatgaaagatagaaaaaggctttgtttttgctttcagagaggttaagtgagcgagcacagggtaagatggcttatgagagtaggatttgtttctaattcgttttaatacttaactagattgagacatagcactttgtatgttctgagaaacaaggctcatatttctttgacctttcctacctacagaggaggcttcccactctgctgcttgtccccatccccctttcctatctggccagcacactatgtccagaaagctagctctgagacacccctggaatttaataagctctcatggatgccacgtgcttttcagatgttttgcttctttggtgtttgtattaaattcccaagtagtagttgtgaccgtagagtttagcagcttctcgtcttattttccacatttgtttagctcttgtacttttggtggacttagctgtctctcactcttgattttgcttgttccttgatgtccaggtgagggcatggagggacttggggagtaaagagtggaatgttctccgtccagtgtgaaacagggtggggggtcggctcctgttgggaactagcccctgtgccttcacgtcccctatcattaagggagttggaggcagaggggggcctgtctatagcctgttttctggccaggcgcagtggctcacacctgtaatccagcactttgggaggctgatcacaaggtcaggagatcaagaccatcctggctaacatggtgaaaccccgtctctactaaaaatacaaaaaaattagccatgcgtggtggygggcgcctgaaatcccagctacttgggaggctgaggcaagagaatagcatgaacctgggaggcggagcttgcagtgagcagagatcacaccactgcactcgagcctgggcgacagagcgactctgtctcaaaataaataaataaatgaataaagcaagcctgttttctgagcccttcctgtggtcgtgtgctgggcttgtgtcccactgtggctctagattatttataaatgtgtccctggggcaggacaatttggggctgagcacgcaggatgcccctgccctgctgcagagacaagagctatagagatgcatggccttattgggtccaccttccacacacacatacaacaccctgaaaagtactagcatgagggtgggagaggcaagaccctgtttgtaccgtgggttccagtgtaaccagggatgtgtccaagtgcctacacttgagtttgttgataaccaggctagctgtgggtagtgcaaaatcagtgttttaaatatcatgtgttgaaaagtaatttgagtggctttatgtctgaaaacagacatctcagcctgttttgtggttcagacccaggttcttttctttttaaatcccctattacactgtctgcccttagcaattaaaggatataaagtgtgttactatatgaaaatatgcacagtaagcttttttcaatatataatctgtaggttcacacacagtaagctttttggacttgttttttaaaaacttccattttgctagccagtttcataaagggctgtctggacctgaatgtttttatgaaatcctgaatggaggacttttcaaattgtcttcgcagaagtctggggcccagtgaatgttgtgcttactcatccccagcactgaaagggcacaagtgcatgccattcctgggaaggaaaagaatgcagatggatggcatttcatccctggactgaccctgaggactctgcttggaatgctactgcagtagcctccaggagaggatggaaaagacctctcctctctccccagctgatgggggtggggtggggggaagcagtagagattggtgggggtggggcaggggtggactgggaaggtgcacaagggaatgttctggagtgatggtagatggtagcattgtatatcttttttttttttttttttttttttgagacagagtcttgctctgtcgcccaggctggagtgcagtggcacgatcttggctcactgcaacctctgcctcccgggttcaagcaattctcccgcctcagcctcccaactaactgggattacaggcgcccaccaccaggcccggctaatttttttttttttttggtatttttagtagagacggggtttcaccgtgttagccaggatggtctcgatctcctgacctcgtgatccgcccacctcggcctcccaaagtgctgggattacaggcgtgagccaccgcgcctggccaaaaaaaaaaaaaaattttttttttttgagacaggatctcattctgttgccaaggctggtgtgcagtggygtgaccacagctcactacagccttgacttccattttgtagaaatggaatctcactatgttgcccaggccggtcttgaacttctgagcttgagtgatcctcctgccttgtcctccaagagtggtgggtttggaggtatgagccaccgtgcctggttctggctctctgaagccagactgcctgagtctgaatccctgctttgcagcttacaaactaggataacatccctccatctctgtttcctcatcagtaaaatggcaccatgcccagaacccacctcactggagagttggaggtttaaggataagtgtctattataatgtaaatattcaatacatggagctattattatctatgtgtgtggtcatttacatacatcatgtaaacagagggatgtgtgtgtgtgtgtgcgtgtgtgtgtgtgtgtttaaacttaatctgcaccccaggaaca

SEQ ID NO: 94087 - DNA, 19274 bp, Homo sapiens
cccagctgatgggagaggggagggtgcccacaggcagggacgggcaggaggactgtccagcgtgcccgggcagattgcaccaccactccaaggacgtgctgggaagtccgatggcatcagcctgcccaaggccagctctgacatgacagcgggaggcacacggggacacacagcacatcacagctgctgaggggctgaggcctttgagattcccgaggaagaacagggagtggggaactgattaaagtaaaatgaaaaacaacaaatgggtctttgccctcccctgtgaaaaccctcccagcaccttgtctggctccccccagcccctagcccaggcctcgcgccccattgctgcccactcctggccaggcctgacctcctgtgtcccgggctggaagacccttcccctgactgcactggcggctgcctttggcttccccttcagcttcgccccccagcgaattccccactcagccttgcagtgcccgccacggcccctcctgccgttggaaggacttgactcgggtattaaaaacataatcagcagtcagaggccacagtctacacgttccccgagcaatcacccgctgaaacgcaagccgtcttcatgtccccacaccctggctccagtcaccagcaaaatgcagcaaggtggcctctggacgtccctgtgagcatgacccagagaaaaggagccaaccggcggtccccaagttagccggcaagctctgcagccctgacgagaatgcggaggggtgactgccagtgaggggacagaggggacagactgccgcacttgctccctctgctttctgggccacatggtgactgcagccaggcggcatctcccacttggctggaagtctcccaccgcggtcggccctttctgcctgtgggatggtgcaagttgagaggtttcctaacttggtctcacttcattggacacaggcaagatgatggggtccacacagacactgtcttgcttgtgagagctttgcctggggactctgcagtgctgtgcggggtgggatgcacaccctctctgggcccgtggagtcctggggacatgcagctgtgtgagccgtgggtatgaaagggccccttcctctaggctggccccgggccacagctactgcagggcagtccagccccactctggcctcggctgctgtggcggtacacaggctctgacctgcatcagggtgccccagggcaccattcccagggcatcaggaaccctgtcatcctcccccatggccaggtgccgcccccctcaacttggagtgagtgcctttccaagggagggtggacaggcagtgccaggtgccactgatctgtcctcccaagggaaggcgggggccctggcgggcagcatcagcagggaggggcgggcagctcaggcctggcacggcaagcgaccaggcgtgttctcctacccaggggtctaggctgagggtcctggggctttggcgggtccccctggagtctccaggctctgacatcggagggttggagtcagaggagctgagacagagcccagcggagcagatctcgggattttctggtccttgaaactggaaaaggccacagcatgtagaagccactgcggggcagcaggaggggtgtagtctccctggggccggggctgctcggcctcaggctgggccactgggctcagggcttggagggcacatctgaagggtgctgaggagtgagagatctgcggtccctctgacccactgggggacgtgaggccggggaccgcacaccctggacctcagtttcctcctgtggaatggggacagtgacagcaatgctcccttcctgggactgctgcaggcttccgtgagacaacatgtcaccaaaccgcagatccccctgcaaggttcggtgcctggtgtgtggctgctggagggagttcatgggacagtggggaccctgagaacggccctcaactcagtcgtcacaggccccttatggctctatgaatctgaactacggacaacacgttttaggacagaaaagggggatgtgagctgctggcacagggcccctgcccggatgaggacagactcaggcaagcactgctcgtcttccagcctgggtgtggctcccagcacccggcctctcatggtctcctgggtattcccagctccttagcaggaccagtgaggtgagcccagacccggcctcggacatgttttcatctccttccatgccaccttgtgcctctggggactcacagaattgccccgagaggactgagcccctcacagggaagggcccctgcgggctcttgttcccgctccttgcacccagcatagggcctggaagaggaggtgaaataccatttggtaattcgggaagtacagccctctgcccttccttcctgtgtgggaccttgctccaggcagatgagtaatccaaggtccaacctttgcgtccaattcagcatgctaggaacttgaagttgttaattcatcctaacatcaagtaaaaaggaaaaaacttcccaaaatcagcaactcttcttagattcccaggagaagtgagaccacacagcaaactgccacccccaagactggagagtcagacaggtgaaaatggagaattgccactcaccaagggcaggcttcttgagggctagtgacaagaaaaaaaatccagagcaatcccagaagagcttctggggctcagtgtgcacaagcgtaagagctaaggtcagtcaggaacccgggcactcacttatgtgagtttcacctccagaagctctacgaggtgctcaccgcaaatatcagaaaagctcgtctatgtcaggcagcaagagaaaaagaatggtcattatgaaatacaccagagcattctgttctttaaaaggccagcctttcagagagactgtcttgccagagcctaagctgctgggttttatcagagctgaactatctgggaaagaagagagacatccaaccccagtccgtgtagcgtgccacatgtgagaagagccacacacagccccagcccttactgctcaacctgtctatttatgtcaaggaaacactgagaagcccttgtaatgttcacgggttggggacacaggctcactgaaagactcagacctactcacaggaccacaacacactcccctctccgcacaccttacctctgcatcatcaaaggcacctatttgcagcagtttcttttatgcagtatattatgtctggggcttaataaaaaatgatacggcatactaaaaggcaaaagccaaggtttgaagtgatggagtaaatactacaaggaggctcagatatggcagggacctggaatgatcaactgggaattttaaacaacagtgattaatacgctaaggaccctcatggaaaagtagacaacacgcaagaccagatggggaatgtggacatccagatgaaaattcaaggatgggtgaaaaaagaaattctggagatcaaaaacactgtgacagaaacaaagcgtgccttagataggcttattagtggaccgaacacagctgaggaaagaatctccgagcttgagaatatgtcaatggaaactggaagctgaaaggcaaaaagaagaaaacggaacagaatactgaggactgtgaaacaactactgctggtgtaacatacacataacggggacattggaaggaggaaaaaagaaaggaacagaagaaacatttgaatcaataatgattaatgtcagacaccaaaccacagattcaagcagctcagagaacaccaagcagaaaacaaaacaaaacaaacgtctccacctaagcatatcatactcaaactttggaaaaatcaaagatgaaaaagaaaccaggggttgggtgggggacaccttatctatataggagtaaagctaagaattacatgtgacttaccctcagaaaccatgcaagcaagaagacagtggagggaaacatttcaagtgttagaagaaaaaagaaaatacatcaacctagaattctgcatcctgtgaaattatccttcaaaagtgaacataaatattttctcaggtaaataaaaattgaggggattcgctgccaatagaactgacttgccagaaatgttttttaaaagttctgcagagagaaagaaaatgatacaggtcagcaaccctgagctacataaagaaaggaagagcatttcagaaggaatcagtaaagagaaaatgaagtcttttattttttcttaatcttaattgatctaagagtttgctaaaacaaaacaacaacaacaaaaataggccgggcgcggtgactcaccacacctgtaatcccagcactttgggaggccgaggtgggcagatcacctgaggtcaggagttcgagactagcctggccaacacggtgaaaccccgtctctactaaaaatacaaaaattagctgggcgtggtggcacatgcctgtaatcccagctacttgggaggctgaggcgggagaattgcttgaacccgggagacagaggtcgcagtgagccgagatcacaccattgcactctagcctgggcgacagagtgagactctgtctcaaaaataaataaataaataaataaataataaaaataaataaataaaagccagaaagtgtatttgatgatcatagttatgtatatgtgaaatgaaggacagcaatgatgcaagggatgggtgagtggaattaaaaatatcttattatttatttattttgagatggagtcttgctttgctgcccaggttggagtgcagtgggatgatctcaactcactgcaacctccgcctccttgattcaagcattcatcttgactcagcctgctgagaagccgagattacaggcatgcgccaccacacctggctaattttgtatttttagtagagacagggttttgccatgttggccaggctggtctcgaactcctgacctcaggtgatccacctgcatcagcctcccaaagtgctgggatgacagacatgagccactatgcccagcctaagaatatctgatgattataaagtgcttgcattacctctgaagctgtatagtgttatatgaaggtggagttggagagatgagttttaagcgtatattgcaaactctagggcaaccactaaagaagtgagacccagcctctagaaaaaaaaaaaaaaaaggaaattagctatcaagccacgaaaagaaatggaggaaccttaaacgcatattactaactgagatacgtcactttgaaaaggctacaaacggtgtcattccaactatacaacattttggaaaaggccaaagcatggtgatgataaaaagatcggagatgtcagggactggggcaggagggatgagcaggcagagcacaggttttcttttcctctttttaagacagtgaaaatactcctaggatcctgcaaggagggatacaaattacatacatttgtcaaaacccacagcatgttgaccaccaggaggagaccccatgtgactccaggaccctggttgataacaacgtatcgagattcctcacatggaaccagtgcgctcctgtggtggagggtgtacctgtgtcagggcagggggtacgtggacattttctgcagtttttgatcaattttgcaatgaactaaatctgtggtataaaaataaagtctattaaaagaatccaaggctccctctcatctcacgataagataaagtccccatccattttactcctctcagccctggagaaaggagaggccaggtcccaccaccttccaccagcatggacccccagtccagaccccacgccttttctcagcatcctcagaccagcaggacttgcagcaatggggaattaggcacctgacttctccttcatctacctttggctgggggcctccagccttgaccttcgctctgagagtctcaggcaggtccagagccagttctcccatgacgtgatatgtttccagagcaggttcctgggtgagataaaaggatttgggctgaacagggtggagggagcattggaatggcactcagggcaaaggcagaggtgtgcgtggcagcgccctggctgtccctgcaaagggcacgggcactgggcactagagccrctcrggcccctaggacggtgctgccrtttgaagccatgccccagcatccaggcaacaggtggctgaggctgctgcagatctggagggagcagggttatgagcacctgcacctggagatgcaccagaccttccaggagctggggcccattttcaggtaaagccctccctggccctcgctgggaacacccagatccctgcccctgctgcccaggaccctgccaggcactcagcactgccattcccagcaggtcccggcactctgcatcctttggaggatggggaaggagtgcagcacatgctggtctgtggtgctgccagggcaggggatagtgcagagaaaaccccagctcactgcagagagggcaggactcagaagcactaaagttgaaaggttccagggagccagcaggagggctttagctgtgaagccgctaatccaggagcagggagggtggacaggagacactttggattgggactgcagggtggggccacgagggacatgaccctgtccagcagggcctcctgcttggccccacaggtacaayttgggaggaccacgcatggtgtgtgtgatgctgccggaggatgtggagaagctgcaacaggtggacagcctgcatccctgcaggatgatcctggagccctgggtggcctacagacaacatcgtgggcacaaatgtggcgtgttcttgttgtaagcggcgagttgggagctgagagctgggagcagggtgggcagcctgggtgtaggggggaggcgagagaggtaggacccaaaagcacatctgccctgggcccctgtggtgggcagtgagggtgagcacccggcccagaggacggccatcctgtggggtcgcgtctgcactgtgggttggggaagcagggcggtggtggagaaatgggcacgggcacctctgcagagaagacgcagagcaatgagcccttctgtgtagtgagaacctgctctgcaccaacctcggcggctgctttctcttgcggtctggggactgtccttcccataggtcagaaaactgaggccctgagaaggggacttccactggcccaggtcacaggctgagtgctgagcctggtgttcgccggggccgcagcctccctcagggcgctcagggtccctgcagtcctggcaaaccttcctgatggggacagtccggggcaggaggcaggtggggacgcaggtggctggtggttccgttgttctcagaagcaaggcacaaggtggggcggttgatggcactggggaggatgtttcctggcccgtggagagggtggcgcctggtcaggtgggcagggagaggctgatgcttggagtcggtcacctgcagggatgttgtcattaggacgggggaaggactggatgaggatgtcacagtggtgacagcccccactccatggtaggaagggaacgctattgggaatagtggggtttaggtaaaagggcacccgtgggtcggggccttcactgaggctggcctatagatgacatctgggagagagtcaggacccaggaaggcaggtccaggaggctgggtgcgcataatggaaggaaggggagcgctcctgtmtgtgtgtgtgtcttgcatctgtgcacatgctgtgtgtttctctgtacctgcatttgcacatgtgtagtgtgtgcacgtgtctgtgtgtgaatgtatgtgtggtgtgtgtgcacaagtgtctctgtgtgtgcatgtgcaggtgccggcatgggtgtagtgtttgtgcacacatgcacatgcgtctcttcacacatggtgttgaggtcttgcatgggcgcacgtgtgcatgtgcatcttctgcctgtcatcactgtcaacagctcacagcagccagctagacataaataaaggagttttgcaggaatgtggctgacaggggaaattcctccccaccattccctgggggcatccatggagcccccacgcactctggctgtgggtgaggatggcatgaagcacaaagcttggtttctgtcctgcagaagatgcagacacttcactggggctgctgccccagaggcactgtgcccagggcagggaagggtggggaggagagggcagccaggggctctcccctcaggacactgtgtgggtgaggtgggcaaagcttgacaacaggggtcacctcctttcttggagaaaagccctaccctgttactacagggagggcccgcatgggtgaggtggtgccagacttgggtcgccaggtcccgggaatgacctcagttaccctgtcagcacctgtgggcagaagctaccatctcatccctgcttagacctgagtggcctttgcccagcacctggaggccgctctgagaaaaggctgcagctcgaacacaaacaggcagcttctaccagggcccccagtcagctccctgcaggccgattccccttggggacaaggaggatgggatacgggtcagggcctgtgtcttgctggggcggcctcacaagctctgccctgscctctgtaggaatgggcctgaatggcgcttcaaccgattgcggctgaacccagawgtgctgtcgcccaasgccgtgcagaggttcctcccgatggtggatgcagtggccagggacttctcccaggccctgargaagaaggtgctgcagaacgcccgggggagcctgaccctggacgtccagcccagcatcttccactacaccatagaaggtgtgggccaygyrggaagrtccagccycagagaccctggagtggccagggayggggatggrggactgaagggagtgtggggaggcagccaggaggycyggggctgccttgtgctcagcagtgcatcctccccgcagccagcaacttagctctttttggagagcggctgggcctggttggccacagccccagttctgccagcctgaacttcctccatgccctggaggtcatgttcaaatccaccgtccagctcatgttcatgcccaggagcctgtctcgctggatcagccccaaggtgtggaagkagcactttgaggcctgggactgcatcttccagtacggtgaggccagggacccgggcagtgctatggggaagggacaccatgggggcccaatttctccytctccaccacccagtggggaatggaggccacagggaggggtcggggattcctcaccttcctgccagggagattggtgtgaggctggggctgggctgggctgatccggagaatttgggatgagagcagggagayttgggtgtcggggcagtctgggcaggaggaggacactgaaggatgyttcccagcaccaagatctgagggctgtcccctgctccctggayaggtgacaactgtatccagaaaatctaycaggaactggccttcarccgccctcaacactacacaggcatcgtggcrgagctcctgttgaaggcrgaactgtcactagaagccatcaaggccaactctatggaactcactgcagggagcgtggacacggtcaggccagcaaccagccccacccagagagggtgatgccaagcctgcctcccaggcactgcctgccaatgccacacggcacccacgttccccatccccaggctacaggccccacatttctgttgccctcagccttcccyctcctttgttaagggatgagatttgcargggaggggaaatgtgagctccccctcacatgagactgagtttgcagttacctgtgtggggatccatgctccaggctggaagaaagttggatgaggccctggacacacagcagctctgtccccactggaaagctctgggtgtacaaggagaaggagggttgagaggcagctggaggactccactgggcacccttcccagtgtgcccggtcaccttgggccagaaatgtagatgcatgggagggcagggttgtggggaagacagcagcacaggctccagccagtgcagaggggcctgtgggtgcacagtggggagaactcaatggaagcagagggagctggggctccagaactccctggatgatgctgaggtgtggccccctgccctaatggtggctgtgagaacccgccctgaagaggctgcaggggacctgggccttggtggagatgggggtcacctttccctgaagaagtcagggaatctggcccaagtggtcatcaaggtttcagatccggggtcccagggctctgtcgtgctcagggcatggatgtctccacccctcagagggcggttgtcctgggaggggtgtcccgggggctgagtcctcctgtgcaaggtctgaccctgcagacatggcttctgtagacagcgtttcccttgctgatgacgctctttgagctggctcggaaccccgacgtgcagcagaycctgcgccaggagagcctggccgccgcagccagcatcagtgaacatccccagaaggcaaccaccgagctgcccttgctgcgggcggccctcaaggagaccttgmggtgggtgctggctgaggcctccctgtggccctggccccctgctggagagcagcccccactgggtggtggcagacagaatctggggctgataaacagcgtcacccagcagcccattcccctgcacctgctcttcctccccctcaaggacagggagctcttcttcctctggaatccctcttcaacrccctggggattaacgtggggcatgtccttctgcgctyggggctkctyaagttaggggaggtttggctgggctcagcaggtgcaaggaagcacttcctacgaccygggcttcccatggatctgggacctctgcggggtcttsggtaggaagggtgctgagagcacagggagccccatccagctgaggaccctttctrtggatgcccccacctccaggctctaccctgtgggtctgtttttggwgcgagtggtgagctcagacttrgtgcttcagaactaccacatcccagctggggtgagtgagccccacacccctcgagctgagaacctccctccccagtcattccctgatccctgctctgyaccgtccgcagacattggwacaggttttcctctactcgctgggtcgcaatgccgccttgttcccgaggcctgagcggtataatccccagcgctggctagacatcaggggctccrgcaggaacttccaccacgtgccctttggctttggcatgcgccagtgcctygggcggcgcctggcagaggcagagatgcygctgctgctgcaccacgtaagcaggcctgggggcgggggcgggacctgggcagcagaggcgggacctgcacactgggggcggggcttgcatggtgtgattgacacctgggaacagtggatggggccttggttggttgaggtcggcgtgaccagggaggatctgtgctgagcaagacagggtaggatctgggtgaggytgcttctaaacattgaaatggggactaggggagtggggtggagcctgtacagaataatggggcttgggcaagacctgggcaggattcagtctgggcctggtccgyaaggtggggctggtcagaartgggataggttggggcccaggctgctgctcccccttcagcataattgttgcacctgggacgatgggaggaagctgccccaggtccatgggctactgaccaggccagatggaaacccagcctctgtcctaggtgctgaagcacttcctggtggagacactaactcaagaggacataaagatggtctacagcktcatattgaggcctggcacgtcccccctcctcactttcagagcgattaactagtcttgcatctgcacccagggtcccagcctggccaccagcttccctctgcctgaccccaggccacctgtcttctctcccacrtgcacagcttcctgagtcacccctctgtccagccagctcctgcacaaatggaactccccagggcctccaggactggggcttgccaggcttgtcaaatagcaaggccagggcacagctggagacgatcttgctggcagggcctggccttgtccccagccccacctggccccttctccagcaagcagtgccctctggacagcttgactctactcccagcgctggctccaggctcctcatgaggccatgcaagggtgctgtgattttgtcccttgccttcctgcctagtctcacatgtccctgtccctctcgccctggccagggcctctgtgcagacagtgtcagagtcattaagcgggatcccagcatctcagagtccagtcaagttccctcctgcagcctgaccccaggcagctcgagcatgccctgagctctctgaaagttgtcaccctgkaataygatcctgcagggtagactaaaaaggcccctgtggtcacttatcctgacacattttcaagtgatacaactgagtctcgaggggcgtgtgttccccagctgatcatgtcagcctcatgccccaggcctcrtctttcatggaccaggycttgttcaagcagcgagtgttgggtcctctgcttcctgwgctgtcccctggrgaaggtcccraggatgctgtcaggagatggaagagtcatgtggggtgggaacctggggtgtggttccagaaatgtttttggcaacaggagagacaggattgggccaacaaggactcagatgagttttattgactcattcctctggttgatacggagccatgtcatgtgccacgacctggggtgggcacagggaggctgcagttccctacgtgaacctgccttgggcctcatctgctcctagcccagcagagagagttgacccctcctgaactggccactccccagtgctcctgtgcagggataggaagtgccccagggtgagaacgtgcccagccacatcatctttatctcctgggattttcattagggcaaagatctcagcagccagctcctggtagctgatgaggatcagagcgtttgttcccccatgaaaggggaaatacytaggtaatcattccaggtgtgttcagtagttccaggactcagggactcaggccagtcaccctgtgaccgcaggttgctttcccaccctgggcaatgcagtgcagcatgggaaaggaataagggggcaacaaggtgcacagacctcagagatggcttccttgtttatggggctctcacagatacccatccaactcctctagtcagcactagatcatgggatcctaaaataaaccttggaaaaatattttaaagccttttatctcaaaattattatagatatattcaaatttgttgacatatatatacaggcaggtccccccgccacccttcacacagcctcccaccatcagcagcttgcaattacatagaacagtcttcaaaacaggaaatggacagtggcacgattcactgagcttatttagaacttaccagtgaaatgtgtgcctgcgaatgggtgtgtgtgtgtgtgtgtgtgtgtgtgtgtgcctgcctaattccatgcaactctgtcccacatgtaaatttttgtgtttttaaatgtaagcttaattattactcagttgtggtgaggcccacaggccaggagaagactgtgattgaagaaatagtctgttactgacagcgtgcagtggcagggctgttcttgccatcatgacctcattggaagcatccgggtcaatctgaaggcagaggttctagttcttcctgggggaggagccagtgaaagcagggtaggcaggcttgggactgattgctttgcatgattacccagggctgcgagtcacagggattgtctctggctgtctggtgcctgactctgggggaatctgttcaggggagctgtggcctggagtgtgcaacaaggtggctggcaagacttcacaggaaaggcattcaccaggggggaccttgaccatctgtagtaactggccagccctggtagggcatcctgtccaggatgcaagcccagaaaagcatcagaagcacagaaaataacaaggatgattacatgattggcctggtgatgcttggatgtcattattgagaaagcactagcattagtttctttatccacttgttgattgatgggtgtttgggttggttccacgtttttgcacttgcaaactgtgttgctataaacatgcgtgtgcaagtgtcttttttgtataatgacttcttttcttctgggtggattgctggatcaaatggtagttctacttttagttctttaagaaatctccacactgttttccatagtggctgtactagtttacattcccaccagtatttagaagtgttccttgttcattgcatccatgccaacatctattttcttatttttattttttgattacgaccattcttgcaggagtaaggtggtatcacattgtggttttgatttgcatttgactgatcattagtgatgttgagaatgttttcatatgtttgttggcyatttgtttatcttcttttgagaactgtctattcatgtccttagcccactttttgatgggtttgtttgtttgtttcttgctaatttgtttgagttgattgtacattctggatattagtcctttgtcagatgtatagattgtgaggcttttctcccactctgtgggttgtctgtttactctgctgactgttccttttgcagtgcaacagctctttagtttaattaagtcccagctatttatctttgtttttattgtatttgcttttgggttctcggtcatgaaatccttgcctaagccaatgtctagaagggtttttccaatgctatcttctggaatttgtatagtttcaggtcttagatttaagtccttgatccatcttgagttgatttttgtgtaaggtgaaagatgaggatccagtttcattttcctacatgtggcttgccaattatcccagcaccatttgtggaataggatgccctttccccactttatgtttttgtctgctttgttgaaggtcagttggctgtaactatttgggtttatttctgggttctctattctgttccttggtctatgtgcctacttttataccagtaccatgctgttttggtgactatggccttatagtataacttgaaataaggtaatgtgatgcctccagatttgttctttttgattagtcttgctttggctatgggggctcttttttgattccatacgagttttaggactgtttttcctagttctgtgaagaatgatggtggtattttgatgggaattgcattgaatttgtacaacataatttcaatacacctgagaactacacatatatttgaagaataatacttggtgtgttgcttgtgtcaaggtagcaggttgatcaattatgtttttggagcataacaattggtaaattagtaaagtatatgtaaagattagtggcatttttgtgtaaccaaggaaaaagagtggttgtgatggttagagatgcagcgtagaaggtcacggtagaatcctggacaagattagtaggagaagtttctggagagtgagtggtcctttccctggaggtaagatgttgatatgagacaagtaccttctggggaaagtgataatctccattaattttcagagtggcacagagaccatcaaccttttccaggtgtctcttcggcacgggagtgtaggggtgtgggtggttctggagatcagggattttataaggatcatgggtgttatacatgtgttgcgtctcccagaaatttctgtgttgaaatcctaagcccaggacctcagaatattactgtatttgaagacagagtctttaaagagataaataatgtgaaaccaggtcattgaggtagaccctaatccaatatgacaggtgtccttggaggaaaagggattagaacccaggcacaaacagagggtgtctctgtgatttggtcaataaaccaagaagagaagcttgagcagaaaccatccccccgaacaccttcatctaagtcttctagcctctggaattgtgaaaaaacaactttctgttgtttaagccacccagtccagggtactttgttattgcagccaaagcaaactaacgtgataggctaagcagtcagcaagctgcagaaactcattacaattgctaaaaccaaagaaagaaaagcaatccatgtcctgtgtccagttcatgccttagtgtagctgaacccaggcttggctgcttgctgcatgaaaactaaactccagagacaagagttggtgggaggaaaagcaggtgtattcaacagccagcaacctgaggagacggcagactagtgtcaccaagaccatctcaatacagtacaaattttaggctctttttagttaagggaaaaaggaagaggagggaggtgtgattgagaggtgaccaatgaccacagactccaaggagccagcaagggtccgaggaggctgaaaacttctttgtccttggtcaggtctcaatgcccctgtaaatctttaacaaaacatagttaactgtttacatgcttttcctttgatctcagagttagttttaaaaagtacatgactgctgtttttgtattattaactcaatgctttaaaattatcctcgcccatgtgcaggaatcagtaaaggccctttaaacaaaaaatggagtgagttatgtgcgttcatttgttgcttcacttttagattaggaaaggcagtcatgggcattgctggggagttgagattttagagcctgggatgaagttgtgtcctgagttgggggagaaatcttctccaatggcaagttcttgagctgagttgaggtcctgcaaggcaatgtcatctcctgggtgttctcctgggccagagtgatgccatctgggatgtgcaagtaacattttctttttagtggatacctacttgagttgatgtgggtcttgtgtttatagctctatggttttataatgagcctgaggctgagctccagcattaatgctctctagggcaggcccactaatttggtcaattgcaatggccctgagcctaagttgcgtggttaatgaaggtcaagccatgggggccttttggtcataaggcttttatcagccaaactcaatggcacgtggacctcagcacagccccagcaggacaagtgctgaggtccacattaggagggctgagcctccagattccatttaacagttttttgtttatatttttggatttgatgaaggtttgggctcaaatgggtcctgtatcggatgagcagatgcctgccccatggtacaatccatggttaatggatcccaggaaataattcaccccccagtctggtggccaaccctcctgggatgaggagggttggcaaacaaagatccaaaatttacaaagatgggggagtcaacataaaaagttttcctatacatgaaggtgacacatatgcccctttacaaataagaaagggaaactgaaaacttttaaaacttggtgtgagatgagtcagtcaagcagcctggagtaagaagaggttagggcctggaacaacagtatgatccatgtcagggacatgatccatgttcttcagggacatgtgacaatatgatccagtcacaaccactctttttccttggttacacacaaatgccactaatctttacatatactttactaatttaccaattgttacacagactaggatttgaaaaagagttgtttgaggagaatatatttctatcaattaaattaaattaaatttgggggacatatcagggaaatgaaagttctattgactgtcttttccaagacagttgggtactttgagaagtgatatatgtcctctggttactataagtaaaacttgtaagttaaggagaagtgtcctggtgttagtgtatgtggagacaggtgattttgttttatattttgagtatctgtgaggcaagakattcccagagtgctttaccttgaaggggccaactcttagacataatccagccattagtagtaagaaggaagatggggacatttgttggacatccagcgttaggatgacagccagaggttggccaatgttattgacccttaggtcttgttcttcatagaggacgccctggctaaagcagcagcattccactgatgccattacttcatgctgattggcagtgctattgagtagtctctggatgaatggctcattgccattcccttagttaatgcctttgggaaaaagggaaagcctccacttcctgcaggtggaatatgcagaggtccgagttttggctccaatctgtccaaaggtgtcctcagtagctggggtgagcttgtggggtgctatttccatgacccacgcatggtgggtgctggggatggagggtcactggctcagggtctgtgagagcttctttccaggagacctcaataggtagaaagttgttttgtttttgtcgtgttttatctttttatgatgtacagaacagggccgagaagagcagtttgggcaccttatggccatcaaaagtggtcaaaagagatgccagggggcctgagaggaaactgacaaagtgtgtttgtcaaaggagggatcaagtctcctttagggttaatatggcttggatgtgtgtccttccaaatctcatgttgaaacgtgaccccccgtgccccaatgtggcagtactgctgccctggtctccatgtggcagtgctgctgcttcttgtaaaggctctaacttgggcctgtgcgggcggatgttggttgtggtgctgtcagctggcagggttggtctgacctcaggccctgggggaagtggtcaggtgtcagcagagttggaatggggtaggtagctccccagttcccagacctctggatggcccactggacagcatgcatgagtcctaaaggggctggacctgtgtcaggctggctcagggttcaggtgctggctgtgatagggaaggggacaggatggtccccaagtcactggccaaactctcaggcaggggcaggcagaatgcttaggtggtgggaggctgaaggaagatcacagacctgtaggggctgggttttcagaaaggttctgagctgcagataaaatgttcaggcaggggcagggcagctatgctgcggacctttcactggggaggacaggacctctcagctgggtccatggagactggtggctgtgggatatgtggcatgctgacactttcctcctacccaagcatgctaaacttcgctgctgggggcatgcaaaggtgccaagcattgtctgttaactccgggagttttaacccagaggaa

SEQ ID NO: 94088 - DNA, 161323 bp, Homo sapiens
  misc_feature (1)...(161323): n = A,T,C or G
ccagctgcccgctggagcccccaggagcccaccgaagctctgcccttcaggagctggtcagggggccgcctgggagacccgcctcatcgtgaggacctacctggtgccagacacattacataatttcacagacattcttcaacagggtgtcactatccctttacagagatgcaaaccaatccagagatgctacatagtcatggtaaagctgagatttggatcccagccttgttcctgtgtgtctaattcagagtctgatttgcagcactaaaatggagcttatcagaggagcagaacagggaaggggtggagggtgccatgatttgagatgttgccttcccattgttggggatgcaccaagccccaggaagccgtggggccacatagatggatggtctctggcaaaatctgtcaggaattcagaggactgtggccactagctctgcaaatctgaatgaaatttgtgcctgcaggggcctgggtggatctggaaacgtcaagatgccggtagcagaaatggaactggaaaaggaaaggcaggctggtggagcctggtatcttgacagagctccaaaaacaactgtggagagagagggatggacagagagagagagagaagagagagagagagagagagagagagagagagagagagagagagaaggctgggtggggagagagagagctgggagggaagaaattcttttctggcagacaataagggatcataatctgctagtttgggagtgctccagctctgccagacgtctccagtgggacggtctcccttcatcctagtcaggggctgggacttgacttcctcttccaccatctcagtaagcgaccttggcctttgatttgagaggggccgatgtgggcagggtagattctcaggacacaggagagcatccatccttcttaacaaactgtgaataaggtgctggctcctgcttttgactggttttcccggctggtcttcctcagtggcaggaagcaggagcctgggggctgacccacctgccctgggctccttgggaggggaacagtggtgcttgatcccaggaggctccctgtgagtggctgctcccttctccagcaaaggatgtcttattatcaggtctgaagatgagggaagttcactattgattacgccagccagtgagcaactttctaacttcacggtcaagtatttgcccttctattaatcagggttcttcagagaagcagatagataagtagatagattagatagatagggagatagatggctagatagatagggagatagatggctagatagatagatagatggctaaatagatagatggatggctacatggatggatagatagatggctagatagatggatggatagctacatagatggatggatagatagatagatagatagatggctaaatagatagatggctagatagatagacagacagtggctagatacatagacagatggctagatagatatatggataaatagatgactagatagatagatgactaaatagataggcagatcgatagatttatagatcaatagatagataggtaatagttagacagatggctagacagatggatggccagatagatagatagatggctagatagatagtgactagatagatggataggtagatggctagatagatggctggatagatagatggatggctagatacatagatgactagatagatagtggctagatggatagatagatggatggctagatagatggctagatagataaatagatggatagatagatagatggctagataggtggatagataggtggatggctagagagatacacagatgtatggatagatagatagatagatagatagatagatagatagatagatagatagatatggaattggctcataggatggtcaaggctggcaagtgcaaagtctgtagagtgggctggcaggctggagaccccgggaagagttgatgctgcggctcgagtccataggcaatctactggcaaatttactctttggaggaagtcagtctttttctattaagaccttcagcttattggatgaggcctacacacaggaattgctttactcaaagtctactgatttaaatgttcatgtcatctaaaaaatactttcagagagacatccagaataatgttgaccaaatatctgggtcctgaggcccagccaagttgacataaaattaaccatcactgctccctttgcttttagcactcagtgagtgaacactttcagcccctgcaccccaagccatgagtgatatctatctatccacccaggctggggggagtgggagccctggggcatagtaaagggcttcgatgaacacaggaggggaagggaagtacagagacaaatgcttagatatattgtatatctgttaacattgtatagtaaatatatattatatatatataatgtgtgtgtatatatatacacactatatatatgatgtaatgtgtgtgggatcctggccaggcgtggtggctcacgcctgtaatcccagcactttgggaggccgaggcgagcggaccacaaggtcaggagtttgaaagcagcctggccaatatggtgagaccccgtctctactaaaaaatacaaaaattagctgggcatggtggcgggagcctgtaatcccagctactcgggagactgaggcagaagaatcacttgaactggggaggcagaagtttgcagtgagccaagatcacaccattgcactccagcctgggcgacagactgagactccatctcaaaaaaaaaaaaaacctgctgaatccttagcccaagtctattagctccaaagtctctgtcataacccacctgccttgtacaagaagaaacaagtgaatttctgtgtgcagagggattctctgcattgaaaagcgaagggagaaaaaaggaaaagactgnnnnnnnnnnnnnnnnnnnncacatatatatatacagtatatattgacctctgcctcccctctcctggctcagtcccttctcagaccctgaaattctttctgtttcttgtccacggtggaaggacccctggacaagaagcttggtgtctccattgtccctctctcccagcctgccctgaccctgtcctgagactcaaaccttcctgtgacccgccctcacttaaggttgccaaagcagaattgctccaatgccttggccctgccatgtcagccctcctcttcaacactgaggcctgtctgttcttcccggagcttctagagttggctgagtgcccatgaccaggtgcctgccagaccaccctgatgcttctcactgcccagctttcccagaaattgttcaagtcccctgatggggcctggggcttgccagggctggcagtgcctttgggcaggtgccccagtctggacccaggatcacatgagtgagtctgaccccacttcttcccctcagctgctttccaagcctctgccccatgggtgaggttgaccagatgctccaaggaatgcatagactcacactatgcaatcgctctggggccctatggctgggtgtgactcctgggcacagcctggggagcaggtttctcctttgagtggccccgagcattgaggacagcaaggatagtggcaggtggtctaggccctcatcacccctgccagcagcagctggcagtcccttatcccttctggaggctcctgtccactatcaggcagctgcctcctccaacgtctttcgaggacattgctccacagcaccgatacacccacgggctcttcccatcagcatcatctcccacctcccatccatgtggtgatgctgagctctccacattgatcctgccaagccagatgcaggcagacatccctggagagtgagactgctcttgtatgtggagggccagggtgcaatcatcatcaaatgggatctcaaggtaggaatgcagtgattatggcctaacacattcaagagaatatggctggaagatgtgtggttctacctttatgctataaaatttggaacagtaatttttttttttttttactgtgtcgctctatcacccaggctggagtgcagtggcgcgatctcgactcactgcaatcttcgcctcctgggttcaagtgattatcctgctcagcctccaaagtagctgtagctgcgattataggcacgtaccacacccacctgattttttttttttttttttttagtagagacagggtttcaccatgttggccaggctggtctcaaactcctgacctcaggtgatccactcccctcagcctcccaaagtgctgggattacaggtgttagccactgtgcctggccactctctagccattatttgaagtcttcattgataaatcactatccctcacatgagtttgtgaattttgtaatacgttaaaattatttatattgactggagacctacaaaaaaaaaaaatccacccaccaaaagggcagctctgatctagatactgggatttcctgaatgtggagggcagaagggtgggggacaagccagctgaccatgctggatagatcaggcaattgggtggaaaaggaagcaaagttgggatgggccttaaaaatgagggaagagtgcccgtgtggcgtgtgtgccaggggatctcactctgtggaatggcaaggaccgtgggaatagaggtgtgagaggtggggggctgggggtttgggggaagctctctaagtagggcagtcttggcatggtaggggtctctagagatgagtgggtggaggtgtaaagggaccagtattgcaaatggatcctcctggtggcgtggtccaggacttcatggatgttggtggaggccagcagggaagtgagaagggtgtgaaggtacacaatgggagcataggagatgaccccataaggagggggtggacaggtgctgagtggaggcgtgggtggggaatgagaggcctccacactgggctgctgcagaggtggcgtgctgcggaagggccggagcatggaggccagttcccatcaccactctatccccacgcctggctcccagcctggccagaggtccttgactgggagtgctttgtctgccctacagactcgcctgccatgtgtgttgctcagcggggaggtgctgggggccctgttctgggacaaccatcagtgtgacacatgttgagcccctgggcacatgtgagctcttttacgagctacgtccttcaagttagacaagaagaaaccaaggccgagagagagaagaaacttgaccaggttcccacagcttgaatgtggtggcgctgcctggctggtgccccttcctggagggagtctgttgtcatgtcctggaggccaaggcctggatgtgggatggtgggggcactctttgtgcagcgggtcaacacgtgccccttcggccttggtgggccggacccaaggacggagggtgcccaggtctgggggctgagggatgggtgtccaccgcagagccctcagaaatgactggtcctggatggcggtccctggagaggcagctcctctttgagtggtgggcatatgtggccatgcccagtcttggaggcggtgcagtccgaccggccaccccgactgctgagacgcaggactcagcacccagtgttgtccttggccaggcggccagcctgccctgtggggctttggggttctcctctccgagcttgtttccccagcatcctggagaagcccagggaaaaacccagcctatgttcccgctgtaaacggcccacatcccctccaagctccctttgtgtgtctccaagctggactgcagggatcagagctgtgctgcccgtgcagcacccacccgcccctgggaatgagggtaatggggtcacagagccatcacttggaccttggcgccctcggctggtggcagccaaggtctcccagcacccaggccgctgggagtctctaaaggggaggggtggggctcgactgtcccctccccctcaagtttgctctgtcctgggcaggccgtggtcccagttgagaagctgtgcccccttgggtgttttggaggttcagggtgggtgctgaaaagccctgagggagagcagaaggctcgggggcctgtctagggcatggcatcccacgtgggtgtcagcacggccgcagaagaaccacttctctggcccacccatgcctgctaggccatgcttcttcagaagtggccacaactctcctgacgtctccagagccggtcattccacccagggggacttcagctgccactggacacttcaattgtacgctgcgaccagttgccaggaaggagagggctggcaagagagccgcggcagccgtggcagggtgtaggggayggtggacggccagggccccccccyctctctctttctctctctctctcttgcttggtttctgtaatgaggaagttctccgcagctcagtttcctttccctcactgagcgcctgaaacaggaagtcagtcagttaagctggtggcagcagccgaggccaccaagaggcaacgggcggcaggttgcagtggaggggcctccgctcccctcggtggtgtgtgggtcctgggggtgcctgccggcccrgccgaggaggcccacgcccaccatggtcccctgctggaaccatggcaacatcacccgctccaaggcggaggagctgctttccaggacaggcaaggacgggagcttcctcgtgcgtgccagcgagtccatctcccgggcatacgcgctctgcgtgctgtgagtacaacctgctccctccccgggcacagatatgacagaggggcttagagggggcccagctttgagatgggttgttcttakgtcacaggacagagtgatctgacatgcacacttccccgccaccctgtcatggaccttgtccttggagttcagagagctggtctcrtggcaggttttgcagccttggagctgtcagaaccactctgaggcctgatgttacaccccagcttcccatgagctgtatggaccttgtggcttccttggagtctggggaccgagagaagggagtttgggcttttggagccaggaggaagctcagggctctgtggaggtgggtgtgttagagatcagctcaaagatgcccagctcagaaaccctgagaagagcaaaggtggcaagggggacccttcctggagcacccaggcttcgggcccctggaggaagctgttgtttggcgagccaagaatatggggtgagtttaatcaagaaaggactttccattcagtcagaagctgctttcaggggcctgagagcagaggaagtcaccattaccaccagcgagcagcctcttctctctcctgagcacttggctgtgaccgctgcccaccccccaccccctcaatttgggtctctgtcaccatcaactcctcccactgcccggttggggatgttactgaatgtaccagctgtgctaacaatggaggaaccagccacttgctgaaggttcctttctaaaacccccttcctgtccagcgtctgaaggaggcccttgccctgcagctctcggtctaatcataggggggccttgccctgcagctcttggtctaatcattttgccggggcctcaggcagtgccggagtgtagtcagggaaatrtgtgtccacctgaacatctcaagtagcatccctgggctggcagaaatgttcccccgagcagccagggccttgygcttctccaggcaggaggggaattgggtgatgaacccagacctgttttgaatactgactcacagctgggacctgtcgtgctaagcatttgttagcccatttcatcctcaccacaacctaaagtgaaggtcctgttaaaagccccactttgcagatgagaaatctgaggccctggcaggttaagtgagtgacaacagtcaaagccacggccatctgcccccagaggctgcagctgagaccagcagcctgtggcccaacctctcctgctcccagtccagcggggyaggcatgtagccttgcagggctggagaaagaagcaaggggagccacagtgtttacagggtcagctggggcactggaaaccaagccaggctcgcagctggtcgctggcctgtgctgacagtctgcagccccacctccaaagactggtttcctgtgtcccctctctcatgcctcaggggaaggaacgcaggcccaggctgcctggacttccccagtggggacctgctgctgccggggccttagaaggagcaggaagattctcttaggcctctcacaagcccagtctgactccacctggcccatgtgggttacttggatttctctcctggcccagtgggatcttgtcctggctgtttggtgttggctgagccgagggcttccagggccccatctcattaaccttcaacacagccctttgaccagggcttgctttgtggttgctcaggttacagacatggggcgtgggtctctctgactccgagccgtgagcatcttaacgtctaggattagcctgagccagagtcagagctggagaggccttggagaagctctggtgcaacagccctggcttttcaggaggtagacagagggcagagagcctgaggcctttgtccaccatgctggctggggtcaaaactgctgggatccaggccagttctcgtattccttcctctacctcttctctctgaacccttgtctgcactgagttctctcagagtcatgatgggtgtgcagtgtctgctccttagagagggacctgtggtgcctacagatgtccactatcctctcagccgaagcctcgtcagcctcctatcctgaggctgctgggctgcaaacaccaggagtcccaccccttggccagacaaaccctgggctcagtgtttccctttctcctctgctcagggtgggaagcttcccttcctgcagggtcaggctccactgtaggccgtgggttgctatggacctgcagactttccatacatctgcaggcttcatatggctgccaccctggattttgccaattacggagattttaaaactaaaaactaattaaatgaatgataacaaactgtcatcttccaacacctcatttcttgaaagaaagcagcctttgacaccaaaagaggcaggaagggcattaaaaaaaaaaaagccagtcatttaaagcaaagagattgaacttcttgaaaaacaaaccctaccacccttagttttctgtgttccctgcagagtcgccgtggcctgacggagacggcagaggcagacagtcccaggctgaggggtgtgcagggcagccgggttttctgcggctgcagaagtagcaggctttgcccccctagccctggaagcctggagccaccctgctctagaagtgactgcagaaggaagccacacactcaccctcctgccctagcaaagtccatgggaaaagtatacctgccccatggcccctcagatcacccaggtgccctgacctcatcctgcctgggccccagcagcactccctcccaggccccctctggtgggcaaggggacaacggccggagtctccacctgatggtttgggcaagtgtgcctggagtctcaggaactgagagcagcctcaccagggaggggcctttgtgctcaggaaagagaacaggatttgactatgtaaatggacttgagcgggggttggacatcaaaagacagggctacagttcagtgccacccatgtgacttaggagtgcacattctgcgcacacccagcaaaccctgcatttcctcgagagaggtcagccccgtcacctaccactgggcaggaaagctttgatctcacctcagcagcttggaaagccctgcttgacagggagcctgggctccatctcggggcacagacagttgcagtgggaagactccagcaggtggctgcctggtttgggtccaactctgccgtctttcagccaggggctcttctaagtagagcctatgttgtccccacctggtccccactcaaatcccccggcagagttggccctgctccggggggagtctgtgggtgcctccaggggacgttgggtacatcgtgggtgggagacattaagagctgtcaggctcatgccctctcctgccacgcaggggccagcacacctggcagggccttatgctgcaaagaagagatgccttgggaatggggtcagtcaatgcaagggtccatgggttggccgagccggcatccccytgtgcaatctgcacaggcaaagctgatcaaaggcccaatgtcagtatataggctgccctctctgcaggagcagctggggcccgggatcaggcctagagtggccggctcagctgtctgccatccagcctggagttgcgcaggagggcggcgttcccagccaaccactccagagagagggggcttccctcatgggggaggcgaaggcacgtggctgcctttggctcagaacccagtgcctggtctggccacagctgacagtgtggttttggtttccctccacatgtggccttccacaggccacccaggcaccatggcagggtcttgcttaccccttcccaggggcagtgtagacagtgcaccggacagacctggcttcaccagcagaaggttgttaccaacctgctccgcctaataacagcaggcaacttccaaagagctctgtgccaggcaccattctaggcttatattgactcatttgatgtccacgaagaccttcaaaggaggtcytattatctccactttacagatggggaaaccgaggtgcagagcggtttatggaacaggcctagtttacaggactaacaaataaaagggccaggattgcatgcatgatcttcctggaagcgagaaacagagaccataaggtggcctgtgtggggcggggcagagcctggagagggaacttctcgtgatggagccgcagagaagggacttgggagggcgaaactcctaayctcagagagtccaacagagttggaaagctgtggtrtgagcgggtggctaagtctccctttcgaagcttcagtaaaatagacactgttaattgtttttgtgcaaatgcaataaggcactatttttcatatctgatattgacagtcagtgggaaaaaatgctggcccaggtcgtagccagagctactgacatctggctcacaccagaaagcmggccaaggggctttatccaaggctgactgtgccgggttttctctctgcatgcaagaccaggaaggggtatgtgccctggaaggcctatgtatttcactcactaactgtatcttccatgtgaagtgacgcagagcaagcatgttaaaatggagtctccaggttttctgtgcctacgctcagcccccctgaaaagtcctttcgggtccagagattaggctccagctttgatgctttgcatgtttgtctacctggtaggttaaattcataaattcatgaacacaatcagcacttcttgggtttttttttttttttttttttgacagagtcttgctctgtcgccaaggctggagtgcagtggtgcaatcttggttcactgcaacctccgcctcccaggattaagcaattctcctacttcagccctccaagcagctgggattacaggtgcctgccaccacaccgggctaatttttttttttgtgttatcctcaggtgatctggcctctttagcctcccaaagtgctgagattacaggcatgagccactgcacccagcctttttctttctttctttctttctttcttttttttttttgagacagagtctcgctctgtcgcccaggctaaagtgccatagcatgatcttggctcactgcaacctccacctccaggattcaagcaattcttctgcctcagcctcctgagtagctgggattacaggtacccaccaccatacctggctaatttttgtatttttagtagcgatggggtttcaccatgttggctaggctggtctcaaactcctgacctcgtgatccacctgcctcggcctcccaaagtgctgggattacaggtgtgagccaccgcacctggcctttttttwwaattattattattttattttttatttttgagacasggtctttcgctgttgcccaggttggagtgcagtggcacaatcacagctcactgcagccttgcttgatcaagcgatcctcctgcctcagtttcccgagtagctggtattccaggtgcaagtcaccaagcctggctaatcttttttatgtagagacagggttttgctatgttgcccaggctggcccccaactcctggagtcaggtggttctcccaccttggcctcccgaagtgctggcattacaagtgtgagccgctgcacgcagcctcacatcagcacctctcaatcaattggtgccatctccctgcacatgaacccttgcgtcatgatgacatgtggtcctcacagccaggcmtttctccccaccccagacatagagtgagaggagctctgctcttccctcaataattcgtgccatgctgtgcactcctgaggagcaaggctctgtggtctgctggctctgctgggctgcatttgcaaaatgctaaccttcctgtgtcaacccagcatcttcacaggtggaatgaggatgacaaggccaaagcccactcgttgggttattttttcaaattgaggtataattcatattccatacagtcaccctttctatggtgtacaattcttaattttctttttttccaagacagtcttgctctgttgcccaggctggagtgcagtggcatgatctcggcgcactgcaacctctgtctcccgggttgaagtgattctcctgcctcaggctcctgagtagctgggattacaggcgcatgccaccatgcccggctaatttttttttttctttttgagacagagtctcatctcacccctgttgcccaggctggaatgcaatggtgtgttcttggctcactgtaacctccgcttcctgaattcaagcaatcctctgcctcagcttcccaaatagctgggattacaggtgcctcccatcacayccagctaatttttgtatttttagtagagacgaggtttcaccatgttggctaggctggtcycgaactcctgacctcaggtgatctgcccgcctaggcctcccaaagtgctgggattacaggcgtgagccactgcacctggccctggtatacaattctttatcgtgcttttagtgcattcacaatgttgtgaaaccaacaccactgtctgattccaggacattctcaatacctcgaaaagaaaagaaaccctgtacccacagcagtcactccctattccctctccacccaaaccctggcagcaactaaatgactttttgtctatggatttatcttttccggatgtttcataactggaaacatacaacatgtggactttggggccagcttctttcactgagcacaatgctgtcaagcttcatctgtgttgtggcatgaatcactcctctccagggctgactaatgagccactgtattgaaagaaccacattttgtttatccattcatcagttgacaggcatttgggttgtttccacttttgggctataatgaataatgctgtgatgaacattcatatacaaggttttgtgcaaacatatattttcaatattcttgggtctatatctaggagcagaattgctgggtcatttaagtctaacactttgaggaacagctaaactgttttccttggtggatccaccattttgcattcctactagcaacatctgagggttccaatgtctccacttccctaccagcacttgttattatcttttttattatagccatcctagtgggtgtgaagtgatgtcttattgtggttttaatttgcatttctctaatggctaatgatgccaaacgtcttttctcatggttaatggccatttgtatttggagaaaagtcaattcagatcctttgtacatttagaaaacagggttgtttgtcttttccttgtttccttgggttatcaagaggacaaaatggaaagatgtgagtgacatttacagcccaagtccaggcatgtggtaagcacccaccgaatgctttgcacacataaaaatcatgctggtgctgggcaaggtggctcatgcctgtaatcccagcactttgggaggccgaggtgggtggatcacctgaggtcgggagttcaagaccagcatgaccaacatggagaaaccccatctttactaaaaatacaaaattagcctgcgatggtggcatatgcctgtaatcccagctactcgagaggctgaggcagcagaattgcttgaacttgggaggcagaggttgtggtgagccgagatggcacccttgcactccagcctgggcaacaagagtgaaactctgtctcaaaaaaaaaaaaaaaatcatgctggtgatcaggtgtggtggctcacacctgtaatcccagtactttgggaggctgaggcaagaggatcatgaggtcaggagtttgagaccagcctggccaacacagtgaaaccctgtctctactaaaaatacgaaaaatttagctgggcatggtggcgggtgcctgtaatcccagctacttgggaggctgaggcaggagaattgcttgaacccaggaggtggaggttgcagtgagccgagatcgtgccattgcactccagcctgggcgacagagctagaatccgtctaaaaaaaaaaatcgtgctggcaattagtctttatgagctaaaagtgactagtgacatctcagaagcagaggagtacaggacccatctgtgaagaacattccatacagaggagagargagaatgrgggcagaggattgcttaggaaacttcctggaggcctctgggggatgctgagttgtcacttgaggcctccttggaggaagcactcagagagatggaagcaggaagaggactgagtgatgcccctgtgacggaggctgctggggacagggctgggagcctggaagccagcaggaggaagggatgggggcacagaggcacacagagtgaaaccaggggcaatgaacatgacatcaggaagaaaggcaggcatctgaagaccactgggctccaattgagggggtgggtgcagagggtactgaagtcctggggctgaggacgatggaaggagcacagcatgttccatgacgggggtactcaggcttgacaggtgcggcagcacgtggggaccagattctctcccctgctcacttcaggctcctgttgtcccctttcattaggaaaacacgatattaacaagtgcaggcccctaacagtttgggttcaayacttactgtaaacaaccccacggagggctgtccccgagagatcatttgggacctccccggagcagagaggcttgctggaccacacagctgtcagtggcaatggagaaacaaatagatctgataaacagcaatgtcctgttctttagagtcactttaaaaaatggtatttatacaaagcacagaaagtacaaagcaaaaagcagaaaagtaaccaccccrtcactgagacactagaataaccattgttaattcactggtgtatcttcttcttctctctacctccctgtatgtatgtaatttccattttgtatatacatgtattacatgtatatgtataattttagtctgagatttctagcagcattagcattttcccatttagttagaatttcttcctaaatatcatattttaattttagtctgagatttctagcagcattagcattttcccatttagttaggttttcttcctaatgatcatatttaatggatgtacaggattctattacatgatgtgcgacacttcatgaaatgattcttctattatcagatatttaagttatcaacagcattttgttgttataaatatgactgatgaaggtcttttgcagaaatgttataaacatgtctggttatagattccgaggagtggaattactagatcgagggacaggaatgtttttaaggctcttgatacagaatgatacattgctttccagaaatttttttccatatatgcaccagtaagctgtacaagagagtgcccgcctcattctaaccttcctattctgaatattttcatttcaaaacacaatacattgcaaggtgaaggtggtgaatgttcattttgatttgcatttgattgtggtcacgttgagcttatttgatagagttattgaccctcataatccctctttcgtgaatggtctgttcaattctctttgccatttttctatcgaagctatagtttttctgttatctacttgcacaagtttatatcacacttgttgcaaatattttcattgtgattttcctttaagttttatgatttttttttgacattcagggactgtaaatttttatatagtgaagtctctcagtcttttccttttttctcccttcgcttttcaatgcagagaatccctctgcacacagaaattcacttgtttcttcttgtacaaggcaggtgggttatgacagagactttggagctaatagacttgggctaaggattcagcaggtttttttttttttttcgagatggtgtctcwgtctgtcrcccaggctggagtgcaatggtgtgatcttggctcactgcaaacttctgcctccccagttcaagtgattcttctgcctcagtctcccgagtagctgggattacaggctcccgccaccatgcccagctaatttttgtattttttagtagagacggggtctcaccatattggccaggctgctttcaaactcctgaccttgtggtccgctcgcctcggcctcccaaagtgctgggattacaggcgtgagccaccrcgccyggccaggatccagcagtttatttaattccactgggccctggttcycctttcgaaaaccagtgctaagaatacctatgtggtaatgttgtggggcagattggatggaaaatatgtatcatgtttttagcacagtacttggtaaaaacaaatgaagcagttatgggttttttacttttgtttttgtttgtttgttttacattgaaccatttaatctctctggaattaatttaacaaatgatgcaggatacagatttaggctgggcacagtggctcacacctgtaattgcascactttgggaggccgaggcggccggatcaccagaggtcaggagatcaagaccatcctggctaacatagtgaaatcctgtctctactaaagatacaaaaaaaataaaaataaaaattagcttgccgtggtggtgtgtgcctatagttccagctacctgggaggctgaggtgggagaattgttagaacccaggaggcagaggttgcagtgagccaagattgtgcctctctacactccagcttgggccacagagtgagtctctgcctcaaaaaaaggaaaaaaaaaaagatttatgtgtatttttctcagctaatcatctttcccaaaacctcttactgaataacattcctttaccctttggggttcctcttttatcatattttaagtcatatatctttctttgtgtttgtactctgttccatgtatatctgcttttctttccccaatatcataacaattataccacctaattttataaaatattttattttaggtgattttcatatctattcttccaggtgaaccagctaataatattgccaagttggagaaaactactattgggactttgattggaattgtacaaaatccataatatagctggtataaattgacattttggtaatattcagtcttaacaaatatggttgtccctgttattttaaattttgtaattttcttcatatagatcctgcatatttattgttataatttcttctgattatcttatactcttattactattgtgaatacattttcccctacatttcattataactgataacatacagggaagttttagattttataaatccatcttttattctgtcactttactcactcctcattatttcaaattgttttttggttgcttctctgggattttcttgtttgactctcatgtttgactctcgtgtcatctacaaattaccattgttttgtggtgtactttccaaatacttatgacacttattcagatttcataacttattgcatgggccagtatttctaaaacactacagtggggaatattggaaaaagaaaacatccacctcaaggagacatactgtgagaatcgctatggaccacctgggaagggcatgggatagcctctgtcacctagttaccacttgataaaaggtaattgttgctgtttgtcatgtccaagaagaagcagtcttcttctagttttagaaagagttctgaaggactgagtatttaatttttatcaaatgcctttttaatatctattgtgatgattatattataccccttatttcatttactggtaaaataattttatatatttatatttggtttatatatgtgaaaccattttgcatgattacaatgaactattcttgatacaatacttttttattgtactctgaaacttatttagggtttttatatatgtattcatagttgaggttgatttacctgattttggttatgttatggttttaagtcatgtatattttacaaaatattctggaggcatttatgtagcataattattatctgatttttgaaatacttaaaaaaagttggtaaagccacttcttctcaatgccatttatacagataattctttaatatttacttcaatttattctttagtgttgaattggtcttgttttctatttcctcccatgtcacttctgttaagttatacgtaattttcagagaacaatctatttgttgagattttcaaaatttctggcaaacaatcatgcatagttttgtataactgtaagttttctcttttattgtggctgtcttcattttctcatttctaactgtttgtggtgcccagggtcctggcaggaaatagatggcatgttcaacaggagtgataaagacaggaatggcaaggcagccagtggctggcaccctcaggatccattcccacccctgaactgaagaggcagtggccagagctgtgtcaccagaacctggcagggctgcagctaggagactccagaggtggagttctgtccctgcaaatctgcagcaggcagggtggggtcagtggaacaaatcagcccatccccccttcactcaccctgctggtgcctcgcttcagccaaacctgggtaaagcagcccccggagatttgctggctgcacagggcaggtggaaaagggtagagagtgggtctcgctgggggaggggaggcagggagaggctgtccagctcactcgcatttgtttctttccttgattctgtttgtcacaggtttgtccatttaatctcctacttttcaagtgacaggctcttaggttggttaatctcttctgctttttgtttttatattctaaaaaatgatctctggaccggacacagtggctcacgcctgtaatcccagcactttgggaggctgaagcaggcggrtcacctgaggtcaggagttcaagaccagcctggccaacatggtgaaaccccatctctactaaaagtacaaacattagccgaacatggtggcgggtgcctgtaatcccagctactccggaggctgagacaggagaacagcttgaacctgggaggcagaggttgcagtgagccgagatcgagccattgcactccagcctgggcgacaagagcgaaactcaatctcaaaaaaaaaaaaaaaaaaaaaaaaaatctctgtcttttcaggaagccctgttgcatctgtaggactgagatcagcttctgtatttctcttcttccctctcttttttaaatctttgtcttttcctctagtaccactttcttgagtgtgtctttttcctcgttcactttctccaatccatagctgctatttcctgcctctgtcgtgtgttaaattctgactctaaacgtcccggctgtccctaatggtcagtttcctttatctcagtttgctcatttttcacaatcaatccctccaatttctgatatgcagtggtctctcgaatcttcctgagttcacaaatcagacttgtccagaatttatttttatcagtgattctatttaagatggaagtaactccctggagtccttaggaaaatgcccttttctggatggtgacatgttttcataggtcaggtgatttttcttttctgacaaagaactgtcgagaacaattggatcagatttgttcagagatgggagtgggttaaaacgactggcactggatgggagatgacaattcaagatccagccggtggtggggccagagatgagggtgtggtgagacacacagaggatgggctccctccaagggttgagagggggcgcctcatacctgggtcttgtctttgagtagctgtcagacgaggaatagcccgctggaccctcaagctgttgtgggggtgctcagccagctcccaataatactcggccagcctcacctccatctctcacctcctggccagctgagccacctgttaatgctttctcccttctggaggggtccatgttagcaagaaatggcctcttttcattcatcaactttagctttctctctggctgtgattcttcaaggtttggagtggcgaatggtgaacagtttgtttcccaaggttgccacacattttcttgtccttctacattggtgcaaatagttttttttgtgttttttttttgaacgcagggtttccagcccccgttctcctaccccatcttgtccagaaatctgcagaaacacaagtcttaagaaaatgcaaaaacacagacaaaaacattagaaattagaaatgatacgtaacaagagtcacaaaaggatttaaaagcaattacaggagcagatcagcaaagcaagataggaacacaaagaggttcttgaattttatagttggattctctgtctctctgtgggtctgtccatggtgaagatgttcctgggtctggctgtcagygttcatttggctaggaatggccacacagaaatgctaagatttatctgaaagaatcaaacacgatgatgtttcttcctacttccacgggcttgtcctcccatattagagtagaacttctcgtactacatcagggttgacctggtccagaaatgctcttctactgagaagcaccttcctgcctcttctttgcctccacactcagcacagggtgggcacctgtcatcacccagcacctgtgggagtcacatgggaaatttgctgtaagccccccttcatttgggaatggaacaaatctcatttgttagcagaaggaagtactgttgggcccagtgctatcctaacccagatctccaatgggaataatcctgatctgattactctgaaaggtcatccagtcactgggaggagtytcagctgagagccagtgttagcgtaacaaggtgttaccaaatcaccacaaagagctggggaagggctgggcgggacccactgcccctaaagagcagtgagcatgttttccaggttatgttccagggcagcaattgccaaacactatttagttgtagaatctttgctttaaacattttgcatgcaagatattgtgtgtgtgtgtkcatgtgtacatacacacatgcatgcatgcatgttacatgtatacacatgtatgcatatgttgtgtgtgcacatgtatatgtgtgtgtgtgtgtgtgtatataggaccagagtgaagtacaaactgctggtggggtggcaggccaagtgagcaccttcctccaccgcttggcagagcctccacacccgtggaatacagtttggtactactgctcacccaacgacttgtgtgtggcggggctgatggggtgtgtgtggggtggtgctgtatgttttcccttgaaggttgaaactgattcagccctgggggtcagaatgtccagccctgtgcattggctatgcagggtcattaacatctgctgagatgttactgtctaagggggaagtatcttcttcctgttatactagcttttgaattctgatctgttttggtaacatggagctgtttctttgtttcagtgtttctagaacatctttgaaaaagccataaaggtttgtctgccacacttgattgaaccaaaaagcctttcctgttctgtgcgcctgcctctgactctcccttcgtgattatgttctttctctctgtctacaggctgatgtttgggctggctggagctcttccacaagtcagctgccctcagccaaataagaggctgttctcacccctcacctcatttgcatacctacaggaggaagtgccaagggaagagagcattgaaaawtaagagcacagcagagttgagctatctccacatttgtctggcaggctctgcaaaggggattgaggccagtggttctctgtgtcccagaggtgtccctgggagatgtagtgtcactggactagagattcatccttgctatctctgatgcaagacgattgtatcaattcaggctctggaggtaggacagggagcagaaggatggggactaaagccatggaagaaagacagaaaaatcaccttttctatgtgaagtgaagagacatgtggaagtgaaattactcaaaattctttttaagtacccatgatgcaaaagccataaaataaaatattgtaaaattagccacataaaattgtaaaacatctacacagctttaaaaacaacctgttaaaaataactccaaaatatattgtagcatatatcagagtcttattcataactaagcaaaaaatgataccaaaataagcgagtcaaagacacaaaagggaattcacagaaaaagaaatacagataactaaacatgggaacatgctgaaggacttttctcataaagaaaggcaaattaaagcaagttatcattctcacctctcagatttgcaaagattaaaaggtctgataacagccagttggcagggtgtggggaaatagacacattcatatccggttagtaggagaaaaaaaaggccacaacttcattggaagacagttggtacagttggtagtctctatcaaaatagcaaatctccaggtcatttagccagctgtcaccttctagtgatttacctacaatcactaataaacgtcaacacgtgtacagcacatggtgaaacatgatgaaaatagtaataaaccatctctcacttggcttgagaagacctctatgatcttttttggtgaaaaaaacaaatttcagaaaacggtatacatagtatgatattattggcatctaaaaagatatgcatatataatcttgtgggtatgtttaaaatttctgaacttacttacaaacaggaataggaaatctaagaagaggggctcatgggagtggggaaggagatgtttattttttattttatatctttctgtatggatttcattttttaaagttagtatatattttaaaaaatctagttaaacagggtcaagtgcagtggctcatgcctgtaatcccagcactttgggaggccgaggtgggtggatcacctgaggtcaggagtcgagaccagcctgaccaatatggagaaaccccatctctactaaaaatacaaaattagctgggtgtggtggcacatgcctgtaatcccagctacttgagaggctgaggcaggataattgcttgaacctgggaggcagagtttgcggtgagccaagattgcgtgccattgcactccagcctgggcaacaagagcaaaactctgtctcaaaaaaaaaaaaaaaaaaaaaaaactctctctactaaaaatacaaaaattagccaagtgtgatggcaggagcttgtaatcccagttacttgagaggctgaggcaggagaattgcttgaacctgggaggcagaggttgcagtgagccgagatcgtgccactgcactccagcctgagtgacagagtgagactccgtctcaaaaaaaaaaaaaaaaatctagttaaacaaaacataccaataacatatgtaaatgctcagtggagtgcctgtacctgagggggtgagtgtgtggagcttctacactgaggcactggcttcattacagaggctggtcctgtctacagggctctacgggccaggygagccttccgggctcaggagaatcttaagtagcaaaatggggcaagattatggtgggtgagaacagaccagcagctttaagtaagagcctaagatccaaatagctttccctcgatctcctgacagccttctggcctcagcagccgatggattccatgggtgttagctgctgccagggtttcagcaggctgagggccaccgcagtgtgcccctctcccaaggtgctagcacttgacagcccccttttcctctcacaggttttaggaaagtgaaaagtaccttctcctcctcacattagagatgactgtgccaaaggaaggtagagcttctagaaagagaagagaatctgggattcctaggannnnnnnnnnnnnnnnnnnntcctaggaccttcttgttagaaacaaccccaagcacttgctctccagctgctggggcaaatccaggtctcggcaaggctggtggccaacccctgggagataatccacggggcatagtgtccaagaggatgaagccatttgggggtggcagggagctcagcgggaacgaggtgctgagtgatccctgcccctgacaggtggcccctctgcggctgggcctggctttccattcaccatgggccgctctgcttgggcccactggagtcgtgtttcttcttcaaacaccccctcttttttgttgtttttttgttttgttttgttttgttttgagacggagtctcactctgtcgccaggctggagtgaagtggcacattctcggctcactgcaacctccgcctcctgggttcaagtgattcttttgcctcagcctcccaagtagctgggactacaggtgtgcgccaccacgcccagctaatttttgtatttttagtagagatgggatttcaccatgttggccaggatggtctcaatctcttgaccttgtgatccacccatctcagcctcccaaagtgctgggattacaggcgtgagccaccgtgcctggcctgcaagcacccactcttsctctatcttcttggcagccgagaggttaagaaagcccctccatgtggcagactcctttagatcagatcctttagctgccgggtccccacctaaatgaccccccccaaccttttcctggtgctccctgagtgcagaagcagtgggggaataagagtgcctcagcccacgattgctggacgtcaggactcacctccatcttaagagaacggtcagctccgaaattcggagactttgtgtccagattcctcaagctgtgtcaggaagtcttgtcttttcagttaagaggaaacygggtcttcctgcatgggttctaataaagtctttgatctatttcaggtatcggaattgcgtttacacttacagaattctgcccaatgaagatgataaattcactgttcaggtgagtcctttataaacctagaaatctgaacctgacttcagccgatactggcagagaaagggtgtaaacgatgaggaaggaagtgcacgcgcaggtagccggacgtgaaggcctggctgagcctggcttcctcccaggtgtccatggggtggcttagctggtaaactggggccctccaagtgaccctgctctgtgacatgayggagttgcatgccacaggctatttgtggtccataggtgtgaagaggaaacgaaggtgaagcagactgtccagagatgaagggaaaggaggggctgtggcttggccgactgttgtcttcagtctctcaaaggagagagaggaagtggctcaggagggaragaagggaggtgaacttacaggagaacagaccgtgttttctgaggggctgcgagactagcacaaaacagtgcctttccatttgtagaactctgttctgtccgaggctggtgctcactgcatctgatttcaccaagcaaagtcaaaatgtgcaaaacttgcagttcattttttaatattttttatttttgagacagagtttcactcttgtcacccaggctggagtgcagtggcgccatgtcggctccctgcaacctccacctcccaggttcaagtgattcccctgcctcagtctccctagtagctgggattataggtgcccgccaccatgcccggctgatttttgtatttttggtacagatggggtttctccatgttggccaggctggtcttaaactcctgacagcgaatgatctgcccacctcggcctcccaaagttctgggattataggcatgagccaccccgccaggctgcagttaaatttaaaaacaaaaatcagctgcacccgtccaagcccggraaggccaccctaagcacggtttactaaaggctttgtttcgccacaaaatgtgacaactgagtgtgtggaagccaggaaagctattgttatctggctacatgaagagcacatggaggtggcaagaaggaaggagacaaagtttccacatcccgggtgtgtgtgtgtgtgtgtgtgtgcacgtgacagagagagagagagagagatgctcagttctcagggactagagtaagaggcacagcagtgcatccacgtcccaagcagagtagccggggtcgacaaaggtttggatatcatgtcatggaagagcaatgacggcgttggaggagtttgkttgaaaagaaagtggaagtgggaggggagaggcagggtacactcttcagtttcaaagcttgaagggaatgattcattttgtgctaactaggatgcagtagtagacagggagctggactcaaggtgtggggagaccacaggcaagtccctggaggcaaaaatcctccagaagttgtcaagagggagagcgtggtgagcagaacgcccctcaggaagacagcttatgaggatggaaggaattgcttygaggagcgatgtgattgagagaggcccaaggggcatgtgtgatgcagcccggtccaggggcatttgctgcgaggcctccttaggagatgcgagtttaggctcaagcagaaccactccctgcgtagttaggctggcattgctgccggctgcctcatcctcctgcccctgagtccactgcagcctctaaggcacatctgctgaaggctttccactggcctagggcgcccgcaggtttggcctggttcttagcagtcaccaggagcagatgttggcacacctagtacgagaaggtcctttccagcgcttggcagctatttgccatgggaatgtctgtctctgacaggggctcttcaccatgtgtgggatgtgagcagcggaggggagccctgtctggggcaggcagttggcctcaatgacctctaccatttttttcaagtctaggagggcatgagcttttctggcagagttggcatctgtgataggtggtttgctgagaggagtcggcaaactctcttaagttaaaagttggtcgatgcttttgatcttttttccctttgtggtttcttctcttccttcaaagtgaagaaaactttaagtatgactggaaaagacatgactctgtggcttctagtagagtcggcacccgccgcctgtaaatgtgtagactgcgtctccggtttgcccctctctgtcaccatcatactcttgctactgtgacatcttgtgaccctgggaactgctgatgaaatccggggcctcatcaggctactgggcagggggtggtggtggtgcagggaacagaaactcgccttggctgactctgtaaggggtaaggggtgggcagcctttgtggagatgtgcagagccaggaaggagaaggccgccctagggccttggaaccagaagagcatggggtctgcacgcagcttctcccgtggatcagctcttctctgtggggccgctcttcccagccagcagcctcccttctcagtccccagtcctaagaaggagtctgatggctcagcctccacggctttctccgcatgagccactcaggggctgccagtctgtgtatgaatcggctgtcttggagcaggtacccccctctgcctctcagagatggggacagagtcgtgggggcagcgtgcctccttaaggtctccgcttagccaggacagtgggcgggcagctttcagagaagatgggcggctctgctggacttctctgctcctgaccccggcactagatctgtgacctccgcagtagctgacatggtacagggagctgtggacctaggtggtctgaagaggttttccttcaaggtgaattaaaggggaattctcataggattctcccaggtggactcacctwygaaaatctacctccaagagtaaatgacagcagacgtccactgaggaccaagtgcacactcatgcccaattaagcagactcagagcccttcggggaagctttagcagttattgatctctgcctattttaactcaagttcctcttttcatgttgaggcaaaacctcacagtcttttctgagcttagccacagtttctaaataactcattcctgacacctgagcctgttcagtgccaccagaatacgaggctccccaaaataagaatctggcctgaaattttgccaagtgaagcaccgaaaggctttcattgtttcttagtttagtaactttagctcttttcctggggacttctgttctcttgtcaacaccaaagatctcatctttgttctttgcagaccaacttcatggagttggcccacgtgtcatagcccatgacagccctgtatcaatcagggagaggagctgcctcacctgggggactcttttctctcactccatctttcacagacttaaaaaaaatccgagatgggagggcaggatgcaaactgtaacttcatccaaccccctcgttctaaatatgagtgttgctgagaactgcggaagttggaactcacagccaggcctcccggcctccccggctaagctttcttccttccaatccagaaggtgtttccaagcctgtctggagtcccctggggaaggatgagcccaggactctgcccagagggacagggagacagggcaatgtggcctctcagagagcttggcctcttgcccttcacatggttatagataatatttgatcccaggtggcatctgtcccttgtggtaaatcagtgaggtgcccctagaatgaaagcagactccattcccggctgggatctgggttcaagtccaatttggtcagcgatgtggcyttgggcaaggactgccaagaaactgctggaaagtagagatcacacacatacctcccagcacaaggaagctgctggggaggagggtggagacagcagggagctggaggtgctttagagcattctaggcagtgctgggagtggtggggaaggaggggtaaattttggaactccatctccctcagctctgctctttgggctatgggcttcatgtcttcagggacctgagtacgctctggaactgttaagcagttgttcaacagctgctgtgccactcaaaccctgagaaccttctggactcagcttgcactgcttttcctggttgggggagggttggggcagtgctctgagccctgtgtgaggccagacgaaggcagaacggctcagccccgcaggcctgactgtcccacaccmagagagtgggtttcttgtaaagccaaaactcctttcttgacttggaaagggaagtgactctcccctaagagaagcggtgcctatcttgagctgctcgctgcagactgagctgggaggctgctgctgcctttgaaatggcccctctttgggaaagtaaggaagagtctgaggtcctgcaagccgccctcatgggccagctccagggtggccagggaggcctggagtggcctcagacgtgtcgcataaatggctgtctcaaacctagggccacagttgaagcaaaagaggcccttcgrctccaccctacaaccttttggcccttgcgtcctttctaacatccttcccaccgagaggaataaagcagaaaattagaactacccataatcccctatcacatcaatgttctctgtgaacttcctgtcttttcttgaggttgagattgtatctaggatattgattgtttcagtcaagatgggagcacccccaggtgtttttctgttttgttttgttttgtttttgagacagggtcttgttctgtagaccaggctggagtgcagtggcgcgacctcggctcactgcaactctgctcccaggctcaagcaattctcccacctcagtctcctgagtagctgagattacaggtgtgcaccactatgcccagctaaattttgtatttttctgtagagatagggtttcactatgttrcccaggctggtctcaaacgcctgggctcaagtgatccacccgcctcagcctcccaaagtgttgggattacaggcgtgagccaccatgcccagccacactcccaggttttcatgcaagtttagatgaagagttagaaaatatctatctcatagaccctttcattattctttcccgatttggaagaaaaaatccagtggtctgagccattccggtgagttctaaagaagagacacttgtgactcaagtccctggtccctgacggtggctgtcacgtatctccgggcracatggcttttggagagggaaaacaaaacaactttctaaaagctgttccgtcacaagcatccgggaggtgaacggttgagccattgttattaagctcaggaagcgagtggcagctgttattgttctgagtggtcactgagtgaagtaaagattccgtctgagccgccgggcaaaggatgtggctctaacacacttcctgaagttgcacaacaaggggcacagaaaaggttcagggcatagaagcctagcacggccagggctgccctgtgtgggctccacagccatgccaaggacaatgggccccaagggggtccgtgctggtggaggggttcctttatgctctgacactcaccttctagaagcctgcattttgaattggtttttctgtctactgcagaatatggacagatctattttccaagcctctgaatatctcaaaacatctttagttgtctacacattcaagagtaatttgatagatataaaattcttggaaccaactgttcgctcaaaatcctgtaaaaggtacagcactaccttcaagaatgtagtgttacaggctgggtgcagtggctcactcctgtaatcccagcactttgggaggctgaggcaggtggatcacctgaggtcaggagtttgggactagcctgggcaacatggtgaaaccccgtctctactaaaaatgcaaaacttagtcgggtgtggtggtgcatgcccgtagtcacagnnnnnnnnnnnnnnnnnnnnnnnnnnnnnnnnnnnnnnnnnnnnnnnnnnnnnnnnnnnnnnnnnnnnnnnnnnnnnnnnnnnnnnnnnnnnnnnnnnnnnnnnnnnnnnnnnnnnnnnnnnnnnnnnnnnnnnnnnnnnnnnnnnnnnnnnnnnnnnnnnnnnnnnnnnnnnnnnnnnnnnnnnnaaaagaatgtagcgttatgaatagttccgagtacaaaatccaaggccaaacttgtgctggttcctatagaggcgacccatttttttctttttttctactttgaagccggtgggaattcttttccagtgttgtcattttcctttcattgatagtacctgmaatgtgttcggcttgttcactttgcaaactctgttctttgacacaaaagacctttcttctgttaggtctttgagtaagtttttattccagctcttctggcatctttcttctaatcccctgagaaagccaagcctccccccgttttctagccccctggggtacacatgcctttgtgactgagcagcccctccctcttgtgtggctgcaagatccctaatcccttccccagtctgtcagagaattctggaaagagtatccatgccatttgtcatctctacctccaaatgactgtctttattttctccccatccccactagccattttgtccttgtttctccatgttccagagccttctggttcaccttgccccagatcatgggcctgtttcctgtctttgttacccaaagcggtctagaactaacatcaacatgcaccatgtagccgataagtttagactggggaatgrgatgcaagtgtaaccaatgagatgtgaagagaagggctttgtgggcttctagtaaaggtctgtttgtcttaaaaacagacatagggataagatagcctctttctttctttctttctttctttctttctttctttctttctttctttctttctttctttctttctttctttcctttttgagacagagtttcgctcttgttgcccagggtggagggcaatggcatgatctcggctcaccacaacctccgcctcctgggttcaagtgattctcctgcctcagcctcccaagtagctgggattacaggcacctgccaccatgccgggctaatttttgtatttttagaagagatgggacttcactatgttggtcaggctggtctcgaactcctgacctcaggtaatctgctcgccttggcctcccaaagtgctgggattacaggtgtgagccaccgcacccagccaagatagcctctttcctacctttggaagctgccataggatgtgatagctgggtctctgctgctgccttgtaaccatgaggagaggtagctggcgagtgaggccaacacacggaaaggagaagtgaacctgggtcctggatgatgcccttgaatttgctgaacagaatgaagcaacctgggatctgccctgcctctagattttctgttttgtgagttaattaatttctttttgctcaagttagttgagttagggttttctaacagctaaaagtgtcctaacttacaaaggtttaaactatcccaggggaatttcaaagcagaaaagtgaaaatttcaaattgaatatcgagtttcactgcaccaaatgcccatgagccacggtctgacaacacagtctctgggtcttccttctccttagcctgtgtcgtgtttctgggacctgctccagccctgtcccagacattcctaatgacttatgttcctgtcagacatccttgggctcaacatctctttctctaaccctgaccagaaaaagcacaaaaatcaatcagtattttaacaatgtctgtgcactggggaggcatgatttcttgcttattgcaggatggtttcgcttctcatcttgactttgcccttcgagatcagcttccgggtctaattgtgtctgtcagatttgcaagaggccacttcgggtttgccaaatagaagaaagtctttctgagaggcctcacttgatcaccccagaaaaatagtcaccccacccttcacctgttgctctttaaccccttaccctcctttcttttctttgtggcacttgtgactacctgattttatattatatttatttatttatttatttttttgagacggagtctcactctgtcaccaggctggagtgcagtggcacaatctcggctcagctcactgcaacccctgcctcccgggttgaagtgattctcctgcctcagcctcccgagtagctgggactacaggcacatgccaccacacccagctaatttttgtgtttttagtagagacagggtttcaccatgttgcccaggatggtctcgacctcttgaccttgtgatctgcccgcctcagcctcccaaagtgctgggattacaggtgtgagccaccatgcccagccctgaggtatttgaaaatatacatttttatattgacttatttatcatctatactagaactattcctagcatgtagtgagtgcttgataaatacttattgaatgaattaactcttctgccaccattaagaagatagaaagtgctacaggtttcacttaaaattatgatttatctcacccttgctgtagtcatcaatcttaaatttgtcctccacaggatccgccgttatctattgacttgcttttcatgccttggtcaacttcctctgcattcgagacgggttctcttttctggactcagttctgctgtagctccctccaaagtggatcctcatttcagcattgaattgagctcctcattttttttttcttgagacagtgtctcgctctagcccccatgctggagtgcaatggcaagatctcggctcactgcaaactctgcctcctggattcaagcgattctcctgcctcagccttccaagtagctgggattacagccatgcaccaccacccccsactaattttttgtatttttagtagagacggagtttcatcatgttggccaggctggtctcaaacttctgaccttgtgatctgcccgcctcagcctcccaaagtgctgggattacaggcatgagccaccagccccgccaaggttctcattttgttgcaagcctgccttgcctggctgatcttcatgtttcactggccctgttgtctgttcatctttctcctcttcctgggattttcactcctgggtcataaaggccttgccttttgacgtccacgtgaggctgccgatgcttcccgagatgtcccgagacaagttccagcagccacatttccagagaaggctcttcctcgggtcttcagggtggtgtaatgtcctagttccctcggggaagcagtttcttctctcaagcttctgtttcctcctcagaaacagtgggaggccagcagtacttctctcctgtggagattttgaggactaaaagagatggtttatgtaaacatgcagctcatgtctgacacgtgactccatggatgactgttttaaaatggcgaggacgcacagaggccagtcagctcgctgacaccaacatggggtcaccgggcagaggccccggcccatgactggccaagagctggggacaccaggcacaggggaaggagaaagggctgagactttgggacacaaaaaactcaggtgtcctgggattgacagcaaggccatccaaaggggccttggagaggaggacaagtgcctggaaatcctgactgcccgatcggggcccaggcgcgagggtcatggaggacagaggcaccaagtagggmccctagaccctgtctgccttgggatcctctgagaactgagaactgtaacagcattacagccgtatgtcccgactatattccttaagggtcaggggttgtcctgtgcctgctcactgggcatacgtcactgctgctttggataactgaggaagacagaggcggggtgagggcgagggtggatgcctggggtcccaaccaggtgacaagagagagccttgaggacacgggagggaccagcgggaggccccacaactcccacctggggcctatcttrtcatccctttctggcctggttgccttttgttgagcccctgtcaggagctaggcacttcatccgtgttctttaatcctggggaagggtttactactattgttgctatgatcactattcccatttttaaattcaaggaaacaaaggctcagatgagataacactgtttgcctgtttcataaaacttgtgacagaagagggatgtcattggagccatgctgtggctctgtgccctgcagcctggggcgctgggctggagggtgagcttcacacaaaggctactggcctttgtttctccaaccactggaggttccccagctatgtatggaaccagctaagggctttgcagtatttgagtcatgatccttcctgaatgagacccaagatgactctacttttaagccaagtccagtgagcgttatagccgtatgtcctgactatattccttgagggtcagaatgacagcttagagattcccggcagctcattcatttattcagtgaatattaattgggaactgaacaacagccaccctcaaagtccctccttcataggatgttcggtctagagaccaatgacaagcaattttcaagattagactctgaaccccagatttttacatcttgagggagaagcgtctcaggaaacttctacagtgcaaggagctcccctcaagtgggaggaaatgaatggcccagccatgccttccaaagaaccctctgagaggcgcccagtccctcttctgtgcttccaaacaatccccccgcccagcgtccacatcctcgcattgtggggtggtaggcgacccggtgtctgtctcccccagtgagctgtggaggccttgagaacaagggtctcagtcgcccgagtgtctgcccttgggcacaggacagaggatgcgtcgccatcccctgaatgaaaggcccagctggacctggcttgagaagaggcttctattgaccactcagtgcccacaaaacctttgaggttaactttagtctgccctgttcttagcagactgtatttcattttgagcaaccccaggagaggaaaatccaaatttctctctcaaatattgaattaatccatacatgagcagttagtgatttttataaagagattcgccatggaagagtacttctttcatttctgctcttcctggcttgtctgagtcaagagaccctgccaggctggtggccatcaggatgcccaacccatctcccccccatatttatgcccttcatgactggcaggaaaaaggatctgaaatcttgaaatggagaaatgtgttttccaaaatccaaacatctcacaaatatatgctatgaagaccctaaaaagagttctcagcgccctcacacagacacaaggacagaacatgagaacatagtcccagcctttaaagagagaaaacggacattccaacaagcagattcaaagtcacttggggtcgggcacggtggctcatgcctgtaatcccagcactttgggaggccaaggcaggtggatcacctgaggtcaggagttcgagaccagcctggccaacatggcaaaaccccatctctactaaaaatacaaaaatagccgggtgtgatggtgcacacctgtaatcccagctacccaggaggctgagggaagaagaattgctgtaacctgggaggcagaggctgtagtgagctgagatcgcgccacaacactctggcctgggtgacaagagcaaaattccgtctcaaagaaaaaaaaaaaaaaaagaagtaacttggaagtctacaagaaagataccacyggctgcttgggaaaccagacaatagaactgctttctcccctgacgaaggtgctggggagatacttactcttatgacactaaactccttcctgccccagggtcttggcacctgccctgccttgtgcttgggactccgtccctcaggtcactatgtggctgactggccaacaggattcctccaaggccttttcccaggtcttcccatctaatatcatgccctgtcccatagccgctccttatagcactcctgttttttcttcatagcccttatcgctgtctgcaaggggatttgtctccattgccactataacaaatttcagcaaacagaggggtttaaaacaacacaatttattatcttgcagttgtgcaggccagaagtccagaagctctcactgggctcaggtcaaggtgttggcagagctgagctccttccagaggcttcaggggaaaatccctgttcttgccttttctggtttctaggggtcacctgcattccttggctcatggcccattcctctgtcttcagaaccagtaatggcccatcaagtctttctcataatgccgtttctagggctctgactctctgcctccctcttccccttatgaggactcttgaacgtagattgggaacagctgaataattcaggatcctctcccaacctcgaggccagcacatgagcaaccttatctccctyaggccatggtacataacagccacaggttccagggataaggagggcttgggaggcggaggccgttattttttctaccgcagcaactatcttgattctgtattgactcactcatttattatctgtctccaccacgaggatgtaagactcacgagagccaagaccttgtccatcttgctctccactgtctctgtagcaccagaaggatgcctggcacagagtaggtgctcagtaaacatttgctgcatgattgaatgaaggagtaaatttgcaatacaaacaaagtgggaaaggccaaggagggaaggagagtggagacccccaaagctttcctgttccgaaattatctgattcattctacaagattagcaaagcctcccaagatgtaggcgttcagggccaatgtttcataatcagctctgcgaggttggcgctgggtctgggatgaggcaggcgggcggccggagtgactgggggcccgagctgccaggcttatcagggagccgtcccaggctctgccccctcaggcagcttctctccaggctgctcccagggctggggactctgggctggtctgccagctgtcacttctgtcttccccagagtacctcaagagttttacgaaaagaaaagaagcaagctggaaagaagagcgtctcagggatatgtaattaaggataaaaatatccctcataggctctgggcaatggggaaaatggagattgcttgccttcctgggcccagtggaaccatgagggcttttgaaacataatgattagggcaggtttttagcattgatgagcctgtgcaatgatgaatgccatctatacgggtgtgwggtaccaaaagatgtgtggttaaattctcgaaggggaggagtttaaatggagctgcatgtaaatacaggacctttgcttggggtgagaaggaaaggggaaatggaaatagcaaggggaygagcttccttaattgcatgtggcagaaggaaacggcaatttcaaaggcaaacattgaacgtgggaggtggaggaggccttggatgctcccaacagcatccctttatccctcaatctcccgtcccttcttccatcttgagacaggccaaggagccccaggcccatcactgtcagtggctcccacgtagccaggggtgctcccaccccagcccccagcacccctacagccatcttcattcctcagccccacctgacacgttgcccctgacagggcttagtagatttccgctggatgaaaaaggcatgggtgaaagaatcttgactctaagataaaaatggttacccaggaagaaacagaaagagaaattaaagaatgtgtcttgagagaaatggaacaataagcagacttcaacctgagggctttgtgaagtcagggtctccttcacgtggtctgaygggccactgcattcctctcttgtctaatctttcttttctttttttggacagagaaggattacggcagattaatattgataatttctgctttttctcttagggcagtagtgagggtgaggaagttcaaattgaaaatacaaaacagaagtaaaatcccctgacatggaaataagccttccttcttgggaaactatcagtgtagatatgtttctctaaaatgtaactttagagtctggaatatatttgacatcttaaaaatggtcttcaagactttatggtaaggccaggtgcagtggctcatgcctgtaatttcagcactttgggaggctgaggcaggcagatcatttgaggtcaggagttcaagaccagcctggccaacatggtgaaactctgtctctgtctaattcaaaaattagccaggcatggtggcgagtgcctataatcccagctactcaggaggctaaggcatgagaatcgcttgaacttgggaggctgaggttgcagtgagctgagatcacgtcactgcacactccagtctgggcgacagagtgagacactgtctccaaaaaaaaaaaaaaaagactttatgttaagctcatcaagtgttcaatgaggcatttgttagagatggtagagatggacagtcttcaattttggggtgaaaagatttgcaaaaatttgtcaataataatgtgatgacgtccagagctggtcccaccactggctctctcctgccacctgcccagtggtggcttcaggccacactcccttggcagaagaacacgctatgcatgcctcctgagcacccttcttctgcctcctggcccgttttccctgtgcttctccctggagtctgagaaasagatgttgccgtggtcccctgcctggtagagcccaagagattctctacagctgtgctggccagtgctgcagccacaggccacatggggtcacagagcacttagaatacaccccctccccccccaaaaaagagaatgtcctatatctcatgataattttattgcacattgaaatcttaatattttggatatattgggttaaataaaatacattcatcaaattgattttatcccgatgtttaaaaactcccaggctgggtatggtggctcatgcttgtaatcccagcactttgggaggccaaggcaggcagatcacttgaggtcaggagttcgagaccagactgaccaacatggtgaaaccccgtctctactaaaattacaaaaattagccgggcttagtggtgcatgcctgtagtcccagctactccggagggtgaggcaggagaaatgcttgatcccggcaggtagaggttgcagtgagctgagattgccccactgcactccagcttgggcaatagagcaagactccatcycaaaaaaaaaaaaaaaaaaaaaaaaaaaaaaaaaaaattctaaaatctggctgctrgaaaatttaaaattgtatataaggctcacattacattttcactgggcatcattgctctagaaccttgctgctcagagtctggtccacaggccagcagatcagcatcacctggragcttgttagaaatgtggacaatcaggtcccagacccgggaattcagaatcagcrtttgaacaagatccccaggtgatcctgatgcacattagggtttgaagaccatgtgtgggttgggggaatggcagtcagtctcactcaccacgggagggagtgcaaatgccgacaaatgctctggagggcaaattgccaatgtctatcaacatccgtaatgtctggrtgcagtgaggaatgttctcccacccctaatttgtccaacaagtcacatggacaaagatatatatacgaggacacccactgcagcattatttcaaataggggtcaaagaagaatcctaacaaacaacctcatgttgcctaggttagcattcaacctaaccatgatgaagagggaactgcttaaatacactgtggtccagccaatggaagactatgcagctgcttaaaaaattaaagtagagctgtgtgtaatgagttggaaagatttcaaacattaataaaaaagttgcagggtgatattgttgtaggatagtttttggtttttgtttaagggatagattatatacacaagattgcacatacataagagtgttgagatagaacttgtattttagagatagggtctcactgtgttgcccaggctgttcttaaacttctgggcttggccaggcgcagtggcccacgcctgtaatcccagcactttgggagaccgaggcgggtggatcacctgagctcaggagttcgagaccagcctggccaacgtggtaaaaccccatctctactaaaaatacaaaaattagctggagggggtggtggtgggcacctgtaatcccagctacttgggaggctgaggcaggagaatcgcctgaacctgggaggcagaggtygcagtgaaccgagccaytggactccagcctaggcaacaagattgaaactgtctcaaaaaaaaaaaacaactcctgggctcaagcaatcctcccaccttggcttcccaaaatggagatagaacttttaaaataatttttttttacatttaaaagttatatctcagcttggtcaaaaaaaattaaaacagtaccaaaggaaatacataggaaatagagatccccttctcctattggtaaccctaatgtcctgcaaatcccccaccctagtcccactgttgacagtttctcagatactgttttcawatgttttatatatttatatttgtttttgtaaataggataataccgtatacactgttctgcgatttgctttcttcccttagcaatctgtccgtgagatggatccaagttcattcatgcatcttttgtgctttttaacagttgaacgataatggatggatacatagatgattttcttttttgttgttctcactacaaaagacagatgctacaataagcaaggcttgcttgtgactgtgcatacaagctttctccaagaaaaactattactgggttgaaggaatgcgtatatgattgtaaaatactgccaaactgctttgcccggggctcttccgagtgaccttctcacccagtgtctcttggtcctcatgatgctcacacatctcaattctggacattaccagtgcctgtaattttcagcagacaatgagtgaaatatgtgatcgcaatattttattttgcatttctctcattagaaatgacactaatgacccaggcgtggtggttcatgcctataatcccagcactttggaaggcagagctgggcggatcaccagaggtcagaagttcragaccagcctggccaacatggtgaaatgccaactctactaaaaatacaaaaattagccaggcgtggtggcgcatgcctgtaaccccagctactcaggaggctgaggcaggagaatcacttgaacctgggaggcggaggttgcagcgagccgagatcacaccactgcactccagcctgggtgacagagtgagatcccatctcaaaagaaatgacactgagcctattttcatatatgcattcaccatttgtgtttcttttcctgtcaattgcctatttatattctttttccattttttcctttttaaaaatatttctgattttaaaaaccctttatatgttttgtatattaattttgggggtaagttatatgaaaatattttctccagcctgcaatgtttttaaacattgtttatggtgcgttttgtcatgtggaagtttaaaaccattaggtagtcaaatgttttcatttacggattctgagttttgtgaatcacccatcccaatattatttatttagggaaaatactattttcttctaacaatttttaatgtgtttttatgtttagctctttatttatttttatgtttggtataaaatagggactataacttcacagtccaaatggatagccaacaccgtattaaatagcccatccttttcccattgattcacaatgccattatatcatgtgctaatttcccccatagtcctaatctgatttgaaacgcctcctcctgttccattgatagattaatctactcttgacccagctgcataggtttaatcrmggtggctttcttgtgtgtttccttatctggcagactaagttcccatttattattctcattagtccttgcttgccatgcattttcttttccaggtgawttttaaaatcagcttgtcaagttctctgaaaaaatcccagttrgaattttgtgcaattacatgtaattaataggttaatttataaataacttatgttcttataacatcaagtccttcaatttgagatcatggtttctctctccatttattcagcttttcttttatatcttttttctgctttctccatatagttcttaaacctgctctgttactgagtgtgatgtagctttaattacctttgcaaacagaatcttccttttccatcatgacattttctggttaggttttgtgggtatctaggaaagtgatagtttcggtagggtactcttaaatatctgtctgaattctcttattcattttaatmgtttctgaatttattcttttggcttccctaggtaaatgatcttgttttgtgcaaataatggcagacagtctgttccttccaatgcaactcatttagggacagggaagttgttctgatctgttttgtgctggctgggacccaccgtgcaatgctgcagatcagtggcatggtgcttttggttgtctcatttctttttttttttttgagacagagtctcactctgtcgcctaggctggagtgcagtggcgcgatctcggtcactgcaacctgcacctcccaggttcgagcaattctcccacctcagcctcctgagtagctgggatgacaggcatgcgccaccatgcctggctaaattttgtattttaagtagatttaaaatacagggtttcaccatgttggccaggctgatttcgaactcgtgaccttaagtgatccacctgcctcagcctcccaaagtgctggggtcacagggatgagccaccgcacccggccttggttgtctcacttccgatttccaaggatgtttctgctccaggaggaggatgcaagtcaaagacaaggagtgcgacaggagtgctgggagatgggcactcaccgaatggtgcccaaatgggaccagcaccgtggatgggagctggaaaacttagccagtggtgagccacagggtcttctgagccagcccaacccactgtgaggctcctctttggtgagacgtggtgctggaggcgtggtcagggccagacaccaggaaactctcaggccacaacctgtatatctctagatagttctggtcttctttaatgtgttccttgaatagagcagaaatcggcctcctataacatccactcctggatcccggttctcccctcaggagatacatggaagcctcaactgtttgaaaaaccaggcaggtctctcttgaggtttcttcaggccaaaccctctgggttacttcagccattccgcacgcccctcttaaccccaggccatcccagatccacctcccatgacacactcaacctggtgcctgtccttcctaatgggggtctcagaacccaaggcctgcagagtggactgaccctcccaccgggcgcccctccacgagtgcagtctcacagacagtggcaccagggggcgcccattcagcgatccagcttcacaatgtatttgccatcgactaaaatgccatcgtctttttcacatgtgctcctgctaagctagatttggaactttatttttatttatttatttatttatttatttatttatttatttttgagacagagtctcactctgtcgtccaggctggagggcagtggtgcgatcttggctcactgcaacgtccgcctccttgttcaagcaattcttctgcctcagcctccggagtagytgggattayaagtgtgcgtcaccatgtctggctaatttttgtatttatagtagaggcgaggttttgctatgttggccaggctggtctcgaactcctgacctcaggtgattcacccaccttggcctcccaaagtgctgggatcacacgtgtgagccaccgtgcccagccgagacttgsaactttagattgttttgtcctaaacttcccatggctacaccagcccgttactccagaccattgaggtcagcttcatcctggctctagcacctggcatgtgtgccatcctcctagctggatggcagccccacattggaaggcctgcctcctggatccttatctgaattgctgatgtgaatgaaaggaggaaccaacagcacagacgcctatgtctggactgacactggtgtggcctcagccaggcccatctctctccctgtgctcttcaacaacaacaaaatcacaaatgaaccccataaaatgctttatggaaacctatagatatcagattaaagatcacaatctggtggcccctatgttggatttagtgttctgttcacccaacccatatttttaaaaattatgaaccagttacaagcatttttaaaaattcagagatttctacataataatctggattttcagctttccttgaaaaatctgaagatctgatacccttgattattccacagtgatgtagctggggtggggcgtgtattagtctgttttcacgcagctgataaagacatacctaagactgggcaacttacaaaagaaagaggtttaatggactcacagttccacgtggctggggaggccttacaatcatggcggaaggtgaarggcacatctcatgtggcagacaagagaagaatgagcttgtgcagtcaaactcccatttctaaagccatcagatctcatgagacccattcactatcacgagaacagagccgccataattcaatcacctcccaccgggttcctcccacgacacgtgggaattgtgggagttacaattcaagatgagatttgggtggggacacagtcaaaccatatcagagtggaagcattccctttcaatggggcagttctctttgatgtgtcaccatccccacctcgccctgtcgcctcactcgcagcctgttccactcatttacatcacccgcctgactgctgtaggccactgagctatgatattcatcagacgcaactaattacccaacttgtgaggccagcaaccacacactggtaaacaggtttagttgacttggtgtgttcccagtgacctcctgctggttcccaggcccagcacctgctttgcctctcctcacagatcatgctgttagtaatctcatctagcctcttgcctggggtggacgtcaagctcactacactgtaaactccaaaacagcccacgttactcccggtgacaatcagaattccccctggcctgccctcaggtgtcctggctctctcctctcagcatcccccatggactcatgggcacccccggttgagctcgctcacccagagctctctctcttccctgggatgaggcttggttctacggaagctggggtcgtcacagcctgttttctgccttggggtttggtcccagttcctcagagcagtgactttcagttcctttgcaggtgtgacctgtctgctcctgttagagcctcctttccccagagggcagggtgggccccactggggagctggagggctcacttttgtcactgcacttgccacccagaacactgttactgtccctttctggcatttcttggtttcagacaatctcacctacccctcaaagaaggcggaagcttcctgtcgtggtctggccctttgccatctttcagtgttcctcactgaacggtaatcccctccgtgtgcccccaacgagtcattcaccatcttgtgctaactgcatttcttcctgatccaaacttgctttctggagatgggggccatgcagaagggaaggcgggtgtatcaggaggtctggtctctggggactgaagggatgattttgccaaaagggtcaatgtcactggaccacatgccatggtaaaccttggacaaccagttctccagggaagaaaacaagcccgtgatttgtagtgtttgcctatttctaccgtggagacactctaaccacagctcccaccagagtggctgcattcacaaccagctcttggggttcctggaaaactgggatttgagcctgtaggagccagtgccagcaccccatgggcatgtgtgttatcagctcacatctgccaagtcctggcgaggtctgcctgcctctaggactgtagacgtctttattagagactcctgtcacacctgttaggagtcagacagattaataatcacttctttttatttagagctcttttaatccccaaactcttatttataagttattttataaattaataatgatatatcatatattatattataattaataatgacatatatgtcatataacattattaaaatcaattaattattaaataattataatatataattatatattatattattattaaatatataacatataatagatattatatattacatattatataagtagtaattgcatattatataaataatatatattatatataatataaatatatttatttattataaattatatttatttatattatatttataattacattatattatattaacttatttataagttaatcagttttacctcttccttgtgatcaggtttgggaaggatgttttttctacctgcctggtctgcttccttgactgtgtgatcagggtcaaactgcccattcttctgagcttcagtttatttatctgagaaatgggagttgctggtccattagcacagttagcagagcaggtgctgcatgatgaccgtggctctcactgactgggagccacgccccgggctctgttagttcgttaaaccacttgggcaagtaggtcttgaaatcttcattcacggccaaggaaactggtttggtctcagagagttagatactgtactctagatcgcacaaccagttggtcgtggagctaagattgacattcgtagctgacatggtgttttaaaacttagtcacaaacattaaaaaatcggagatttcatctaggaatctggacttttaccttctgaaaaatttaaaattctagcacccaaggcctgtgttaccccatgatgctgtaactggagctaactggaagctgctgcctttgaaggggtgtttcccccatgggccccagtccccgcctctccctagtgtcccacacctcgcctgcttcactcacaccaagtttcacatttcgtgattttccccatgggccagaatgagaggaagaaactgaggcacagaatgttttggcaattaattcagctcaaatcagagaagccacagcagagctaagaaccggtctttcatagtcaggctatgtgatcaaaaccacagcgcctcggtggctcacgcctgtaatcccagcactttgagaggccgaggcgggcagatcacaaggtcaggagatcgagaccatcctggctaacacagtgaaaccccgtctctactaaaaatgcaaaaaaaattagctggacgtggtggcgggcgcctgtagtcccagctactcgggaggctgaggcaggagaatggcatgaacccgggaagcggagcttgcagtgagcccagatcacgccactgcactccagcctgggcgacagagcaagactccgtctcaaaaaaaaaaaaaaacaaccaaaaaaccacagcgccttctcactacaaagccatgactttacaaactgttttaatcccttctgtccccatattgcactttgtataacactccccttcctaggaaaccatttgaatgggtgtctttttatttgaatatgttcttacaaaacactattgttgtcttgggtgcatgcattttaaattgactgaagtcatatcatagctttcattctgtgttcccccttttcaccaaaggatcttccatgctgctgcgtgcacagcaagctcttgcttctggctgctgcaaaacaccccatgtatgccttgaccacactacttgtccactgtcccagtgatgggcatccaggttccctgcaaatctctgctgcacaaagaatgacaacccatataggtgggttgtcaaagtgagccctggggtatatgcccaggagtgaagttgctgggtcatagcatatgctcatatttaatttgcctaaattgtacctgattattctccacaatggctgtcctggtctatgttcctgggtttctctatccagcacagatgttgagagagacgggagggctttgcaccagtaactaggcccttggaatggagctcaaggcaggcttgcctcatgtcaaaggcaccagaacacacaggcagagagattggagaacggcaatctttcagagtccaggagcgtagaacttagaggaaggaacctgagatctgggttcaagtcctgcctctgccacttccagggcaagtcacttggcccttctgtatcctggctgcctgccgagggggtgatctgcccagtgctagggtgttctctcagaaaagtagttctttttttttttttttttttttggagacagagacttgctgtgttgcccaggctggagtgtggtggcatgatctcggctcactgcaacctctacctcccaggttcaagcaattctcctgcctcagcctcccgagtagctgggattacaggcatgtaccaccatgcctggcttatttttgtgtttttagtagagatggggtttcaccatgttggccaggctggtctcgaactcctgacctcaaatgatccaccygcctccgcctcccaaagtgctgggattactggtgtgagccactgtgccctgccttttttttttttttttttttttgagacatagtcttgctctgtcgcccaggctggagtgtagtggtgtaatcttggctcactgcaacctctgcctcccagkttcaagtgattctcctgcctcagcctctcaagtagctgggattacaggtgcgcaccaccacacctggctaatttttgtatttttagtagagatgggatttcaccatgttggccaggctggtcttgaactcttaacctcaagtgatctgcctgccttgccccatttctttatctgtaaaataggaagactaacagaaacttaagtgaagctgtttgagtactcaaaaaatattcatccttttcttcattcatttccaacactgaggtaaatgcacaatgcatttcatcttcaatgctgaggcttctttgcatgctcggtcacacttagggcaccctggtatcccctctagctggttcagggactcacgggacagaggccctgctaaagagcaggatttgggactgatcagggcaaacagaaggtgaggtcggaagtgtgctgaagccatggggggtaggctcagggagggatggtcgtggtcctcatgggccatggttggggaggaagaggaagaggaagctaaggttttcatgtctgatcagctcttctataaagttggggggtccaaattctttcccagtgctgagaggcttgagttgaggacttgacggtgaatcgtttggtcagctgttgaggacaggcttgagatggacaagtgcaaggattgattttgagagctgaccgccataggtcaggttcttccagaagcagatcctaggccttggtaccagtaattcatgaaagaagggctcccaggagaaaccagtaagggagtgggggacaaaggacagggaagagggggaaaccaggtgtggtttcaggtgaagtctcacctctggcctgatctcacaggagctgtggagtataaattgcacctccaaatttgtcccacagggaggcaagaaactgggcttttgcacatgtactccaggcccccattggctgtcttgggtagggatagggaatgtggacctcccgggtttctcctggatttccccataggtgaggtggttccagtgcccaagggcagtcgtctgaggcaccaggcttaggtctttggcagcaaagcaacrgagcccccagaagtggggatgggagcaggggggcggtcagtgggtcccagggaactgggtaggacagcagctgcgctctctgtaagaacctggctatggttggaaaccgtcatttctatctacacctgtgctttgccagtgccgctcccttcgcccgccagggtgctccctgtctctttgccccaccacctcctattcacctgaagtaggagcatctcagctgcagagtagcttctttggtgaatccttccctgatccaccaggctgagtctcccggagcaccctcccaagctactgtcctctcttcacaagcctctgcacctggtcatattttcttagttgtttatggttctgtgtcttgctcctttgctggactgtgggcagggcctgggtctgtgttggtccctgatgccgggggctgagccggggggaagagagccagaggggaagggaagggtaagagggtagtgaccgcaagcgggccgcctgctggctgctgcaccaccagctctgctttccttcagccctgcccagggcagcaggtgatcgtggggcggatcttgacgagtagcttcgaggacaggggccacaggaggacaggctgccagcaagtggagggtgccagggagagagtggctctggggggccacagtggggttctggcttgttggagagatggtggggtccaaagaggcccgaaggcctgcacaggggatgagatgaagggacagtggccactgggaggtcagagagcagtcgctatgggaatgagcatgtggaacttgacgatttgtccctattggcagatactgatgataaaacaagttgtgtgacattggacaagttgccttatctctcgcagcctcagcttccccatgggttaatgaagataagtatgtcatgaagtttcaataagaggaagaccccgggggaaagtttatttttcccaccacacttgtatctgtcagtgtttgctgcataacaaacagcctcaaatctcaatacttaatgacagcaaacattgactttccactcctgggtctgcaggtctgctgtggttggctaatctagttgggctgtcttggactcagctgaaccaggctggactccaggtttctaatcatgtccaggtctgtgcctaacatcctcattcctgggccaggctgaagggctggagttttcctggccatcctttcttatggcagattgcaggggcccaggagggcgagtagaaactcaatgtgcccttaaagccctcagctcagaactggtgcttttgcccacattgcactggcttggccagagtcatgtggccaagcccaacatcagtggggcagagacacagattcatcacgctctagtgcaaggtgctacaaggacgtggctgcaaagccctgcagcagggaagggcccttctgccacagcacccctcctcctcctctgggcttctccagtgcacctaagctcttggagaaagtgcagaaacctttcccatagtgaactgaaaagctcactgtgatgccaggtatgaggcacagtttctagctgtcagctgtgactctagtgatcaaggacgcatcctgtcctggattcttaattgtggacctgagtttcccagatgagggttccaccatccaaatacccagagcacctgctgatggagagcattgtcatccttgtccccttgctctgatcctggtgacattaacagagacttcagagctgtcatttcagtatcagccaaagctgtcaattttccagccctccatcctgagctcctttgatgtgaggggttcaaagcactttctaagctgcttgaatcttcaaggaaagcatgggcctgactcccatggcacagatactagggagtgaatggcagagatttggggacctgatgatctcaacatcccagtgggaatcccagctcatgggggataaggcctaagtggatgcccatgtctgagagttgacctggcatgagggtttccccagcagagggtgcggtaggcagggctgctggtgggtaggcagggggtaggcagggacccagcctggggaggatggcctgattccacaaggagctgtggagtgtaaattacacctccaagtttgtcctgcagggaggcaagaaactgggcttttacatgtgtactccaggcccccattggctatcttgggtgggcacagggaatgtagacctcccaggtttctcctagatctccccatgggcaaggtggctccagtgctcaaaggcagttgtctgaggcaacaggctcaggtctttcacagcaaagagggtgttggctatgaactcagagaaaggggtgatttagaagggagtgcagagactgctggggagtggggcaaagcccatgccaggtgattctgggaagtctgcccaaaacaaggcgagaggaatgtcgaagaacctagcttcaggaagttggggctggttggaatgaagtagttgggagaagatagaacccagctccactagtgccagggccccccagccctggacagcaagggcctgggggaggggttacaacctggtgcttgccggggagctgggaagaaccgggtgtctggggtgggagtcakgatgtccctgctggccccagctggcgggtggttggagacagggtgggtgcttgggctcagtcttcgctttccttcccttaagcttgggcctcttccccagcgctgccacggcactcccttctgcacactgagattctgaccgagactggcattggcttttacccttttcaagtctccagacatgtggtttgggaccatgcctgggagaggccagtggcggctggaccttgcccagagatagccagtgccagtttcccccctcccacctctcagtccaccatagccccagggggcggacctcctgtcctccaggaggtagacgccccaaatgccaggtttcacaccaccctacccacccactgagcccgagtggcttgcgtctgccacagcgtctctgactgccttctctgccctgggctggcagccccctggctctgtgcctgtcctcctccgggatctcactatcatccagctagagagtccggggatcccccacccaccacctccaacccctttctcatctctctcatctggaaatgtcccctgggatgctgctcttctgacagcatctctgaccgctcaggcaagctgctcaacctctctaagactcagtttccccatctgtaagctgaagatatcaaacccacctgcactattagataaaatataaattgcatcacatatgtgggcgcatctggcccactttcttccacatctgatgatcagtcaacatccattctttcttttttatttaaacgagatgaggtcttgcgatgttgcctcctttctctccccccaagtgcaggtcagagccttccaagccccaggaacccacaaaatcaggccatctttgtgagatgtgccagctcaaattccctgcagcctgactaccagaaatttgcccccttgaaagttcccacaagtatttctgagatgccctcaaagagcccctccctgctccctcccagggcagcacggggcaccgttccttcctcctttgccaggtcctaatgtgcaggtgtctgacaggcacttaccccggtaccgcaagaacaccagggtcactgtcccagcctagggctctgtgccaggcactaaagctacccatccacagtcttgcagcttctgcatggcagagaggggacaaccccctgcccagtgctaggctttggtttgtacccagagacccacaaaagagtgcacaccatcagtctctgtctgatgctcagtcattccagaagctaaatcaagccatgggttgtggcagaaaacagaagctatgtcctatctactcccattcctctgcccagccagagtacctccctctcctggtcacaaaatgagacctgccttgctcttctgtggatggaaacttgcaggagcctagctttgccatgccaatgcacastgcccatccacctccatcctgcagccccagctgagacacttgtgctgctgaagagaatgcagcccctcccctctggccagtcccacagcacacgcttcagctgagacagccaagaagagcaaggggactgcctgcactcaccacagtgcttgtcctgggctgctgcagtcacctcaccctcgtctatgcgcgttgctgtgtgactctggttctctgtaattgacctttttattattggcgtgggcattgttgcaactatttgggcatcgtaggtgtttccatggtatttgtagcttttgtacagaaaccttcagaagtatatagactgggaatgtttttgtatgataaaaatagacacttttaggcaagatggtttttttctttcttttttatttttttgttgttgttgagatggaatctcgccctgttacccaggctggagtacaatggcgcgatctcggctcactgcaacctctgcctcccaggttcaagcaattctcctgcctcagcctcccgagtagctgggattacaggcgcctgccaccacgcccagctatttttttttttttttgtatctttagtagagatggggtttcaccatgttggccaggctggtctcgaactcctgacctcatgaaccacccgcctcagcctccctaagtgctgggattacaggcagaagccacagcgcccaccagtctttatcttttttttgagacagggtctcattctgttgcccaggctggagtgtaggagcacaatcttggttcactgcagtctgcatttctcaggctcaagggattctcccatttcagcctcccaagtagctgagactataggcatgtgccaccatgctcagctaattttttttttttttttttgagatagagtctcactctgtcacccagactggagtgcagtggcatgatctctgctcactgcagcctctgcctcccaggttcaagcgattctcatgcctcagcctcctgagtagctgggattacaggtacacaccaccatgcctgactaattttttttgtatttgtagtagagacaggttttcagcatgttgaccaggctggtcttgaactcctggcctcaaatgattcactggcctcggcctcccaaagtgctgggattacgggtgtgagccactgtgcctggcctaatttttatttttattttttttaatnnnnnnnnnnnnnnnnnnnnnnnnnnnnnnnnnnnnnnnnnnnnnnnnnnnnnnnnnnnnnnnnnnnnnnnnnnnnnnnnnnnnnnnnnnnnnnnnnnnnnnnnnnnnnnnnnnnnnnnnnnnncaacaagatgctctctaacctccccctgctttgtgtgtgtgtgcatgcacgtgtgcacactcgtaccaattacatgagctaggttacataggctgattttcaacaaactattacagtgtttagctcaaaaagtggttatttaggccgggtgcagtggctgacgcctgtaatcccatcactttgggaagctgaggcaggtggatcacctgaggtcaggagttcgagaccagcctggccaacatgtagtgaaactgcatctctactaaaaaatacaaaaattagctgggtgtggtggcacatgcctgtagtcccggctacttgggaagctgaggtaggagaattgcttgaactcgggaggcggaggttgcagtgagccaagatcacaccactgcactccagcctgggcgacacagcgagactccgtctcttaaaaaaaaaacaacaacaaaaaaaaactgttgcttcgacagttattttaaaaaaagataatttgacttatagaacattttcaagaacggtacaaagaattcctgtataccctctgctttacccaattaatgttttagcatactgtttatcatcatttcagtcatattactattatcatttttctgaattattgacaagtaagttgctgacaatgccccactgtccctaaatatatcagtgtgtttttcctaagtgataaagactctcctttgtaaccacattcaaccgtcaaaatcaggaaattaacatggatgaaacaccaccatctaattcttagatccttcgttcaaatgtttttagtagtctcaataacaatatatacatctattatttacatatttatggaagttatatataacttttatacacacacacacacgcacacacacacatataatttcccccttctgggctgaggctcaatccaggatgatgtgttacatgtaattgtcacatcccttcagtgtcctttaattgggcacagttccttgccttttcttgtctttcatgaccttggcatttttcaatagaataggctaataattttgtagactgtccctgtccctcaattttgggttttcaggtgtctccacatgacatggcccggattctgcgttttctgcaggagtgcatagcagcaatgctgtgtcctctgtgcacccatctcagggggtacaatggcgctctgctgttactgcagaacttaacactggacacttggttaarctggtggctgccaggttacaataaggattgtaaagttactagtttttgcttttaataacaatttaaggccaggcgcagtggctcacgcctgtgatcctagcactttgggagaccgagacgggcaaatcatctgagtccaggagttttagaccagcctgggcaacatggcaaaattccgcctctacaaaaaatacaaaaaatttagccaaacgtggtgatgcatgcctatagtcccaggtacttgggggggctgaggtgtgaggatcgctggagcctgtgaggttgaggctgccatgagctgtgatcatgccactgcgctccagcctggacaacagagtgagactctgtcttgaaaaaaaaaaaaaaaaagaacaatgtaataacatttttcctcaaactctcacccactttgtttagcatgtattgacgattcttgcctgaatcagtcattactatgatgattgccaaatggtgactgtttttgttgtcgcttcgacggttattaattggcattccactgtggggaggagccgtcccttctcctttatttatgtcagtacagactcatgaatttctattttattcgatggattataattatttttattattcattttgatgtttgaattgtgctggatgcacctttcaactgttccttcagttggctcctggctcctgtatctgtttgacaaatcgccattattttagcattttcttgctttctggggcaacaggtgttgcaggtacttgttagatcttcttggcctcgattcaaaggctgctagaatcagccatttctcaaggagcactggctatctttcatggaggatgacatttagcagccaagatctgagcagcaggtgttctcattgctgttggagtgttgtgggctctcgcagcagacagagtgaggaaatagtgtgtgcacatacactcattcatgcacctgtatttatctatatatctttttttwaaaaaataccgmatctcactctgttgcctaggctggagtgcagtggtacgatctcagctcactgcaacctctgcctcctgggttccagcaattctcctgcttcagcctcccaagtagctgaaattacagrcctggctcatttttgtatttttagtagagacagggtttcaccatgttggccaggctggtctcgaacttgggacctcaggtgatccactcacctcggtttcccaaagtgctgggaatacaggtgtgagccactgcacctgaccggtatttacctgtatatcttaaaagcccgagttggcacagacacttcccattccaatccaatgccccacagccatgggacctttctcctttctgtgtttgcagctcctttctctgagagtgagaagcctggctcctgcttcttccccatgtattatccccaagaagggtaatccccttcttggattacatgcttattcccctgtgtataccctgcttctggctctgctgctcccctgacatcaccacctccttggttctggctgtgcagacttctaaggccctcgtcatgtccttatcccagctgctccctcgtccccactggctctgcagcctcctgcawcctgaccacctccctggccccaggtccaaggtctgctggccctggacacttcaaaggaagggaaaggaaaggaaccaataaaatgtttttaaaaaaagagaagggagggaagaggaagagctgattgttttgtttttgttttgtttgtattttttttttctattaacaaaagccacattcaattattgttctttttaagaacamacattttggagtccattcaaagccatgtggctgaagagagattcctgggactgaaggaggcctcaaaagctcttcccaaatctgtcccccagccccaccacactgcccacctttcctatctcattaaatatcaccaacatcaaccaagttactgcagccagagatctagggccactctcgctggctctcgcttgtcgaccgtgccctgttcgatgggctaatctggttccagctccatccttgcctctctcctgctgctgcatctccctaattcaagcactagagtggggttgcttggacgcccagcgtccacaccgtagccgaggtgatagttctaaaatgtaaatctgatcacatcacacacacaccagcttttaattgcctttagtgcctccaaaccactcttttttttttttttttttgagacggagtctcgctctgtcgcccaggctggatggagtgcagtggcgccatctcagctcactgcaagctccgcctcccgggttcacgccattctcctgcttcagcctcccaagtagctgggactacaggcgccaccaacacgcccagctaatttttgtatttttagtagagatggggtttcactgtgttagccaggatggtctcgatctcctgaccttgtgatctgcccgcctcggcctcccaaagggctgggattacaggtgtgagccaccgcacccagccagctccaaaccactcttaagacaaaactcaaattctgccaggccccaagggcccaagacacccatgctctgacctttctttctcccccacttcttcacccacgtggggccctatgattcttaaatttgggggagaggaggtggttaaaggttgagaccatcctgagggcaggagagaagtacaggaaagcatttcaggggttgcagagcggggagaggccaggccgggaggaggtggcccccatccctagtaagagctggacaggaggctgcttccagcctttccctcagatgagctggctcagagcagggcaaacgcggcaggaggtctccttccagaactcaaaggctcggcctgcaccgtcagactccacactgatcctcactcagccttgggacgtgtggatgcctgggtcagtgggctccgagacctggagccctctgtggctttcagaaacttcccagcctccacaggcggggagtctccccactgggaaatggaagtaataaaaacagcagccaccccgcaaacccacaccattctctccaccacagccgagtggtgttttcaccgtcctctctagtggctttctcatctaacttgaaacaaatgctttggtgtggggagcaactgaagcagggtatttggtttggtttgtttccacttttttttttttttagacagagtttcgctcttgtcacccaggctggactgcaatggcacaatctcggctcaccacaacctctgcctcccaggttcaagcaattctcctgcctcagcctcccaagtatctgggattacaggcatgtgccaccgcgcctatctaattttgtattttcagtagagatgaggtttcaccatgttggccaggctggtttcgagctcctgacctcaggtgatccgcccgcctcagcctcccaaagtgctgggattgcaagcgtgagccatcgcgcctggcctgtttcccagttcttaatactgtcccgccactggtaaaatctccacaatcattctatatgctcttccatttaaaacgaagcctggaagagccttgtggggggttcctagcaccccggggctcctgctctgcctgcatggccttcctctgtgcctagtcctgtttyacgcctcatttagagacagcaaacagtgctaaagttaaaattacccactgggaaacttgagcctgtgcaatgactttcctggatggtgtgactttcctggatggtgttggaaagtcagagcccaggaactgtttctggaaatgcagcacttctcagcatgtgcagccctgagcctccagcagtctggacaacggctgttctttgttttaaagacccgggtgcccttctcgtcctgaaccccagggccacaggcagcccctctccccttgccctgtaccttccccaggagtattgctacctgagtgagctcaggtgccaagccgtcagacaaaggtgcctctccctgcaagtcccagcttggcaatccacgtctctggttccctcaacacctttcttcaatggagaggtccattttctgcaatgcacatgcccctcaacacagtggtgggggctgccattatgtcattatgtttgcaaccaaacttctctgcaaggagacttgggggactacgaggctgagccaagcagggttcctttccttcaaccacttatgagcttgtggggaaggcaggcacagcaactatgacatgacgcagagtgagctgctgattctaagctgggcttggtggggagctgtctgcagagactctgtaaaaatgatcctgctggaagtcacccagaactttccacagacctagaaattataatgggaggcaagagaagagtattttgtttcacaatctgaactaactcctaccatgttttgtttgtttgttttttctgcttgactcttggctgtgagcacaaattcatgcccattctgctgatcctaaaagctctgaagggagggctactctgagcctgagatgtcagatatatatgtagatatatatgtagatagatagatagatagatagatagatatagatatagatatagatatagatatagatatagatatatagatatatagatactttttgagacagggtcttgctctgttgcccaggctggagtgcagtggtgtgattgtggctcactgcaacctccacctcctgggttcaagcaatcctcccacctcagcctcccaagtagctgggactacagggtgcaccactacgtttggctaatatttgtattttttgtagagacaggtttcatcatgttgcccaagctggtctccacctcctgggcttaagcaatytgcccacctcggcctctcaaagtgctgggattacaggcgtgtgccaccatgtctgaccaagacctcataatttttttttttctttgagacagagtctcactctgtcgcccaggctggagtgcagtggctccatcttggctcactgaaaccactgctgcttgggttcaagcgattctcccgcctcagcctcctgagtagctgggattacaggcgcctgccactgcacctggctaatttttgtatttttagtagagatggggtttcaccatgttggccaagctagtcttgaactgctgacctcgtgatccacccacctcggcctcccaaattgctgggattacaggcgtgagccaccctacctggtcaagatgtcataatttaacaagtctacttaaataaggcaatgctgctcttggttttgttcaaaatcaggcttcctgtgttgtgctctagttacctacctgctaacgggcggaggcgttcactccagggaaaagggagagttgccacggcagaaatccacgtgtccgagggcatcacttgggggccgccggtaaccattgcggggatcatgtcccggctgacttgggccttcatggtttccttctctgtttcaaaatgacttaacaactcttttcaggaaggcggctgctgtggaatggggaacgaagtstggcagcctgggccattaggaaccaagggcagtcccctccttggtcagaagtgtggctggtgctaacctcccgattcgaacctggacgcttcatsgggggacgcaggcatttgttttccctctgtctccttgggcgccttttcaccatggccttcacgtgctgagcatcttccatttgctccccagttcattcgcttccctgccccctgctttctcattgggtttggccaatgggagccgcagccagatgagaggaaagttttttggcgggggaggggatctactgccctgcccgcatcctgtaaggtctccatggtagctccacgggaggccacagcgcctgctgggcggccccctctgggttccagcacctgcttcttgcctgtgatcttcccagggtggtaactactatgagttcgggggggctgtactgcctgttattggtatccctatgccctgtccctacatgttctccccaagttcccccgtttaatgagacatctgcctcctgccgggactctggatcgtgcacatgaaaaacgcacatgacaccttgttcacattttgccttttacagttgctgaaaaggcaccacctttagcaacgtgctgggggatgtgagtgagggcagctcccctgcttgccactgtttctctgcatccccagtcccagatgcatggaagaccctccctgaccatccctcctcctggctccaactcttgtctgtcatcctgacccaaggcggcaaatccatggaaccactaaatgctgctccaattgccaggccctgctgcacagtctggggatggcacagccatgagcagacctgtcctgactgtgggcacacagctgggtggatatggacctggcctgctgtgggtgggaacccccaggcctgtcccagcaggacccacctactcctgctggcctgtggatgtcaatacactgtccacctggaagcccctcctggctttgactgggtggggattgttaggtcacacccaggcacggttgcccttcaaacagactcctccccctaccggccactctgccctgtcccctcggccatcgtaccctgatgcaggacctttctgggcccaggttcagaatgcaacaccatgtgtgggctgctcctctctgcactgcacacactgaggccagaccatgctcctcaccacccacccgtctagaccacgctccccacccctccgctgtctgggccggctctgtagcttctatgatccccttcttgggctctgactctttctcttcctgttctagaatgtgctttgaacgtaagttctctgttttccttgtcaaagcttagggccaagagcaaagccttatgaagacaccttcctggacattttctccggggacacctgcctttgcctggttggtgccccgcctttgccatctcctgtctgcactgcctgcaggcacagggtgcttcctgcgggcccactgcacacagcaggttttccctcaggtggggtctgtccctgtggatctgcttcctgtagacctgctgtgttcttcctgggtgctttcccctcggagggggagaggtggaggaaggctccctcctcagcacacttgtcagcggccattatcagcttgccacctgtctgccatccatgaggcttggcttctaccctgcattctctcccttcctgggaacccgggcagccggcagccttggtttgccagaccctggctccctggcctctgggagcgggccaggcacacgcggtggcctcaccgggtccacagggactcctttaaattgctctgttcctagtacacagcatatgtcatcaagtctaagatgtttacctttcagatttcacatctctggagtcacataagtctataatcaatgtgtaacatagtctgtggttcagcttcttagcagtgcataaaataacgtgtcttacttggttttagcattggtgcgtcttaaattcccaaatctcacatgctcactcaaacacgcgttcttcagataccctccagccgagaatccttttctggattcacacatgaggcgttcaacttcagctttctttggtattttcatattccttttccatgctcttaatggcttgtcatctattagctgtacattttttgacagtctgacacttttcacgactgctttaactgaattgagttcatagatcttgtatcatgtcaaattatttttgttattctgctcactttggtttttgaacctactcatgttactttttagaggcctggctgctgctgctcagatatttctggttcaataatgtttgaaagagattgcttaacacggggctttgtgaaaacaagtgaatttattgaaaagaatttagaacacccttttgcttaactctctataaattthctaagacacacacacacacacacatacscccaggcatagacttacatatgtgtgcaatgcacacaaaaaaacacacttggaaagagaaagacagagacagagccagagcccagatggacagccctgaatcacaggtcactgaaagaggcgtatgtgtcctcactaggacttggagttagccacccaggcacaagggctcgggaacaggtctgagtcctaaccctgctccctgatgtctgaatctgtcccagtctgggtcatcctgcctcatctctcctgattccacttacctgtaatcccgaagaccttcaggcaccctcccacctgcccacgtcaatcccaatcccagtagatatctgacttggaggcggaaaggccaacgcttggcccagccacgctcaggccagatgccacctgctcaccaaccagggtgggcttttcaacctccattctacttgcctgtgggtcttgtttcctacaggcgatgggtcccattccctccagaaagaaggtagctggcagcccccagaggagcagtgagatccttgacttctaactccaaggatggcgccttctcaactaattttaaaatgacctgaaagttgctgggtgtggtggcttacacctgtaatcccagcagtttgggaggctgaggtgggtggatcacctgaggtcaggatttcgagaccagcttggccaacatggtgaaaccccgtctctactaaaattacaaaaattagctgggtgtggtggcgggcacctgtaatcccagctacttgggaggctgaggccagaaaattgcttgaacccaggaggtggaggctgcagtgagccgagactgtgccactgcactccagcctgggcaacagagtgagactccatctcaaataaaataaaataaacaatctgaaagtcactgacatggtggctgttatgaggacagggtgaatcacaggcacttagcagttgccaggggcgctatgctcctccaggccagggaggccccacccagaaggggtgcctctttggggctcattcctgtacctaccaacagcctgaccccttgctcctgttcagctgcccctgagggcagggcctggcaagaaggtaaagggtgaggtaggggtggggctggctgctcagggaccacctggaactaccggctagagccacagggcttacaggaaggggatctgccccagggcatttgaatagccagcacaattacccccaaggtcctctgctatcagcaacagatacaaaccagatagatcatttactgagttttgacaaaaacaactataacaaatgaaaaaaataaaataaaaataaaagcaaaacaattgctggaattgattttttcctgtgttttttttaaaaaaagttcttcgtgcaggaaaaaataaaagtaacttccccaccaaacacactcacaaattctagaaaaacacattctaaactggaaaataggtatcttggggttgtgggattacaggtgatttctttctttctttctttcttttttttttttctttttttttttttttgagacagggtctcactctgtcgcccaggctggagtgcagtggtgtgatcttggytcactgcaacctccgcctcccaggttcaagcaattctcttgcctcgccctcccaagtagctgaaattacaggtgcgcaccaccacgcttggctaatttttgtgtttttagtagagactgggtttgagtttcatcatgttggccagactggtctcgaactcctgacttcaagtgatgtgcccacctcagcctcccaaagtgctgggattaccggcacaagccacygcacccagacaaatttcttatttaaaaaaatccatatttctaattttgccataatataaatgtactatttgtataaaaatacttttattttattttattttattttattttatttcgagactgagttgcccaggctggagtgcagcggcgcaatctcggctcactgcaacctctgcctcccaggttcaagtgattctcctgtctcagcctcctgagtagctgggattacaggcacctgccaccacgcccggctaatttttgtattctttttttttgttagcagagatggggtttcatcgtgttggccaggctggtctcaaactcctgacctcaggtgatccacctgcctcagcctcccaaagtgctgggattacaggtgtgagccaccgtgcctggcccaaaaacacttttaaaaataaaagttttttaaaaacggaaagaaaaacagatcttaggaaygatcctctgtgtgccttttgcagaagggcccttggcagctgctggttgcaggatgtgaggtgtgggcatgagggtcacacaccctgcgtaggagcccaaggcttttcctggatcgcagtcactccctccgcctcgctggtctctgctgcagttggcctttgtggttggctgacattctagttggttaacaygtgcgtttgtttggatgttctgtcctcaggcatccgaaggcgtctccatgaggttcttcaccaagctggaccagctcatcgagttttacaagaaggaaaacatggggctggtgacccatctgcaataccctgtgccgctggaggaagaggacacaggcgacgaccctgaggaggacacaggtagggagggagggacaggacggcaggaggtacttttgggaacttgccctgcacccaccttgagtgcttgtagactaggtgagtcctattatcagagggagattgttggcgtgggggttaaggacaagttaggaacacaggctctcyggtcaggcagacatgggttaaaattcctcctccccagcttattagccaggtgaccttggggaaattacctgacctctctgaatcacagacttctctttaaagagacagtaaaataaggctgggcttgctggctcacgcctgtaaccccagaactttgggaggccgaggtgggaggatcgcttgaggccaggagtttgagacccttctgggcaacataggcaatcctgtgtctacaaaaagctttttaaaaaatttattcaggcatggtggctcaggcctgtagtcctagctactcgggaggccgaggcaggaggatcccttgagtccaggagttcaaggttgcagtgagccatgattgcaccactgcactctagcctgggtgacagaaagagaccttgtctaagaaaaaaaaagagagagagagaaagagacagtaaagactgmacttcctctgcttcacttgactagcctttaaaaagacagagagagagaataacgatagtacctgcctctcatggtatctcaaggatcaaatgagttgagaaatgtagcacccagagcctggtacatattcatagtaagcactccataaatgcagctacggtcaytagcatgattacaatctgctgaatttcactgagaggagagtgaaggaggagacccttgcacctaactggaaggatgaggaaggtgtttctttatgtcatcattaaaagggggagggggaaatacaacccctaaaaatatgttgaaaaaaatgtacagtcccagccaggtgcagtggctcacgcctgtaatcccaacactttgggaaacagaggcgggcagatcacgaggtcaggagatcgagaccatcctggccaacatggcgaaaccttatctctactaaaaatacaaaaattagccaggtgtggtggtacgcgcctgtagttccagctacttgggaggctgaggcagaagaatcgcttgaacccaggaggtggaggttgcagtgagccaagatcgcaccactgaactccagcctggcaacagagggagactccgtctcaaaaaaaaaaaaaaaaaattatacagtccctaaaaagtgtgtgagactaagggtgccctttacagcatagggacaaagaccaatagagcaacagtcagatggagaaagtcttgcagagaaggagcttacctggggatgccccacttttcccctcaaggatttactgagaatatacctaaggraatagaaatcattttgttacaaagacacatatgtgtatgttcattgcagcactatttgcaatagcaaagacatggaatcagcctaaatgcccatcagtgatgactggataaagaaaatgttgtatatatacaccatggaatactatgcagccagtaaaaagaaygagatcatgtcctttgcaggaacatggatggagctggaggtcattatccttagcaaactaacacaagaacagaaaaccaaataccacgtgttctcacttaagtgggagataaatgatgaaaacacatggacacaaagaggggaacagcacacactggagcctacctgagggggtgggaggagggacaggatcagaaataactattgggtactaggcttaataccaggatgatgaaataatctgtacaacaaaccccatgacataagtttacttatgtaacaaacctgcacaggtacccctgaacttaaaatacaagtttttttttttttttaaaggcttatttcctaaaagaaaaccatgagatacctaaccgggcccctcagttggccagggctcttcctgaattccagcaggtggagactaccaggtcccccaggctctccccgaagagaggagagatttgtccacagacgctgagacccttgcctggctcctgcctgttctgggggcttgctgcaggcatcctttttctccctcacctgtgggctggcttgtgggccaccagggccccctgctccctcccaccctcatggaaacacacttttcatggttgtgcagctgttcgtttccaaaaggaccgcagctccatggaggctgaaagggtcccaggcaggccctgtcccttttggcctccctggtctgagtgagcactgccctctggaatcaggaaggtcaggctgtggaagaactagggctgacctgtcccattgtgagcccaaggtcactcaccagcaccgcgccctggctgcacctgaacagctgcccccaggcgcccagggccatgctgagaagctgttctgcagaaacgccctccacactaaacaccctcactcccctcgggctgcccatcccagctagttgggcccctctgggcatggctgtctggaggaagatcccgacaagtttctgtgagggctgaaaaaagaacctcagtctcatgactgctggcttcacttccgcaaacgaggtcgcccagttgtcggctcgaaccagagcaatgcgacatgaggcccgcgcagtccaagaggtctgtttgggcccagggcctcttgaggcaccgccagaccgtggagctcgaagcagactcctagttgtcttcagaaccccagacagaggaagtgaagggcctgttctctaaagaggaggtcccccggggcccactgtggttgggccagaggcagccgctctgtgtgggaagaggctcagacagagctctggaccctccattcgtgtacgtacagaatgaaccttctcctaaaggcgatgggtgggctcccacctcccaggccaagttcaagtcatttgttgaatgtctctgagtgaagggaaccccctcgctttcttttatgtgtttctgagagtctgggggaggagagaaggaaggacagaggctggagagaggaaactatgggcttattttatggcctccaatgaaacagttataatggtaatgaagtatttttggttttggtttgtttattaaaaatcttaccctgctctcatgtaatagatattgtattgatattcagacctttgatcttttattttaaattccannnnnnnnnnnnnnnnnnnnnnnnnnnnnnnnnnnnnnnnnnnnnnnnnnnnnnnnnnnnnnnnnnnnnnnnnnnnnnnnnnnnnnnnnnnnnnnnnnnnnnnnnnnnnnnnnnnnnnnnnnnnnnnnnnnnnnnnnnnnnnnnnnnnnnnnnnnnnnnnnnnnnnnnnnnnnnnnnnnnnnnnnnnnnnnnnnnnnnnnnnnnnnnnnnnnnnnnnnnnnnnnnnnnnnnnnnnnnnnnnnnnnnnnnnnnnnnnnnnnnnnnnnnnnnnnnnnnnnnnnnnnnnnnnnnnnnnnnnnnnnnnnnnnnnnnnnnnnnnnnnnnnnnnnnnnnnnnnnnnnnnnnnnnnnnnnnnnnnnnnnnnnnnnnnnnnnnnnnnnnnnnnnnnnnnnnnnnnnnnnnnnnnnnnnnnnnnnnnnnnnnnnnnnnnnnnnnnnnnnnnnnnnnnnnnnnnnnnnnnnnnnnnnnnnnnnnnnnnnnnnnnnnnnnnnnnnnnnnnnnnnnnnnnnnnnnnnnnnnnnnnnnnnnnnnnnnnnnnnnnnnnnnnnnnnnnnnnnnnnnnnnnnnnnnnnnnnnnnnnnnnnnnnnnnnnnnnnnnnnnnnnnnnnnnnnnnnnnnnnnnnnnnnnnnnnnnnnnnnnnnnnnnnnnnnnnnnnnnnnnnnnnnnnnnnnnnnnnnnnnnnnnnnnnnnnnnnnnnnnnnnnnnnnnnnnnnnnnnnnnnnnnnnnnnnnnnnnnnnnnnnnnnnnnnnnnnnnnnnnnnnnnnnnnnnnnnnnnnnnnnnnnnnnnnnnnnnnnnnnnnnnnnnnnnnnnnnnnnnnnnnnnnnnnnnnnnnnnnnnnnnnnnnnnnnnnnnnnnnnnnnnnnnnnnnnnnnnnnnnnnnnnnnnnnnnnnnnnnnnnnnnnnnnnnnnnnnnnnnnnnnnnnnnnnnnnnnnnnnnnnnnnnnnnnnnnnnnnnnnnnnnnnnnnnnnnnnnnnnnnnnnnnnnnnnnnnnnnnnnnnnnnnnnnnnnnnnnnnnnnnnnnnnnnnnnnnnnnnnnnnnnnnnnnnnnnnnnnnnnnnnnntcccacataggccagacgcggtggctcattcctgtaatcccagcactttgggaggcccaggcgggcagatcacctgaatccaggagctcaagaccagactaaccaacatggcaaaaccccttctccactaaaaatacaaaaattagctgggcatggtggcgggcgcctataatcccagctattcgggaggctgagggaggagaatagcttgaacctgggaagcagaggttgcagtgaaccaaaattgcgccactgcactccagcctgggcaacaagagaaaaactgcgtctaaaaaaaaaaaaaaattccacatcgagcccattgtttagttccccagsgtttccatttcttcccaggtttggatgctgagtgcagtaaactggatggggaagagtcggggaggccccaygkttccacctgctgacctctcctactaaggctcgtacacctcccgccaactccatctcctcctcatcagcccctccatcctggttatggggttctgcctcagtgggaccagcaggggcgtgaagccgagcttccaggcagctttccaggaggggttagggtcggggcatgggctgagggttcatgggcagagagccctgctttttctatctttgcttatcatgtcagtggaaccttcctaaaacttctgttcggagatgggaatgagtgaagggggcatgtgcagagaccaaggaaagcggcgacacagagccgccctccattctcagggkcaaggaaaactgggaatccacattgtgttttaaaatcagtctatttcgcttgtcaagctgctttgcacatagaggactgccttttgattatttttctttaaatgacaacttgcacagtctttcctgcaagttaatcagatctcatcaattaggtcttagtaggttaattatcacatttctaagtaaaattagccttctcaaataaacatagtttacatctttatgtcaacacttttctacaacaaacttttatttttgagacggagttttgctcttgttgcccaggctggagtgcaaaggcacgatctcagctcactgcaacctccccctcccgggttcaagtgattctcctgcttcagcctcccaagtagctgggattacagccatgcgccaccacaaccagctaattttgtatttttagtagagacggggtttctccatgttggttaggctagtctcgaactcccaacctgaggtgatctgcccgcctcgacctcccaaagtgctgggattataggcatgagccactgtgcccagcctaccacaaacattttaacaaatagaactgcctgtaatacagactcacggtatcaaagtcacaaggcaatagtaatwagacctgttaagatacatattttaatacaggggtccccaacctgtggactattaggaactgggtggcagcaggaggtgagcggagggcaagcgagcattaccacctgagctctgcctcctgtcagatcagcggtggcattagattctcatgagtgtgaacccggttgtgaactgtgcacttgagggatctaggctgcacgccycttaggagaatctaactaacgcctgatgatctgagatggagcagtttcctcccacaaccatccccccaccacccatccgtggaataattgtcttccacaaaaccggtcccttgtgccaaaaaggttggggaccactgtttttaatactatagaagagatgtttgtcccttttagtaaacagactcaggcagaaactggatttttatgatgtcaagacccagaataaatatagaagaacttaaatgtaaatgttctcttctcaatctaacaagtcaaatgggtaagccagtcctgttcagtawtttttttgagatggagtctcgctctgtcacccaagctggaacacagtggcgcgatctcggctcactgcaacctctacctcctgggttcaagcaatcctcccgcctcagcctcctgagtagctgggactacaaacgcacgccaccacgcccagctaatttttgtatttttagtagagacagggtttcaccatgttggccaggctggccttgaactcctgacctcaggtgatctgcccacctctgcctcccaaagtgctgggattataggcgtgacccaccatgcctggcaattcctgtccaatcttaagagcaacggcttttcattctttcacagattccacaggaaaagccttgtggcctttagtttcaatwtgattacatatcaagcctggaataaaaatctttaaggcggctgggcagggtggttcacacctgttatgccagcactttgggagcctgaggcagtggatcacctgaggtcagcctggccaacatggtaaaactccacctctactaaaaatacaaacattagctaggtctggtggcatgtgcctgtggtgtcagctacccaggaggctgaggcaggagaatcacttgaacttgggggttggaggttgcagtgagccgagatcttgccattgcactccagcccaggtgacagggtgagaccctgtctcaaaaaaataaataaataaataaataaatgaaggcttgtaataattttttccacacagctaattaacatggttaagcctcagttctctgatttgtaaaacaggaataattagtaataatatctgagtcataaaattgatttgtgggttaatggagaaaatgagcatgaagtgcttagcatagtgtctggtatgctgtgctcaggaaatacttgctgtaattacaatttccatcattatgggaacaaacactcaagcgttacccagaacaaaaggtgctggaagatagaatgcagacagctgatccgactttagggggcgcccctcgtgggactggcctgggctctctgcctgtgcctctgccaccagggttgatctgcacagtgaacaaatcctgccttcagccccattcactctgtacactgaaggggttggagcagattccacacggcaaagtcggccacttgcactacctcattccatatccccagccccatcgctaatcactcagactccccccacagagcctgagatgaatccagactctctgaacacagtgccctgggtagcctttggccgtgaaattgcaaagtgcatgggagctaaagccatttgttatctctagatcccatcatccttccagccctcagatcctatctttataagtagataaggtaggaaaacaattccacttacactttccaaagcttttggcctccttttgtgtgtgtgtgtgtgtgtgtgtgtgwgagagacagtgtctcactctgtcactcaggctggagtgcaatggcacgatctgttttcactgcaacctctgccttccgggttcaaatgattctcctgtctcagcctcccaagtagctgagattgcaggcacccaccaccacacccggctaatttttgtatttttagtagaggcggggtttccccccaggctgttcttgaactcctaacctcaggtgatccgcccacctgggcctcccaaagtgctgggattacagttgtgagccaccatgcccagccttggtctcctttttaaagtataaycatttcccagacccccagccaaaaccacttcctcccagcagcacccaaaggagctcattgagaggcaccttttcctgctgggccacttcttcttgctctgacctgctaatctaccccatcagtgagaccacgggaaccttcgtccaggtttgcaaacattcttctgaaggacsgtstccccttggaggctctgaggatgaggatttgttattgtggttgctgttcccattggtgatggtggctaaaagaaacaggcaagcatagtttgtttcttttttcttttctttaggcttccagaagagcatcttaaggccatccaagattatttaagcactcagctcgcccaggactctgaatttgtgaagacagggtccagcagtcttcctcacctgaagaaactgaccacactgctctgcaaggagctctatgggtaatggctggcccacgggggcgggcaggtgggggcggccaccaggtgagagaaacagctcatgagagcgacctctgcctctgcctggctgaacaaatgcctctgccgcactcacaataattgagtggtgagcacagcttggaaatctctgtggttgtttggaggtcttgttatcatggaatttgaacagtagcttgtgtgtgctgcagctttttacaactaaagttaattggaggccagttgctctgggaagcggatggggtgggaggacatggccagccctttctcacttgcacaggatccagctcttaagatttttgctgctgctcttgctgtttgctgcagccattacacctgacaagcacagaaaggcatcaaaaggaaataaattaaagttagtctattttctgcgtgggtggttatggcccaagatttccagtgatgtcaatttttcaaagggagatgattcaccaaaactttaattttctgatgtccgatccattgaatgaccaactggtaaaggttctgatttcttttagattcttttggttttacattttaaaatttaattgatgaaagttaatttcaagttaattacattttaattgttaaaagtgcaaaagtaaggctaatatgccatccaaagaattggcaaagaatattttaaatgccaaaagcttggaagagaaaaaaaaacaaaaaaaattccagagcatctgaacaaagccacagggagccaaaacaatcccatcacaaatgaaaggtcaggccgggtgtggtggctcacgcctgtaataccaacactttgggaggccgaggcaggtggatcacctgaggtcagcagtttgagaccagcctggccaacatggtgaaatcctgtctctactaaaaaaaaaaaaaaaattagctggatgtggtggcacacacctgtgatcccagctactctggaggctgaggcaggagaatcacttgaacctgggaggctgaggttgtggtgagccgagatctcgccactgcactccagcctgggtaacagagcaagactccgtctcaaataaacaaacaaacaaaggaaagaaaggtcaacattttgaytggaaaaatgggatttcatactggcaacggttttgtagtctgtgctgttttgtgttttattacacatacagccgtttcaagattcctttgttgatttttctggggctgtttcaatcttagcttagttaatatgcagaaaacactcttttatcatcagtaatcaaattcgactttccttttaaaggcttttaaaagcacgatcagtacattcggtaaatttaacaaataatttctttgacaaatcaagcactcaccaaattggccagttgggcttaatttcaatgaattggctttcaactaatgcagctgtagctaattggacctggagctatcatttttatagattcccatggagggattttgttccatttgatgctgttgttatgaatcactttatcactaggggaaaacacatacagcactttctttttataaaacaccatttcacaatggctgataacaagctcttagttctgcttcagtggagattctgttcttccctgcttccttgtggagaaagaaatgtattttaagtctctccacgaggcttccctcagtcttccccagacacttctgcacattgttagatttccctaacacctcaacactacctggacttcccaggagccaagtcacctcatcactatggcggtgccagcttccccaacttgtcttcttctcgggtatgtagtgccgatggagagagcttccttcagcttctagctgctccatgactctatttagaattaaagacaccgtcatgctctaaatttcccttgcacactcgtctttgctttcatcagtaaggcgacagccaggcttggagacttgatcagccttggcattttaggaaattgtagaaaggaacaaaatgatgcttcccatttctcctgccagaatccctgcagattctcatccctcaaattgtaaacccataattttcaaactgctttgattagaataggtcttcattcattcgttcatcgaacaaacatgtattggaggcctcctctgagccctgttctgggtgctgggatgtagcaacagacacaatgcacaagcctcttgctcttttaggcctttttggatctaacatctcagtgaggcacacaacagtagactaaggatccagatgaacaagaattttttttttttttttttttttgagacaggatctcgctctgtcacccaggctggagtgccgtggtgagatctcagctcactgcagcctcaacctcctgggctcaagtgagcctcccacctctcagcccctatccttgagtccccccactcacttgcttcccccgagtccaatggagaagctgggactacaggtatgtgccaccatacccagctaattgttatattttttgtagagatggggttttgccttgttgcccaggctggtctccaattcctaggctcaagcaatctgccttcctcggccycccaaagtgctgcaattacagcatgagccaccatgcccagttcaaacagtaattttagtaaatgtcatggtaagataaaacasgatgatgtgaggaagagacattgggtgggagagtgccagcttcctttggaggtgaaggaggtgacagaactggggtcttgccacacagtgatttggcagagggacattaagtacaaagtacaaagktcctgaggcaggaatgaagacagcctgctcaaggaacrggaagtctgtgtggcaagtgagtgttaggaacagaggttggggagaggctggtgtaacatgtaaaagctggtcaacaagtaaaagcacaggctgcccagagaggtggaattttaggtgaacagcaacttctttagtataagtatataccatgtaatattgggatatactcatgctaatagattattcattgtttatctgaaattcaaatttcactgggtgtcctgtgttttacctggtcactgtaggcaggagccacatcacgcaaggcttaagaggccctatagagtttgtgcagggctgggccatgatctgattttcaagtggtggaggatgmatcctaggaggcactgcccaaagcaggagaccagctgggagtggctgtggttgtccaagtgagacaggatggcagtccatgaggaaggtggctagcaggggcaggggtctgtgtctgttttgcttcctgctgagtccccggttatacacaggctctggcacatgyggctcaacagatattaggtaaatgacccaatggctgggggcgtgcagatgctgagaactggtgtgacctgggacacgtgtgcatggcaaaggtgtcagatttgccgcttgattggatgtggggtgaagggaagatgaatctagggtgacccctgggttcccagtgtgaggggctgagtggatgctgatgccagttcctgggatagggaaagtcaaggaggaggaggaaggagagggtggtgggaggagagttctgggctacatttggcttgaggggccatgaggcatctgagtggagtcaccagccatggagctagtgctaagaagctaggatgtgggggatgcatttggggaatcatgggggatgcatatggggaatcactgaaagctgggggtaaggtcactgcaggtgagagtgtagacagaggagaatagagccaggctcaagatttagaggagggatggagaaggaggagctgggagggggttgagaatggcatcaatgatgtccaggtctatttgcttggacccaagtgtgaatgagaaggacattgagcactgaggagtaaggagaagtgccagagcctcctctgcagaaatgttgtgacgatgtccccgtgcgggtctggcgtgaagatctctttgcagtacaaagcatcaggcaagatttgcaaccccaggttaggctccctagagccagacagaaacttttccagagagagagaataaggaaccagagactggaaatatttggtaactcctgaaatggagacacggaaaggattgcaagtggaatttaaaataaaagatcaaaggtctgaatatcaatacaatatctattacatgagagcagggtaagatttttaataaacaaaccaaaaccaaaaatacttcattaccattataactgtttcattggaggccataaaataagcccatagttttccaatcaaatttcaaaaattaaatcacaaaacagagtagagtgtcagaaacatgtatatcaaaagcatgaaaagattaagcaaacctagagaggaaatgtgtggtaaaaatggacagtccttggagacaaagctcagaggtgctacctgtagctggcaggatatgttcttgaagaagtaggaaaaaattgccaattaatgtatacaataaaaaaaaaaatttccaggcttacaaaagagctaaatctaagttttgagaagctccataatgatccaaataatacaacaatcaaacagcaacactgaaacatctttttttttttttcttataaagagacagcatctcactctgtcactcaggctggaatgcagtagtgggatcatagcttatccatccttgaactcctaggctcaagtgatcctcctgcctttaactccggagtatctgtgattacaggcatgcaccaccatgcccagctaattaaacaattttttttttcttagagatggagtttcactatattgccctggctggtctcaaactcctgggcttaagccttggctccccagagctctggaattacagttgtgagccactgtgccaagcctaaatctcttacaatgtctctaaatgacaagaaaagataaattcaacaaacagattgttacaaacagtaccatagctttaaaatggtcgayatttaaaatgttaaatatttttaaatatttaatattttaatattttatatttaatatatttaatatttaaaaattcaaactccttgacagtataataaagattctgaagccatgtctccaagaaaaaggctactgacctggaaaagctaagcctagctcattcaagagcacaagtcatctttttcagaaagttcctaaaaatgtaccaatcaaatgccttactcaaaaggaatccaaaaattgtttttcagaaattttatagtcctggtgatcttaaaaacaagaagcctgcagcttactgagcagcaaaatatgaatatactcaaagcagaaagtgttcattctgtactcccataacacactgtgatgaaaatagaaataagtcacaaaactagccacaaccacccaattacctgtacattttaaaatcaccttctaaattacagctaattaagaaagaaactgacacaataatacatggggtaggtgtggaggcacagagtggagtaatcaaaccactgcatatcagaacactatgtgatgcagccaaagcaccacttagaggaaaaaccatagctttaaaagttctgctctattattaaaaagtaaatagaaggccgggcctagtggcttatgccagtaatcccaacactttgggaggccaaggtgggcagatcacttgaggtcaggagttcgagaccagcctggccaacatggtgaaattccatctacactaaaaatacaaaaaattagctggatgtggtgttgcacacctgtaatcccagctactcaggaggctgaggtaggagaatcgyttgaacccaggagacggaggttgcagtgagccgagatggtgccactgtgctccaggctggatgacagagcgagaccgcgtttaaaaaaaaaaaggaaatagaataacaagtcaaatgtacaaactgagtccagattgtaaatctcttgaagacattatgggtcatgtcctaatccccttgatgtttccaggacccagcaaagtacatgaaatgttgatttattcgatattcatgaacaaagatccaatgtgtaccaactayctgcaaggcactgttccaggagctggaaatacagcagtgaataaaacagaatctttaagaaatctctgctgagcaactgagcaataacaacagccagaaaggagacgaggaggacaagatggtaaaaataaaaacagagatacatcaggaaaaactgtcaattaagaaagttttaaacatgagaaatgtcaaaggagaattaataatcygcattaaagatttggaagtcactaaagaatagtgtacagttatgtagctacagatcttcaagttataattaaatggaacacatagtttacgtaaaatataaaacattaaaagtaccatgagtgtcctttaaactttcaaggaaaaaatagtgagcataaggtatagattattcctgaatgacaaaaaagtcacctaattctctcttcaagaaaaatatgatttaaatccaaaaagctaatcaagataatagcctgaaataaaactctctatctctgatttcacttattaatataaatgcatattgtttcagtaacatcccagcaaatataatttagtgacatgaaaaatggaggctttatctaggaggtcactcyaaagatgagtcaacaaaaagaaagcactgtaattttgcagtagattaaaagataaacggaaaccatttacatagataacattttaaattcatctctaatttttaaaaatcattttwaaaaaaaaggaatagaaggatacttccttaataatgcaatatgaatcaaagtaaaactaattacaatcgatagggaaacattaaaatcattccattaaacttttttttttttttttatgagatgtggcgtctccctctgttccccaggctgggtgcagtggcaggatcttggctcactgcaacttctgcctcctgggttcaagctattctcctgcctcagcctcctgagttgctggcattacaggtgcccaccactatgcccggctaatttttgtatttttagtagagatgaggtttcaccacgttggccaggttggtcttgaactcctgacctcaggtgacacccatcttggcctcccagagtgctgagattacaggtgtgagccaccacacctggccccattaaacattttaacaaaagaaaaagagatactgcccttgcactccagcctgggcaacaagagcgaaactccatcacaaaaaaatatatatatatgtatatatatatacacatatatatatgtatatatatatacacatatatatgtgtatatatatatacacatatatgtgtatatatatatacacatatatgtgtatatatatacacatatatatgtatatatatatacacatatatgtgtatatatatacacatatatatgtatatatatatacacatatatatannnnnnnnnnnnnnnnnnnnnnnnnnnnnnnnnnnnnnnnnnnnnnnnnnnnnnnnnnnnnnnnnnnnnnnnnnnnnnnnnnnnnnnnnnnnnnnnnnnnnnnnnnnnnnnnnnnnnnnnnnnnnnnnnnnnnnnnnnnnnnnnnnnnnnnnnnnnnnnnnnnnnnnnnnnnnnnnnnnnnnnnnnnnnnnnnnnnnnnnnnnnnnnnnnnnnnnnnnnnnnattagctgggcgtggtggtgtatgcctgtaatcccagctactcaggaggctgaggcaggatcacgccactgcactccagcctgggccacagagtaagattgtttaaaaaaaaaaaaaaaaaaaaagcaaagcaatatgtaaagtttataacactatataaaaatatgaacaaaattcccaacagaaaattggcaagggagaaaaaaccaaaaagtttatacaaagagaaatgagagaaatgcagtagccattaactagaaatcagcaatagaaaaacaatgacattagaaattaaagatatgcaaatttattcatccrtattgaagtgcaatgttatgtcccttaaaagagagagaaagaacagaagtacagtcattggagctattgggtaatcaggtctggacaatataatcagtactcacaggtttggcaataatgatcaagagccgcaatctctggttatcctaattctgtaattaaaaattagaaaagctatatgaacaaagttgttcagagcaggttttatttattttatttttatttttatttttatttttgagacaagagtctcgctctgtcgcccaggctggagtgcagtggtgcgatctcggctcactgcaagctctgtctcccgggttcacaccactctcctgcctcagtcttccgagtagctggaactacaggagcccgccaccacacctggctaattttttttttttttgtatttttagtagagacgggggtttcaccacgttagccaggatggtctcgacctcctgacctcgtgatccgcctgcctcagcctcctaaagtgctgggattacaggcgtgagccaccgtgcctggcccagagcagcctttattcatataacaaagatctcagagtaacccaaatatctagcaatcgatttcagcacatttactcaatagactattttcaaatcattagaatgttaaatatgtaaaaacatgaacagtttttgatgaaacaataagtgaaaagtagaactcaaaattgtctgccccactatgttaaaacaatagagaaagatgagctgggaacaaagagcgcataaagcccgaggattggagttgtcaatggatgtgacaatgggaaaatccgtctgagcctgcatttgggctgctaggaggggatttgcatcagaatccacagatcaccagcactgggcagccctaatatttaaaatgcagattctagactcaatcaggcgggagcccagaaatttgcattgttaacacctgtgtgtgtgtgtgtgtgtgtgtgtgtgtgtgtgtgtgttttataaacacagaaggttgggaaccatggataactaagtgaagtcattttgtcactcagatttgaattttctacaggctatagagtgcagtttggctaaagcaaaacctaggtacagtcaggactacacaattccagttcgctgtgggttgggaagggatgggtgggccagtgctggcaagccttgatctttgcccgggcttgtccttctggggagaattacctgcttctgctggactgagggtgccctcatctctggctagagcccgtgctgccatggaagactctttccggtgcccactaatccttgatgttcaccttgtcccctgcccccagagaagtcatccggaccctcccatccctggagtctctgcagaggttatttgaccagcagctctccccgggcctccgtccacgtcctcaggtaaagggtcttggggttgaaaaggtgagattaataccccagggaggaggattgagttagccagtcctgagggctcaggaggaagaggggagcactgcccattgtgtgttcactgggcaacagcaagcaggtacgcatgggttgggggtgggagcctcagcccctgccctttccaggaagccatctcccactgccagattttgatttgaggaataaagatttcaaattatgcactcatcagcaaaacttatttgtgccaaataagggggtaagcagggcctgttcccatcatttcttatcagaaactgaaaggaaagaaaaagaggagatgcctaaactcttgatcctgcctcttgtcccaggaggagcaggatgaaggtgccccccaacccccgcacctgctcatggcctggcaggaggccaaggtcgtgttgcccattaagcaaatgtctgtgtaacaaaaggtgtcatcaataaagttttaacaagttttttaaaaaagcaaaagctgtatctcagaagaaaatacctgcaacaaagcttagggacaaaggattacagacgaagtattcatgtttatattattatttttatttgagacatggtcttgctttgtcgcccaggctggcgtgcagtggcacaatcacagctcactgcatcctcaaacatcggggctcaagcgatccaccccacctgagcctcccatgtattaaaactgcaatacttttgcaccagctaatagctggggattacaggtgcatgccaccatgccagtctccttttaaaattttttgtagagacagatctcactgtgttgcccaggttggtttcaaacttctggccatcttcctgccccagccttctgaagtgctgggattacaggtgggagccaccatgcctggccatttttaaaaaaattcctacaaataattaagtaaaaacaatccagtttttagaatgcggaaaggctataaacaaggcggttcactgaagagggacagggaatagccagtatagatatgaaaaggcgttcaacctcaccttgttagtaactgggaaatgacatttgacactaggcagcctcttcttgcctattagatggacaaagagttgatgctcaagttgatggttgagtcaggacttggctaggatgtggggtggaggaggtgctcacaggggctcactcctctgctgttgggaatggaaatgggttttctgaacggcagtttggccatttgtatgcaaatgtgaactgcaggcatccctcaagcccgcagttccatatgttggcagcttcttagggactacaagtacacaaagagtaacagaaaaaaacattgaaaatcacataaacaggccaggcrtggtagttcacgcctgtaatcccagtactttgggaggccgaagcgggtggatcacctgaggtcgggaattygagaccaacctgaccaacatggtgaaacgctgtctctaccaaaaatacaaaaattagccaggtgtggtggygggcgcctgtaatcccagctactcaggaggctgaggcaggagcattgcttgaacccgggaggtggacrttgcagtgagccgagatggcgccactgcactccagcctgggtgacagagtgagactccatctccatctaaaacraaaaaaaaaaggaaaaagaaaaaaagaaaatcacataaacatggagagctggtgaactgcagtggtgcagaattctattctaaggtgtgaacactgctctggaaagatctccaagactactgttaggtggaaaagcaaatggcaggatgatatagaaactctgatggaagtctccacgaggaaatcagatgggaaggatttaaacccaaagggccacgctggtcaccacaattcagggatgagactggggagaaggggactgggccaagggggattttgagtttgcccacattgttagtttargttttctacggagaacacgaatttgtattttacttgtgcaactttcaaaattcagaaaaaaaaatttttgctttctctgaagtgaatgatgggttaatttctaagaaagtaaaagcaaatctagataaaacaggggctctgcccgacacttgaacttaagtagtttgagtggaagaacacacagtcaagtctttgaagtagattagaagcgagaaaaagcctcgtgagagaggccagctgcagtcccagttacggtgctgcctggtggaggccagtctctgcatttggtggcaggacagagcagccacccrgtggagggtgggtcatgctgccacactcccctcccctttatgagaccctgagtcttgaagaaaaacagaaaaggttgttcttgatttgtctttaggaattcagaaatcaagagggagttgaggctgccttgaggagaggaaagaacgttggtccatggatcagaaacacctgagttcaaattctgattcaccctcctggatctttagtctccccatctgtgaaatggggacagtaatatctctgcagggtttggttaaggagtgagtgaaactgggtgcgtgagacgtctgaccctgctagactctcaccaacatgaggccctttcccttaagtaggcaagacaagctggggacacccaaacccctgtgtggttacttgaggactgctgggaagtgtgaaatgcaatgttatcaaaatgctggctggcctgggggatgggggagacctgggtccaccctgtgtgagaaaggagagccggtaacctcccttggatggttaacctgccttggcgcccacttcctttttttttgaaaagtgcaactgaaaagcaaagtgaaaaaactgggtcagctgatgtaaaccctcaggtagcagtcagaccagtctaccctttaacaggctaagctgtgaattctatcctcaacctcgacactggtgacatttgggactggattgttctctgtcgtggaggactcctgtgcactctaggagtcctccacatcctggcctctacccatgagatgccattagcatcccccagctgtgacaactggaaaygtctcagacattgccaaatgtcccctggagggcaaaatcgccaccagctgaggaccactgggctagcccccaattcacatctcaggtctatactagctgtaaactcaccactctgactctattcccccatcagcaaaacaaggattagaaaaatcaagacatgtgaggattagatgacttaatatatttcagatgtgcttggcatagcatacaaactcatcaaatcatcattaggcagaagtatggggaaagctccagcatttttctaatactttttctttcaagcacgaacgccytgtttgtcagtaacttcatttatgttctctaagatcttgttatatctcccctcccaaaagtcacaaatccaaagagagagccggtggggggcgggggacctgcaattgcatnnnnnnnnnnnnnnnnnnnnnnnnnnnnnnnnnnnnnnnnnnnnnnnnnnnnnnnnnnnnnnnnnnnnnnnnnnnnnnnnnnnnnnnnnnnnnnnnnnnnnnnnnnnnnnnnnnnnnnnnnnnnnnnnnnnnnnnnnnnnnnnnnnnnnnnnnnnnnnnnnnnnnnnnnnnnnnnnnnnnnnnnnnnnnnnnnnnnnnnnnnnnnnnnnnnnnnnnnnnnnnnnnnnnnnnnnnnnnnnnnnnnnnnnnnnnnnnnnnnnnnnnnnnnnnnnnnnnnnnnnnnnnnnnnnnnnnnnnnnnnnnnnnnnnnnnnnnnnnnnnnnnnnnnnnnnnnnnnnnnnnnnnnnnnnnnnnnnnnnnnnnnnnnnnnnnnnnnnnnnnnnnnnnnnnnnnnnnnnnnnnnnnnnnnnnnnnnnnnnnnnnnnnnnnnnnnnnnnnnnnnnnnnnnnnnnnnnnnnnnnnnnnnnnnnnnnnnnnnnnnnnnnnnnnnnnnnnnnnnnnnnnnnnnnnnnnnnnnnnnnnnnnnnnnnnnnnnnnnnnnnnnnnnnnnnnnnnnnnnnnnnnnnnnnnnnnnnnnnnnnnnnnnnnnnnnnnnnnnnnnnnnnnnnnnnnnnnnnnnnnnnnnnnnnnnnnnnnnnnnnnnnnnnnnnnnnnnnnnnnnnnnnnnnnnnnnnnnnnnnnnnnnnnnnnnnnnnnnnnnnnnnnnnnnnnnnnnnnnnnnnnnnnnnnnnnnnnnnnnnnnnnnnnnnnnnnnnnnnnnnnnnnnnnnnnnnnnnnnnnnnnnnnnnnnnnnnnnnnnnnnnnnnnnnnnnnnnnnnnnnnnnnnnnnnnnnnnnnnnnnnnnnnnnnnnnnnnnnnnnnnnnnnnnnnnnnnnnnnnnnnnnnnnnnnnnnnnnnnnnnnnnnnnnnnnnnnnnnnnnnnnnnnnnnnnnnnnnnnnnnnnnnnnnnnnnnnnnnnnnnnnnnnnnnnnnnnnnnnnnnnnnnnnnnnnnnnnnnnnnnnnnnnnnnnnnnnnnnnnnnnnnnnnnnnnnnnnnnnnnnnnnnnnnnnnnnnnnnnnnnnnnnnnnnnnnnnnnnnnnnnnnnnnnnnnnnnnnnnnnnnnnnnnnnnnnnnnnnnnnnnnnnnnnnnnnnnnnnnnnnnnnnnnnnnnnnnnnnnnnnnnnnnnnnnnnnnnnnnnnnnnnnnnnnnnnnnnnnnnnnnnnnnnnnnnnnnnnnnnnnnnnnnnnnnnnnnnnnnnnnnnnnnnnnnnnnnnnnnnnnnnnnnnnnnnnnnnnnnnnnnnnnnnnnnnnnnnnnnnnnnnnnnnnnnnnnnnnnnnnnnnnnnnnnnnnnnnnnnnnnnnnnnnnnnnnnnnnnnnnnnnnnnnnnnnnnnnnnnnnnnnnnnnnnnnnnnnnnnnnnnnnnnnnnnnnnnnnnnnnnnnnnnnnnnnnnnnnnnnnnnnnnnnnnnnnnnnnnnnnnnnnnnnnnnnnnnnnnnnnnnnnnnnnnnnnnnnnnnnnnnnnnnnnnnnnnnnnnnnnnnnnnnnnnnnnnnnnnnnnnnnnnnnnnnnnnnnnnnnnnnnnnnnnnnnnnnnnnnnnnnnnnnnnnnnnnnnnnnnnnnnnnnnnnnnnnnnnnnnnnnnnnnnnnnnnnnnnnnnnnnnnnnnnnnnnnnnnnnnnnnnnnnnnnnnnnnnnnnnnnnnnnnnnnnnnnnnnnnnnnnnnnnnnnnnnnnnnnnnnnnnnnnnnnnnnnnnnnnnnnnnnnnnnnnnnnnnnnnnnnnnnnnnnnnnnnnnnnnnnnnnnnnnnnnnnnnnnnnnnnnnnnnnnnnnnnnnnnnnnnnnnnnnnnnnnnnnnnnnnnnnnnnnnnnnnnnnnnnnnnnnnnnnnnnnnnnnnnnnnnnnnnnnnnnnnnnnnnnnnnnnnnnnnnnnnnnnnnnnnnnnnnnnnnnnnnnnnnnnnnnnnnnnnnnnnnnnnnnnnnnnnnnnnnnnnnnnnnnnnnnnnnnnnnnnnnnnnnnnnnnnnnnnnnnnnnnnnnnnnnnnnnnnnnnnnnnnnnnnnnnnnnnnnnnnnnnnnnnnnnnnnnnnnnnnnnnnnnnnnnnnnnnnnnnnnnnnnnnnnnnnnnnnnnnnnnnnnnnnnnnnnnnnnnnnnnnnnnnnnnnnnnnnnnnnnnnnnnnnnnnnnnnnnnnnnnnnnnnnnnnnnnnnnnnnnnnnnnnnnnnnnnnnnnnnnnnnnnnnnnnnnnnnnnnnnnnnnnnnnnnnnnnnnnnnnnnnnnnnnnnnnnnnnnnnnnnnnnnnnnnnnnnnnnnnnnnnnnnnnnnnnnnnnnnnnnnnnnnnnnnnnnnnnnnnnnnnnnnnnnnnnnnnnnnnnnnnnnnnnnnnnnnnnnnnnnnnnnnnnnnnnnnnnnnnnnnnnnnnnnnnnnnnnnnnnnattgatcattgtgcttaggcagcagtggtaatggaggtggtgatagtaaaagtagtatactaaagtagctgggtggaaaattgaggtcaaaagcaagtgcagcctggctgctatattgagcaaggggtgaggtaaagggacatcacctgcctggtgataaccctggttccattctgctttgtattcacattagccatacatgtgtctgattttctcattccacttcttattatgaacttaataaggtattaataacttaataaggtatcttattaactctacatttccacacctggcagcatgtctaacatagaatagatgctttgtaaatgtttcttctgtgaataagtgcatgagaccatgtacttggcatcaggtagacaggatacatgtcttcctctgccatttactagctgtgcgacctcagacaagttagttcatctctctgggccctgtatgtactgaacaacttaacggagcatcttcgttggccagacactgttctgagccccagtgttgcagtactgaacacagtcctcttgatctccattctcacggagcctccattcagcagggaagacaaacaatgaacacatattggaaggagatgactttagctcgtggtgattgaaatggaacagaacaaggcaacttgatagaggtgacctggtggctattttagacagggtggtcagggaagacctctttgtggggctgagacctgaatgatgaggagttgcccctcccaggggaaattgagtctctggagattcctcagaagggaagctcaaggcagatatgagttgaggatgagagtggctcagatcttggtggggcgggtgaggtggggggctgcatcatataggacctcggagggcagggaaggggtcgggatcattttctcctctacgtggagaagaactgtactggggtttcaagcagcagggctgggtctattttggaagtaggacgggaacaccatgcagcaggtgtaggagggaggaaaggtaacatgcaaggacagtcctcgagttttgtttaagcaacggagtgggtgaggtgagaagcaccgggggagaggcagatttacagggaagaagaaatgaagatctattttttggccatgtgaattctgagaagattgtagagatccctgtgtcctcatctgccagaaggggataataatagaacttgtggggctgcggggaggctggaatggggtgaggtgcagagagaacccagagcattgcctctcgatggttcaggttcagtgatgctgccctgatcctctttccctcctctcccaggttcctggtgaggccaatcccatcaacatggtgtccaagctcagccaactgacaagcctgttgtcrtccattgaagacaaggtacgtgtggrgctcctgcggcttctcttggtctcctctttggtcccctctttgcatggagaatgcccagatgcacaggctcggcgtccccttgaccctckgtctctaacgctgcygcccacaggtcaaggccttgctgcacgagggtcctgagtctccgcaccggccctcccttatccctccagtcacctttgaggtaagtggccatgggacagcagagcctgggcttgggctccacagctgggcagagagacatgttcttgttcctgtggaaagagggattggggctttagctggggaagagcagggagcgcattagccaagaatggcagtcagttgacctttgtcgctgtgatggcggttcaacgtcagaacgggcacccagagrcaactgggaaatccccttcggagggaagctacaagggaggagtgtctcattgggccaggcaccatgtaaactttgtccttctcaaaatggcagagatgagtgacatcagacggggctgcaaagtactgcctcaagggggtggggaattcagaaaaaaaatcgtgcgattcctgtgatttccatgagaatgactggattagaatctccaggcttgacccaaaatgcgttcttctttacaatccccagagattctagtatattcaccccagcactggtcccaaattcaggaatccagtgtgagacccgcaccccctccgccacacacacattccccaccccaaagtccgttctagacctggtgattatcctctattaagataaatttccattttctgagcatgcctacgcaactgttgtgggttttcttttctattattatcagtaaatgttcaatcagtggttgtaacaaggcctgggagtttaaatctgttactaaaatcctttctggaagtaggtgacacatcagattaatgagtgttgtcaaagtcatcagtgaatgaaccatttccagcaattcgtctgtttccgccagcaaacctgttggcagaacggctcccccacacacagtggacgagggggatgcccctagagtctctgtgattcccgggagacgcctgtggaaacatgcacgtgcgccgctggggcaagagaagcccagtggccccacgaaggacgcacaccagaggttgcccagccatgtagacaaggggttcgggcgggggaagccttgcaaaagcccaggcagaaaatcaatcagtgacacatctcttctcttctaaggtgaaggcagagtctctggggattcctcagaaaatgcagctcaaagtcgacgttgagtctgggaaactgatcattaagaagtccaaggatggttctgaggacaagttctacagccacaagaaaagtaagacccctcgtgcctatcaaccactgcccctcacctgcctgtggaattcctgccctctcagctcacctctcagaaggcctgccctgcaggtctgtcttccgcacgcatgcgcgcctgcgctcatgcttttgtgtgtgtgtgtgtctcttctcttccccaccaagacccagtgtgatccatgctatcacctctcagtgccgggcacaaagccttgcacagatgaggtcttgttgacaattgggtagtgtctgtagcacaggataaactaaactgtgagtacatggactctggaaccaaactgcctaaattcacgtcccagctctgccacttagcagctgtgtgacctgggacatgtcatgacctctctagccctcagtttcctcatctgtaaaatggggatgataaaaattatgtgaataatatgctcaaggctctttaggctagagcccagcatgtagtggccacttwgagagtcagctgttattagtaggttctgagaaycatcaaatcaactcatccataaaatggaagctcttcacacaacaaatgcatatagagaagctgcagtggrgcaagacaaggggatccagggccagcagggcagatgaggcccctgcccacatggaatttatattctggtgcattgagtggccgatagagactcaaatacatctgtcaatacagatgaatgatcagatggatgatccagctatgaaaagcgctacaaagaaaacaaaacagggcaaaggggtagaggttaactggcaagaggggatagtgtagaaagggcagacatggaagtttcctctgagtaagaggcacattggcggagaccccgaggctgagaagcaaccagtcgggcaggggtctgagggaagagcatcccagctagcagagcagcatgtgcaaacgctgggagatgggcactggggcccaggttagggaggccaggcagggtgtcaggaggcaggggggtaggcaatgcccagtgcggggccacatggggctggagaacagcagcagacaggaccagagggctgacgaaagcatgagagtttcctgagcagcctctcgttctggctgatggcgaatggacatctttcttcatctgggtggccaatgggttcccccgagaaacctgatcaatgcgtagacccttgcctcagataaatcccaaccttcacacaacagtttgcatcccatgtcaggttttaagaccactatgaagccccccaagtctctgtggctacaacacttttttttattctttagtgtctcaaagttcatttagagggcatggttaaggttgccacaattagcagataaaaatacaggaggcccagtaaaatttgaatttcagataaacaaccgatatactatatgtatgtcccatgcaatatttgggacatacttatatgcaacaatgattcacagtttttctgaagttcaaatttaactgggtctcctgtattttatctggcttcttcaggcatgatcagcacctttttttttttttttttttttgagacaaagtctcgctctatcacccagactggagtgcagtgccacgatcttggctcactgcaacctccgcctcctgggttcaagtgattcttctgcctcagcttcccgagtagctgggactacaggaccaccaccacgcccagctatttttttatttttagtaaagacagggtttcaccatgttggtcagtgtggtctcgaactcctgaccacaagtgatccacccgccttggcttcctaaagtgctgggattacaggcatgaaccactgtgctcagccatcttttgttcttaataaagtcgtatgcactaagtatggggaactgggaggaccttggcagggcctgtgcattcagagtcctctctgtccctgtgtccttggagacaggatgctctgtcccccaggtatagggagggctcctctcatatgaggctctataacctgctttagaggaatgtcagagggtccttcctgcacctgccattgctcaaattccttcagctgaaaatattcaacatgcttaggatgccatattttgcaatagtgcatcctgaaccccactgatagcacagtggggtgcaagtagcccagtcttgagtcccaggtcagccacttgtgacttgggtctggtgccttttctctggtcctcagtttactcttctgtccagcagggatagtagcagcatcttgcagggctctcatgagtcttatgtgggtgaacatcaaagcaactggtgcccaacctccagggagtgctcaatatcattgactgtcaccaccaccaccaccattattattacccttccagggtagccgtgagggaggctgatctcagggaatggctgggggtgacatcatagctgtcatagtcctgcagaggggagctcatagcatcatggtggcccctgtgtatagtggcaagttgggcaggagaaatggggagtcactgatgatttgaacagaaaggctgtgtggaaagtgagcttagagtgatggtttcctcttatctgttgatatgatttggctgtgtccccacccaaatctcatcttgaactgtagctcccataatccccacttgtcatgggaaggaccgggtggggaggtaattaaatcactgggatgagtttttcccatgctgttctcatggtagtgaataaatctcatgagatctgatggttttataaagggtagttcccctgcacaagctctcttgcctgccaccatgtaagacgtgactttgctcctcctttgcttctgctatgattgtgaggcctccccagccatgtggaactgtgagtccattaaaactctttcctttataaattacccagtcttgggtatgtctttattagcagcgtgagaacagactaatacatctgttaargagagaggggtggcccaacttggataagaggagatggaaacgttaagatgagtgaagaytgtcagagcacctgattactaaaaaacttaagattgaaagaaacacctcccagggttctcagaagtgctgtgaacttttgtcggtttaatgcaacagatatttgcgtagcatcttctatgggccagcccttcatcgtgaacgcttcctctaaggatttgctgtggagaagggaacgctggcacatgggcaggtattagaatgtgctccagagggaggttagtcccgagggaggactggttagctcttttggggagtgagggcaggagacttcacaccaccgaggtggctctgaccgggatttgaaggatgaataggattttgccaagcatgaggcaggggagggcactggtactgagagaatgggktgtgcagggaacgggacagggggttagtgaaatcacacattacatgttgctcatctctcactgtggttctggagagagaagccgctgggcacgccatcctaggtgtgaacagagcctagaatgcccaagtaaggattggagctgttgttgctgagaagttggtattctcctttgtggaaacagatcagggatgggtgaaagagctaaactagagatcactggccctaagaaaatccagctctagttaagaatgggctatgcatgggtgcagtggtacgcacctgtattcttagctacttgggaggctgaagtgggaggatcacttggagccaggagtttgagttcaccctgagcaacacagcaagactccatctctaaaaattaataataataataayaataataggctatttcagagcaggtttgtgagccctgaagagcatgggtgcccacagactgccagcccactctccgggaatgtgcccacctrgctccagtcctcccgtcaatccaggatggtggagcctgacttcctctctgtggtgacacctgtcacatcagagcacaattgactcctcacaaattccctccccctaaaaagggcaaggtctttcctttacacaccctggactctgcaggccccagctcgggccctggggctcagcaagtgcgtgctcagggattgccaattgcctgaggcacttgcaatgtcatccatcataaatcccagttctgtctcccctctttaatgtgggcttcacaaaggctgggatgtggattttttsgttgttgttaaccactaaatcccagagccaaaacagtgcttagcacagagtaagtgatcagtaaatgcatattgagagaacgcatgcatgaatcagtgaatgaatgcaagaatgaaggaacgcacacaggaataagaatgaatgtaataatgaatgaatgcacacatgaatgagagaatgaaggcaagaatgaatgaatctatgcatgagtgagcaaatgtgtcctaaaccaggtaagatcatacagttctcatggatgcatgtttaagtggcttctttacagttggtgctgagaggcagtgtggttcaagagtgggtgctctaggtaaaccggatgcatgtgttggttccatgacttgctaatagtatgatctcaagtaagctacttaactcctcaaagcctcaatgatgcctccacaagacaggggttcctacaggggttgttgtgagagttaatggggtaaggtgtgtccttagtgcggagtctggctcatggtgagtttccatccatggttattatgacagagcggtgctcgcctggagggaatctgtggttgcaagagttggagcttccttaccctattttaatcaccatgttcatgaatagctttggcatcatggtcttctacacataggaacagccagttgctgtatgttcaaatcataaaatattcatgctccgagcacctgctatgcaggtaccaggctttgggatgcgaaggtgaaccagccagccgggatcctagctttcaggaaagtttcattcaaatcagggcaaaggagaaaataaacaaacacacaaatatacaaaccaggaatgtgtcagggaatgataaactctagacctggggatttaaatagaaaaatatgacagtaatggggaaaagcctttctgtggacatgctgtgccatttgaaccgagacctgagtgtcaggaagatgctggctgtgaccaacccagggaaagaggcaactgggctcagtcccaaggcaggaacaagtatggcgtgtgagacggctgggcggccaggactcagacaaggctgaggctggacaggggccaggcatgtgggcttgctgagccagagtaccagctcacgtttccttccaaatgcagcaagccactattaggaggttttcagctgggggggtgtggtgtgattccacttcaaaaagataactctggctgctgtactgagaataaactatgggaagagaggaagagtggagacagggacaccaattaggaggccatgatagcagccaggcaagaggcggtggcagctggagatgggaaaaggtgaacggggtgggaacgtttcaaaggtagaccagccagcacctgctgatcgataccatgtaacaggacgagggaaacggaacttctagtgttatttcactgggcgtggggaaggtggggcgctgactgactctgatggaataataaccctgatcaaacaagatatcacatcctgggggcaaccgcacagtcctgcaaacagatggcaaggaaattcaggggaaggagacatggcctgatcgtagcagactggaaaagtctcagcatttggttagcagtggtagaaatcggactgtgggatgcttactgaagtgcagacgaggctgatgtcatttccctttggggaggcttccagctcaaagtgatggttaaatgcatgctctgtcatcagttcccttccggaaggcaaaacccacagggaaagagagaatgggagagcaacaatattctgaaagccggaaaggagatggatagcgagagtcacttgtaggaaccaaaaaacgaaaccctaagcaggtggaagaaaaaacagagacactgactcacacaaaacccacaaagggctcaggaactgagagccttggggaccccaagaagtggggtgaaggtggggttatacacagcagggtcagatggaagtctatttaaagacagttcagcccaacagatcacactccactccatgtagccagtggctcctcctcactcctttggcagaagattggatattctttggagaaggtgaagggctgggagatgccaggcctgctgcaggcaggagagcctactgaaaacagaggactaagggacagtcacttgctgagtgctgagaccccagccttcttccctgcccagctcccaggatgctgctggccagccccaccctccctaggcaggagttagaagtcttctctgggaaacttgatcagcccaggggcaaagatggaaaggtgttgccatcacrcagtttccccaggattcagcccatcagaccaccctgcggagaagccctgctcgacagaccccacctcactgttggacacagacagccaaggatcaccagacactggagggaagctggggacaggaracaggggacacaaagacaaaacacttggagggatcaaattctttttgtttttttttgagacagagtttcactcttgtggcccaggctggagtgcaatggcgcgatctcagctcgcagcaacctccacctcctgggttcaggcgattctcgtgcctcagcctcccaggtagctgggactataggcatgcaccaccatgccyggctaatttttgtatttttagtagaaatgaggtttcaccatgctggccaggctggtctcaaactcctgagctcagatgatctgcctgccttggcctcccaaagtgctggtgttcctggaccaaactgagggtcaggctgctatttcttgtggcccaataacaagatgcacatgaactggggaggaagacaggttttattttctgtaactggttacagraagaaggcctggaaattatcaccagaccaactcaaaattacaaagttttccagagcttatataccttctaatctgtatgtctacgtgtgtgtattcattgaaagatataagtgattaacttcttttaatttataactaaggtctgagtcctgaagaccttcctttggagcctcagtaaatttacttcatctaaatgggtccaggtgctggtgtgattacccttatcttgtcttctgctaaatcacggaggtttggggagttccttcagacctccaataaacttgttaaatcctaaactggtcctgttaagaattccttcgcctaggcaaaacttctgatgggcttttgttacattccagcctttgtataagggcactggcttttgatatttaacttaaccactcagtcagtactgaaaccgttgtcacggaggcctgaattagtgagacctggcctgccacaccgggattacaggcgtgagccactgcacccagccttggagagatcagattctacagataaaaagaaatgggcctgtggaataacagaattatatctagaaaggaacagtaagagaataaaatgaaagtgaaaaaggatgaggagaaagagagaagggggaagaaggggaaagggaaaggaaggacaactctggggcaataaaaaatattatagcagtaattaaaaaaaataagaacccaatggaagagtggaaagatacagtttagaaaagctccgaaaaggcaaaacaaaaggacaaagtgatggaaaataggagaggcaagatttttacaatttaaaagaccagatcagggctggtggccagtggctcacgcctgtaatcccagcgctttgggaggccaaggcaggtggaacacttgaggtcaggagttcaagaccagcctggccaacatggtaaaaccccacctctactaaaaatacaaaattagatgggcatggtggtgcacgcctgtgatcccagctacttcgggaggctgaggcaggagaattgcttgaacccaggaggcagaggttgcggtgagccaagatccacgactgcactccagcctgggtgatggagcgagactccatctcaaaaaataaataaataaataaataaataaataaataaataaataagacgagttcaggaggcccaatatcaaaataatatgtgtcagtaagagaaaacagattgagaaaatttattaaagaattcaggaaagagtctcagaacagaataacacttgcctccatgttgaaaatggccaagtgctcacacaacacaggaggcccacacaaccctggaaagtctcacaatgctggactccaagaaaagatcctaaaaatgttcagagcaaaagatagattacgccctgtgtcaggggccccacaagaccacccccaggttctgtgattccctcagagaacccacaagacccagtggatgatcatattcccagctgtgatttattacattgaaaggatatagagcaaaatcagctgagggaaaagacacatgcataggatgaagtctggaagaaaccaggcacgagcttctaagagtctgagcctgagacctgagtgtcaggaagatgctggctgtgcccaaaccagggaaaggggccactgggcatagttccaagacaggagccagtgtggctggtgagatggccagatggctgtggctcagacaaggccaagactgggcaggggccaggtgtgtgggtctgctgagccagagtgccaggttcacacttccttctttttttatttgagatggagtctcactctgtcgccaggctggagtgcagtgacacgatcttggctcactgcaacctccgcctcccaggttcaagcaattctcctgcctcagcctcctgagtggctgggactacaggtgcccgccaccacgcctggctaattttttgttttgtattttagtagagacagggtttcaccatgttgcccaggctggtctcaaactcctgagctcaggcaatctgcctgcctcagcctcccaaagtgctaggattacaggcatgagccaccgcrcctggcccacgcttccttctaagtacagcgagccaccattaggagtggctccactcttctgtggagtcacaaaggacacacttccctcctcccccagtgaggtgtgacaacatgtgtgaaatgtggttgttaactggsgaatggtcacatagacaccctctacctggcaggtacccagattacagactcccaaaaggaaaacaggtgctcagcataaaccatattgtttgtacaaacaatgtaggcacagcaagccactcatcagctctgggagtggtgggagccctcccgaaatctaagttcccagatgacagcagaaagccagcctttcaagcaagcccttctaaggacagcagtctcgggtctgttgtgctaactcttttctgaacaagagaatcagaatgacattgtttctccagcaatcctgaaaactagagatgatggaacaaggttccagagtctggaggagaattatttcaaatttagagttctgtcagttaagtgtgagggtcgaattctcagacacgcaaggcctctaaaaatgtatcaccgattcttcctttcttggaaagccactagagatgctgctctaccaaaatgagggtgtaaaccaagaagaggaagacctgrggtccaagaaatgggatttaatacgagagagagaaacgtattcctggattatgaagtaakgccccaaggtaaaggctrtgcctcrgcccttgaagtcaccagtccagagaagacccagaagctstgggaaaggctccctcaggacaaaggaactgatgaaagtagttggtcacatggaaaagagagttataaactggggaagaattagaaacaataaaaaaaaaagtatggcaattactaactccaggaataacacaaagttgtctagaaaaagaraaacawtcagggctggtctgtcaatagcatttygataatcagaataacaaacactgagtacttatctggccaaaattatgatataattgttagaaggatgatgtggggactgaaattatgcattggcagggagtcaagttgggggagcaggttgtgtgtgtgaaagaaatttcaaccctcatcttccatagtggacaktcaaaaatgtaataggacataatgaaaactgaaacatcggaaagtattaatctaagcatttttttttttaagaaacagagtagaattccaaaagaatccattaagagagttgaaattggttgcctatagggagctggacattgaagagaggttgggttgtggaggactattgtttgcaaaaaccttatagaacaacgactcttttaattgttgatgacagtaaaatgtaaaattaaatttagatataaattaaaaacaaagcaaaagaaggaaaggaggaagagtaaggaagaaaggagggagggagaagaggaggaagaagaggagaaggaagaagagagaggggaaggagggaggcagggagaaagatgaaaagacgatcacgctgtctctgctctggmcaggccaactcttgcttgttccagacatcaccctccccaagcatgagcctctcttgggaagagcagctggaagcagagggagctgggagaccagacacaaactcggggctcagcttggggacgggagttgatagtcaggtgcctggaacataatggagacyrtccatattggttgaatgagtggatgaatgaattaatgaatttcttttctcttaagtcctgcagctsattaagtcacagaaatttctgaataagttggtgatcttggtggaaacrgagaaggagaagatcctgcggaaggaatatgtttttgctgactccaaagtaagtgacagcaaacttctaaartgggctgtgaggtagggaggggacacaagcgttttgaggctcgctgtgtgccagggagtgtatcattagctcactcagttcccagaacaacccatttcacayctgggaaaggtgaacttagagaagttgaggaycaygttccaggttggcctggatttgagccatcactgtctcaggagtagggaggcttcccactttgcccagctgcctcccagcctcgaggccacatcctttatgacccacatctaactcagccccacacctgggggaaaggctttcagcttctctgggctggacttgggaaatctttgggacactcctggattgattgattgattgattgactgactgacttgagacagcgtctcgctttaccatctaggctagtgcagtggcgtgatcacagctcacggcagcctccacctcctgggctcaagggatccccccacccacctcagctgaggtgagacaagtagctgagaccacagacacacaccaccagctaattttttatattttgtagagacagagtctcgccgtgtttcccaggctggtctcgaactcctgggctcaggcaatcttcccgcctctgtcacccaaagtgctggtattataggtgtgagccacccctggatttaaatctgagtctcgactggagctccatcccagagactttcatttctacactttgccccrctctgcagaagtgagatgcccctgccaggatggrttcctggggtaagaggtgctgtgggccactggggaaacccaggctgggcctctgtgcccccacartgggttctttgtgacctgacccctcatctcagaaatttgaaccagggccaaaacctatcatcgtgaacctcattcattgttctctgccatgcagctcgtgtgaggcagtaaaaatggattgtaccagcctgaacagcctagtcagaccccatgtctacaaaacaaaaaaattaggccaggcacagtgggtgccttatgcccataatcccagcacttgggggaaggctgaaggcgggacggttgcccgagaccaagagttcgagactagcctgtgcaagatggtgagacctcatctctacgaaaaaaaaaatagctgggtgtggtggcatgagcctgtagtttcagctacttgggaggctgaagtgggaggatcgcttgaacccaggagtttgaggctgcagtgagctatgatcacaccactgcactccagcctagatgannnnnnnnnnnnnnnnnnnntagatgacagagcaagatcctgtttcaaaaaaaaaaaaaaaaaaaaaagattgcagcgcaataagggtgtccatcacatcaggtgctggctgacatctcacatcagggacccccagcaaggccaagggacaagcgcttctggtgcaggcccacagtgatagcttyccactgagtgcccagtctccgctcctactttcacctccaaagcatcaggggtgggctggtgggaggtctaaggtgtccagagctgtcaggaataatagggaagggtctgggagaaacaagagaatggggcccagacaggtggtgggagatggagagaaagaccgctgggctggaatgctttctgagcacctgggcataggttcaaacaccagctctgccccattgctgygacctcaaaaggactgaggcacagggataaatggaggccatgaatcttgagccactcccaactcgaggcaggttatagtaaagatggtcattatgacatctttgtgagctggtgtcttcagggaggacttactgagatttgcaattataaggttgaatcatgtaaaatttctgtctttgcaggttgaaacagtcaaacactggtcatgtcatatgttacaccctgaaatttgtgtactttgttaaagtccgcctgctctattgattgcatcctaagagagggccaactgaggctgcttggtgccccactgggtaccccagaaaaatacgtgaaaaatattgagtaggctatgaaagccttcatgtcctctcttctttttaattagtttctttaatttaaatgttctttcattacataagtaatctattctccttggtgaagacgtggcaaacacaaacaagcaaatgtttaaaataaaaacactcgtataccatgagttaatctgggactatgccccttccagatgttttttaattttctctttctttcttccttcccttatttctttctttttctgtttcttttcttttctgagacagggtcttgttcagttgcccaggctgaagtgcagtggcaagatcatggctcactgcaacctcaactttctggcctcaagtaatcctcccacctcaacctcctaagttgggagggactacaggcatgcaccaccatgcctggctaatttttttattttttgtagaggcagggttcccctatgttgcccaggctggtctcaaactcctgggmtcaaacaatccttctgcctcagccccccaaagtcctgggattacaggcatgagccactgtgccaggcccaaatgttttattaaaaatgcaatgatgctattcatatcatttgtcaactagcttttcatgcttaaaaatatatattgtggccacctgtccttgttggcaagatagttctggatcacacttgttaaacactgtgatattctagtttatggatggtctagaatactttttttttttgagacagactctagctctgttacccaggctggagtgcaatgatgcgatcctggctcactgcaacctccacctcctgggttcaagcaattcttctgcctcagcctcccgagtagctggcattacaggcaagcaccaccacgcttggctaattttgtatttttagtagagacaggagtttcaccatgttggtcaggctggtctcgaactcctgacctcaggtgatccacccacctcggcctcccaaagtgctgggattacaggcatgagccaccacacctggccctctgatacattattaatgaatctcctaaggctggacagtaaggttgcttctgatttttttctgtgctgaggcctgtgctgcagagccgtgacagggttggacttctgcgcagctcctgatcactttgttaaastcgcacctttgcaggggartgtctaggccagaagccactygcttatgactttggacacatgyttccaggttgctgtcctggaagttcacactgatttacgctcctctcagttttcttgaagctgaccaagtcctttgcaaagtgtaatgtgcagggaggcagaggcctttctaagtctgtctgcccttccatccctagaagagagaaggcttctgccagctcctgcagcagatgaagaacaagcactcagagcagccggagcccgacatgatcaccatcttcatcggcacctggaacatgggtgggtccgcgcgccccctccctgcagtcaccccctctgcttctgctttcctgactcaggcatcctcaaggtggggtggagtgacgacatccatgtccccttccttcctgccccwgggccctgcccctaagccccagcccacccgcacaacctccttcctgaggaattccacccttttcctgagatgatgggtaagaaaaacgagctttgggactatcgtaccccaagagcagctggcgtgggttactctgtatgtctaaattggaaagttttagggaaagagtctgaatatctaggtgaaggggctcatgggaactctgccagccctaggcagctcaccaaggggccccaggcctgagagaaagaagtccaccctgagtagggttgccagatttatcaggagagagacagagaggtaggtacgtagacaaaggatgcccagttaaattttaacttcatagaaacaattttttttagtatatgtttagctacaaacaaataaatactaaatatatatgctcatagacattatgctgaatatatagtatatatacatatgctaaatatatacagtatatatacatatgctaaataagtgtaattattatattaaatatgaattatactaagtaatattagtttaagcatacagctaataatatactaaatatatgctaaatatattttatattaaacatatatattgtatatttatatactaaacacatgcactctactaaatataaataatactaaataattttttagtgtaagtgttcaggtagaaatagattagatcgaagacatccagataaacttattctaaaaactaccagtttatctgaaattggaatttcactgggtgtcgtgtgtcccctacccttgtcctgagaggagtctgggaggaagagggtgagcagtggctggcaggggcctcctggaagtgaagtgacagcttgtcactcgtgtcccagggccacagcagccgtggagtagagcccgggccagtgccccagggggtcacttgtccccttcggtccctttcagtgtttctaataagagacaatagtctgcctgatctcctccctctggacatggtcagggatgtccatgacacaagggcaggggtgcccttcccacagaagagtatggaaggagccagctgaggccatgccgcaggagggccggggacccaccagcccgggggttcgggcmcccactttgagcctcttgggggagcagaatttagccacagtccatttactccaatgcttggcttctttgcacttgtaaggcaagaagctcatctctttgaggaacaaagtttgctcatccttcaagggcattgtagggagaaccgttcaaaatttcttgattgagcttcttcaactcagttttgaaatgggaatgcggaggagtttccacrctctcccgtttctctggctcacacccaggcatccctccgctctgggctgggatctgtcttgcaagggagactttgttgtctcccaacaatgggttagaacccgccatctaaaacttgtcagttcccttggctgtcttgagaataggatgtgagttccttgagggacaggactgtgtctcaattatcgtagcctcaaagtgcaggacagtgtctgacatcagggaatcttctggtgtttctataccttgaaacttgacattacgtttaaaaagaggcttaactgagctctagccctaaccgacatcctgggtgaggttggcgcccaggcctccattgcaggcatttctttgggctgcctggatggtcttgtgtaatgacgtgacctccctcacactcccgccctctgttttgaattctcctaatgctttgactcgatgtgcctttgactcacttggtgttgggttttgctgttgaaggtaacgccccccctcccaagaagatcacgtcctggtttctctccaaggggcagggaaagacgcgggacgactctgcggactacatcccccatgacatttacgtgatcggcacccaagaggaccccctgagtgagaaggagtggctggagatcctcaaacactccctgcaagaaatcaccagtgtgacttttaaaacagtgagcagctggctgcacgctgggtgggcttccgggatagaatctttgctcggctgggctgtctcagaggcaagggcgggctcagcctatcagctctcagttttcaaggatgtctggaggcccccactgagagatgcgtctgtattcagaaataaatgggatctgtggggtattgctgaaaaccactgrgtcctctatcttcccacccttggtcagccccggttctcatctttaggatgttttgtctcgcctatcaagcatcgctgggagtcccccgaagggttgggattacagacaggataccccatacccaggggctgcggctggggctgggtgtgaatcactgtgccctggttcacaccctacacttgggccgagtattgcaacgttgtcctcccaccaggtcgccatccacacgctctggaacatccgcatcgtggtgctggccaagcctgagcacgagaaccggatcagccacatctgtactgacaacgtgaagacaggcattgcaaacacactgggtgagcagggcggggaccctgtgttcctcccacaccctctgcctcaactctcgcgaccacatcatcctgatcccaccagtagttccccgggttaaaaacagagagcctcacatcctcagatcctggctcagtcctcagcaaataggggtgattggtctccctggctgaaactcactcagggtctacaccagcagtcccagggatctagctaaaatgcaggttccgacccagtagatcttgggtggagctcagggttccaagtttctgacaggttcccaggcgacttgagcgctgctggtcggcccgtgggacccattttaagaagcaagaacctagaagaggcattggccaacttttgcaggaaagggaagggcctgacagtaaatatttcaggctttgcaggccactcaacactattcctctctgcctttctggtgggaaagcagccatagscaacccagaaagcgaatgggagtgactgtgttaccagtgagaccttccttacaagcacaggcgggaggtggctggcccctgccctcggtccctgtgcaccaggttggatctggaaaygctggtgtcagtggagagttgctggcttcagagagcagtaacaagggcaagaagtcttcataagtgtaggagtgcaagcctgtgtgtttgtgtaggatgtgtgtgtgagtaggtctgtgtatgtgagtttgtgtgagtgasagcgtgcatgtgagtgtgtgagcctgtgtaggtgtgtgagagtttatggatgtgtgtttgtgagcatgtttatgtgagtcaatgtgtgagcgtaccaccccatatctatgagtgtgtgtctatatgtgtgtgaatctatgcatgtgtttgagtgtgtctatgtgagtctatgtatgtgagtccgtgtatgagtgtaccacccatatctatgtgtgtgagtgtctgtatgtgtgagtccatgcatgtgtgtttgtgtgtgtttatgtgagtctacatatgtgagtcccgtgtgtgagtgtaccaccccgtatctatgagtgtgtgtgtgtccatgcatgtgtttgtgagtgtatttatgtgagtcctatgtatgtgagtaccgtgtgtgtgtaccactccatatctatgagtgtgtgagtgtcctatgtgtgtgtgtccatgcatgtgtgtttgtgagtgtgtgtttatgtgcatctgtgtgtgagtgtaccacccccgtatctatgagtgtgtgagagtccatgyatgtgtttgtgagtgtgtttatgtgagtctatgtatgtgagtccatgtatgagtgtaccaccccatatctatgagtgtgtgagtatctgtgagtccatgtgtctgtgtttgtdtgtgtttatgagagtctaggtatgtgagggtgggtgtccgagtgcatgtgcataagtgctagagcctctctgtgtgtttgtgtgtgtgtgtgtgtgcccgtgtgtgcacgtggggtggtatacacacagggctccagggctggcatcaggggcgaggccagtggtttttggtggttggagtcagtggagtcaggaacaggacagagtcccagagataacaggaaatagaagaattgctgcaatcgaacgtgcaaagctctctcaacttttctgctgacaaaccgcaaactgcccgcgtccacccccactcgtcccccttccttcctgccacagtagaagggtggggctggcgtggctatcctggctgygcccacgccctcctgctgcccagcaaccrccccgggtgtggattccatcgctccctgggcttccagtccctcccaccagcccctgccccgctgtgcagaatatgctcggacctcctagggccacataaaaccaccccctcagccagaccagttcctggtcatcctggcctcagggctgggcactgggtcagcttctgagcaggcaggagctctgctcatgtggacctgacacacattgcatgagcagacgggaggaaaagaagccagttcctgggagggagtgcactggcgaaggagtgtgtggcgtgggcagagagcagaggtcaggggcctccctgagaagggcagtgcgactggcatctgaggggtgaggagaaaggcctggccagagtcccagctttatgaccattgcagggcagcttctgggctgtgcagctcacacacaccttcccctccttcccctccttcccctcctytctgccctggggccagcctccctcctccactcccctgaaatggctcccagccataattagcacaggacagaaacagcaaatgctggtcggtgtggtaggctcacgcctgtaatcccagcactttggaaggccgaggccggtggatcacttgaggtcaggagttcgagaccagcctggccaacatggtgaaatcccatcccactaaaaatacaaaaattagttggatgtggtggtgcgcacctgtaatcccagctgcttgggaggctgaggcaggagaatcgcttgaacccgagaggtggaggttgcagtgagctgagatcatgccactgcactccagcctgggtgacagagcgagactctatctcaaaaaaaaaaaaaagtccttagaacaaccaaggcctttctaagagtgtgccctaagcaaggatgtgtgctgaatgctttgaatcatctcatttgatataaacaccctgctaggcacgatggctcatgcctataatcccacactttgggaggccaaggtgggaggacctcctgagaccgggagtttgagaccagcctgggcaacataggaaggtaccatttctacaaaaaaaaaaaaaaaaaaatggcatagtagtgcatgcctgtgggcccagctactcaggaggctgaggtgggaggatcacttaaatctgggaggtcaaggctacagaaagccatgattttgccactgcactccagcctgggcgacacagactttgtctcaaattagaaaaaaaaatacaaacactcgggcagggactcttattattcccatttgcagatgaagaaacagagtctatggagatgatccataacttgcccaaggccccgggataagaatgtggtgggcagggattgaaaccaggctgtcgggactggaaccagttgctcagttccaggtcaccctcccaggttgcgggcagaggggcagggctggagagctaggtgcagtggagagggctggagggcagaaagcctgtgtactcccccactgggtcctgacaaggttgagccaggtgatatccaggggtcccttcagcctatggcctatccagagctgtccaaccaaaagaaaatggggccgggtgccgtggctcacgcctgtaatcctagcactttgggaggctgaggcaggcagattgccggagctcagtagtttgagaccaacctgggcaacacggtgaaacctygtctctactaaaatacaaaaaattagctgggtgtggtggtgggtgcctgtagtcccagctactcctgaggcagagacaggagaattgcttgaacctgggagacggaggttgcagtaagcagagatcgcgccactgcactccagcctgggagacagagtgagactctgtctccaaaaaaaaaaaaaaaaaaagaaagraaggaagaaaagaaaatgggagccaaatagatcataaataaatagatttatgatcaaaatagattacaatttgatttattacaatcaatagatcaaattttctagtagccacattaaaaagaaaacaagtgaaattaatttcaataatagattttattgaatttcatacatccaaaatacaattatttcaatagatatttaatgtaaaaggttattagatattttacagtctgtgtttcttaccaaggccacaattccaatgtgtattttacactcacaacctgtctcattttgtaccagccacatttcaggtgtttgatagtcacatgtggcctgtgcctgtattggacagagcaggttctcacctgcatgtgtcagaatcacctagagcaggggttaacaagcgttttccatagaaggccagatggtgaatattctaggctctttgggccacacaactgtcacaatgcttcagctctgccatcgtagtctgaaagcagctacagacaatccagaagtcaataggcatggctgtgttccartaacgtgttctttacgamcactgaaatttgaatttcgtattttcatgaatgacaaaagattgtttttcttttgatttgtttccaaccatttacaaatgtaaaaccatttgtagctggcagtgagccagcatttgcccacccctgacactggagggcttgtcaaacacagattactgggccccatcccaggatttcagattcagtaggtctggggtgggrctgagaatctgcccttccatgaagttcccaggtgatgtgcagctgctggtccagggaactccctttgggaaccactgacctagaatagatcagaacgttggcagaaaaaggtatgatctcagtgtgggtttttggtctccccaggaaacttgagttcactgggagggagatcagcccacccaggctggaaccttctgaatcttcccagggcttctggctgcccgcttagcaccctggtcactttagagagagatgccgggggaggatcgcagcagccaccttcctctgccccgccgagaaggctgaggctgccgccatctgcactgctcctgcattttctcatctcccgctctctgcccagcrgctcccaccctgcacgaccctgtttcgcccatcccttgccagctcctcactcactgcccctctcaccctgccttcgggtgatttctggccccttggcaagtgtgtctgtttgatattttgattcttctttctgctcttctttttagggaacaagggagccgtgggggtgtcgttcatgttcaatggaacctccttagggttcgtcaacagccacttgacttcaggaagtgaaaagaaactcaggtaatggaactccttccccmcaagagtgtgcatttgggctgtctgcccagacacgcctcacacctttaagcaccagaaggacctgctcagctyctgcctttgaccttgtggatgtcctgtggcctttcagggcccaccacagtctcatcaaaggcaactgcagcaccatagtgacctcacgtgtggaggaattttgtctgaaggtcagaaaagatatttccttgtgtcattagcctgatrgaccgctaactagcactgtttctaaagcagaaagcctcctctgggkcctccttacaaatccaagctgatcttgcctagctggggcccaggaatgaagacagccatctagaatcttcactgttctgattctctgctgagcagatgctgctgctcctggtcccctgccctctgtacacccaatgtggcctcaaatgccctttgcatcctggctgtgccatatttgcacactaaggagttctgctgcagcagggctggagggctaagtctcacttccccccacctgctatgctcctcrccccacacctatggcaggagtgacttcctgccacagtggagggggaaccagtgaccccgtgctagatggccgctttttccttgcattaggcgaaaccaaaactatatgaacattctccggttcctggccctgggcgacaagaagctgagtccctttaacatcactcaccgcttcacgcacctcttctggtttggggatcttaactaccgtgtggatctgcctacctgggtaagggctgcccgcctggggctggggctggggctgtatgagatggaggctcccttgagtcagcttggggcaggtggtcgtggagacatgtgaatcaagtgggctgaggcggctgctccccttgggggctcaacgctgtttccattactgagcctcagccgctcctcacggttcccctgtgctcacacccggttcccataactgtcacagccaccctgccaccatcactctgcagcccgggtcatccagctgcccgcccccagccccgaagcttgtcaggcctggatcagcagggcttctcaccagaggcccgggcatgttcttgttccaggaggcagaaaccatcatccagaaaatcaagcagcagcagtacgcagacctcctgtcccacgaccagctgctcacagagaggagggagcagaaggtcttcctacacttcggtaagagcagcaaccccggctgggagcggtggctcacacctgtaatcccagcactttaggaggccgaggcgggcggatcacgagatcaggagatggagaccatcctggctaacacagtgaaaccccgtctctacttaaaaaaatacaaaaaattagccgggtgtggtggcgggtgcctgtagtcccagctacttgggaggctgaggcaggaggatggtgtgaaccagggaggcagagcttgcagtgagccaagatcgcgccactgcactccagcctggccaacaaagacagactccgtctcaaaaaaaaaaaaaaaaaagcagcagcctctcctcttggagcctttccagccatcctttcgtcccctttcccctgatttcctaccagaagaatagggaaaattggccagatgcaaaacctggggaatcagaattaaaacgaaagtctctctgtttcagaggaggaagaaatcacgtttgccccaacctaccgttttgagagactgactcgggacaaatacgcctacaccaagcagaaagcgacaggggtgagtcctcttcatagacaccttccctgccctccatctcctccccgctggtgtctgttcccaaaaggtgaacagaaagtgtcttcatccattaggcaaaaaaaaaaggaaagaaaaaaattagaaagcacatgttgatttgtgttacagagtaaatgggaagccacacttgtgcactgctttgagctgggaaaataacccttgtgatttaccttctgtccagatactctaagatgctgagaggattttaaagtattatttccttaactgggttctgaagatcatttttttaaagtcccgtgatcaaatatatttactaaactgctgagtgaattaacattaagcaggtttcttcgctgcaggacttatcagagcttttatgggcccaagagcactgtggttctccatgaggaaatctgtatgccaaactcagttattcatggaacaccaattaatgtcttatgaggccacttgttttccaaggaacagtgttttggggaaagatgcaataaaatatgtattcatttgttcaaagatatttcctgatggcctattatgggttaggcactctcctaggtgatgggagagcaaagatgtcttttccagggacttcacagtaggaaaaacagatatgcaactagctgtagccagagccagaatgtgacaatgccagggcagggaaggatcagggaagccagcccctggcaggattcaagggtcaaatggctgggacggtgaggtacccaggcccactrgaagcctagggcaatggagcgcaagttcaaagtgtcatctgaaagagttctgggccccatctgggctcaggagaaagtgaagaactggacgtgggagaggaaggccaagcgctgggtggattttagaacagagcaggagaggaagagaatacaactgagaggacaggaggagatcccggactgctgtcacccaygaggctgggacccccaggatgggacaccccattccgcagggtccactgcctgctgtgtggataaggtcacctggcccaaaggcactgtcagagcaggtccttggggatccctgtgcaggctggtgaaggatggtttgctttgatgtgagtttaagttgaggcagaggagggcctgagatgggagagtggccagtcctagatgccaggatgacaggccacagggggccactgcaagctctgccgggcactggtgcatcagagtggcatgtgcagaattgtggtgggcattgtggtaaaggatgaggacgcggcaggggcatcggtgaggaggccgttgtgcacattcagctgagcaacagctagggccgaatcagggaaaaaacagtgaaaatgaaagaaagggggaaatcaggatatattgcgagacctgattgccattgataaaaactggaaaatcacaaggcggagctggcttgaaggggaaaaaatagaacttgttttcagacttattgattgtgtgacatcagtggaagaacccagagaaaatacccagaaggcagctgaaaatagcgatgcgtcgcttaacaacggggatatgttccgagaagcgtgtcattaggtgacttcgtcattgtgggaacctcatgaagtgtgtatacacaaagcccacttcagttagatggtgtggcctattgatcctaggctacaaacccgtatagcatgttactttactgaatactgtgggcaactgtaacacaataagtttttgtgtatctaaacattaaaaaggtacagtaaaaatatggtataaaaagaaaaaaatgggctgggggcagcggctcatgcctataatcccagcactttgggaggccgaggtgggtggatcacttgaggttaggagttcaaggccagcctggccaacacggtgaaaccttgtctctactaaaaatacaaaaattagccatgcatggcggtacacgcctgtaaccccagctactcgggaggctgaggcaagagaatcgcttgaacccgggagatggaagttgcagtgagccgagatcgcgccattgcatgccagcctgggtgacagagcaagactgtgtctcaaaaaaaaaaaaaaaaaagaaggtggtacacctgtatagggcacttaccatgaatgaagcttgcaggcttggaagttgctctgggtgagtcagtgagtgagtggtgaatgagtgcgaaggcctaggacattactatgcactgctgtagaccttacaaacactgtacacttaggctaccctacatttattttttaaattttctttttccaataataaactaaccttagcttactgtaattttttatttataagctttttatttataaacaatttaatttttgacgcttttgtaataaaatgtagcttaaaatacaaacacattgtacagctgtacagaaatattttatttctttatattcttaatctataagctttttttcaagttttaaaatttcaaaactctcatttacattgacttttttgttgaaaattaagacgtaggctgggcaccgtggcttatgcctgtaatcccagcattttgggagaccgaggtgggtgagtcacctgaggtcaagaggtcgagaccagsctggccaacatggcaaaactcttgtctctactaaaaatacaaaaattagctaggcgtagtggtgtgcacctgtaatcccagctacttgggagactgagacaggagaatcgcttgaaacctggaagcagaggttgcagcgaaccgagatggcgccactgcactcctgcctggagcaaggctccgtctcaaaaamaaaaacaaaaacaaaaaccataaatgcacacattagcctaggctgaaacaggctcaggatggtcaatgacattatcacccacctccacatctcatcccatggaaggtcctcggggcaataacatggagctgtcgtctcctatgatgacaatgtcttcttctggttacctcctgaaggacctgcctgaggctattttatagttaacattttcttataagtaggaatacactctaatgataaataatatcgtaaacacrgaaatgagtgacagttgtttatcattatcaaatattatgtactgaacagaattgtactgttatgcttttacacagcwggcagtgcagtgggctggtttgcaccagcatccccagaagcatgtgagtaatgtgttgcgctgtgacgtgatgacagctacagcagcactacgtgatggggattttccagctccattataattttgtaggacctctgtcctatatgcagtccattactgtggtacatgactatttgtggagccccacgggtaattctcagaggcagctgatgccgagaactgcaatgttaagaagtaactgtttaggctgggcacagtggctcatgcctgtattcccaacactttgggagctgaggcaggtaaatcatttgaggccaggagtttgagaccagcctggccaacatggtgaaaccccatctctactgaaaatacaaaaattagccaggtgtggtggcgcactcctgtgatcccagctactcagaaggctgagtcaggagaattgtttgaatccggcagacagaggttgcagtgagctgagattgccccactgcactccagcctgggcaacagagtgagaccctgtctcaaaaaaaaaaaaaaaaaaaggacttaactaactgttaggcagaatcaatgaaaactaaaaatgcacctattctatgattcagtaattccgctttggtgtgtgttcaagagaaatttgtatatttgttcaccaaaaataggtataagaatgtttagccgggcatggtggctcacgcctataatcccagagctttgggaggccaaagcaggtgaatcacctgaagtcaggagttcgagaccagtctggccaacaccgcgaaacccgtctctatacaaaattagccgggcatgctgatgggcgcctgtaatcccagctactcgggaggctgaggcaggagaatcactggaacctgggaggtggagatggtggtgagccgagaccatgccactgcactccaacctcagcaacagggcgagactccatctcaaaaaaaaaaaaaaaaaaaaaaaaaatgaatgtttatggcagccttgtttgtaatcttcaaaactgaaaacaaccctatgtccattaacagtagagtagataaatgtgatacttataaacaatggaacttttataagcaacgaagtggctgaaggagtccaacataaaagagtatctactgagtgagtccatttatatacgttcatataaattaatcaatggagatgttagtcacactaatgctcacctttaggaggctctggtattgacaaggaaggcttatgagggaagctttaggatgatggcggttttctgtatcttgctctgggtagtgggtaagtgggtttatacaaacctaaaaatgcatgggactgtacacttatggttagtacactttatgtaagttgtacctaaagttttttttaaaaagtgaatggttcagaagtagagagaatgaaaataaaaacttttgtttttttttttttgagatggagttttgctcttattgcccaggctggagtgcagtggcgcaatctcagcacaccacaacctccaccttctgggttcaagcgattctcctgcctcagcctcctgagtagctgggattacaggcatgcgccaccatgcccgggtaattttgtatttttagcagagatggggtttcgccatgttggtcagggtggtctcgaactcccgacctcaggtgatccacccgccttggcctcccaaagtgctgggattacaggcatgagccaccatgcccagcctgaaaatagaacattcttgaaagaaaaytggtaaaaggaagaaaagagaaaagtaattgaaggagatgacagagataagctctttcagratgagttcctttatgtttgtagacagagaagaaagagctagaacatgaggggataaggatattgataaaagagggttgttattgccagtttaccttgtctatcccacctaatggacatcttgctcatcattgcagcctgaggccctggagagggcttgtcatatagtattaatagatactgtttgagtgattggataagtaggtagacgggtgtgtgaayggtcaatggatgagtggatgggtgcgatggatggatggatggatggatggatggatggatggatggattgggatgaataggcgaatggnnnnnnnnnnnnnnnnnnnnnnnnnnnnnnnnnnnnnnnnnnnnnnnnnnnnnnnnnnnnnnnnnnnnnnnnnnnnnnnnnnnnnnnnnnnnnnnnnnnnnnnnnnnnnnnnnnnnnnnnnnnnnnnnnnnnnnnnnnnnnnnnnnnnnnnnnnnnnnnnnnnnnnnnnnnnnnnnnnnnnnnnnnnnnnnnnnnnnnnnnnnnnnnnnnnnnnnnnnnnnnnnnnnnnnnnnnnnnnnnnnnnnnnnnnnnnnnnnnnnnnnnnnnnnnnnnnnnnnnnnnnnnnnnnnnnnnnnnnnnnnnnnnnnnnnnnnnnnnnnnnnnnnnnnnnnnnnnnnnnnnnnnnnnnnnnnnnnnnnnnnnnnnnnnnnnnnnnnnnnnnnnnnnnnnnnnnnnnnnnnnnnnnnnnnnnnnnnnnnnnnnnnnnnnnnnnnnnnnnnnnnnnnnnnnnnnnnnnnnnnnnnnnnnnnnnnnnnnnnnnnnnnnnnnnnnnnnnnnnnnnnnnnnnnnnnnnnnnnnnnnnnnnnnnnnnnnnnnnnnnnnnnnnnnnnnnnnnnnnnnnnnnnnnnnnnnnnnnnnnnnnnnnnnnnnnnnnnnnnnnnnnnnnnnnnnnnnnnnnnnnnnnnnnnnnnnnnnnnnnnnnnnnnnnnnnnnnnnnnnnnnnnnnnnnnnnnnnnnnnnnnnnnnnnnnnnnnnnnnnnnnnnnnnnnnnnnnnnnnnnnnnnnnnnnnnnnnnnnnnnnnnnnnnnnnnnnnnnnnnnnnnnnnnnnnnnnnnnnnnnnnnnnnnnnnnnnnnnnnnnnnnnnnnnnnnnnnnnnnnnnnnnnnnnnnnnnnnnnnnnnnnnnnnnnnnnnnnnnnnnnnnnnnnnnnnnnnnnnnnnnnnnnnnnnnnnnnnnnnnnnnnnnnnnnnnnnnnnnnnnnnnnnnnnnnnnnnnnnnnnnnnnnnnnnnnnnnnnnnnnnnnnnnnnnnnnnnnnnnnnnnnnnnnnnnnnnnnnnnnnnnnntgtgttattaaaagtaagtgactgcagaaagtgagcagagactgagctgaaaatacaggtgggggttcatctgagtcagaaagaaagtaagagaaggtgaagatacaagggatactgaagtagtcaggaggatatgtgagggaatacagcaaggtgagttatcttagtctaaagaagaaggcgtggcagtggagtctggacttgagccatgtgaaaaaagtttaaagccacctacagggaaattctatmaaaagccaacagcygatgaatttgaggattacagaggccaccagttaatctgttcttttactgattaaaaaaataataataagaggcattttttaaagcctatgactttgatttgcagatgaagtacaacttgccttcctggtgtgaccgagtcctctggaagtcttatcccctggtgcacgtggtgtgtcagtcttatggtgagttcaaacactggggaaagcagaacaggatcagagaatggcaccaagctgggaggtgtgactgccctaaaatcwaagggcttcagtctgttgatgtgtcaaagggaggaattcactgtaaccctaatcaggcgacctggaaatgttgatgcttccctgcctgtcttgtgctgccacctaatccatatcccctgctttaggagacatttgaattatagagcactttttttctttttctttttgagacggagtctcactctgtcacccaggctggagtacaatggcatgatctcatctcaccacaacttctacctcctgggttcaagcgattctcgtgccacagcctccccaagcagctgggattacaggctcctgccaccatgcctggctaatttttgtatttttagtagagacggggtttcaccatgttggccaggctggttgcaaactcctgacctcaggtggtcagcccacctcggcctcccaaagtgctgagattacaggcatgagccaccgcggcygacccggagcacttttttaaaaattcagttttatttcttttgaaaagaacatattaagtgtgaaccayatgaaagtgtttttgtaggtcagaaatagttattggaaattcatatggctcaaactaatacatgtcgcaagtgtgtacacatatatacacatatatatttggggaggtttaaccataaattgagttaaattgatttttaraaggcataacatgtaatattaaaataaataattatggaataagttatcaaaacaattaagaaataactgttagccaggcactgtgccacgtacctatagtctcagctgctcaataggctgaggggggaggatcgcttgagcccagtagttcaaaaccagcctgggcaacgtagacyccatctctgaaaaaaatgaaagaaagaaatgactgttaactcttgaccctcaaagttgaaggtgcactgaaggagttcttaattgcctgaatgcttattctgaaaagctactgattagttcccattacttacgaagtgagaccttaaaaatccacagaacagagttgctttgaacacttcactgactgagaattgtggtattttattatttatttatttatttatttatttatttatttatttattgagacggagtctctctcagtcgcccaggctggagtacagtggcaaaatctcggctccctgcaacctccgcctgccaggttcaagtgactctcctgcctcagactcccgagtagctgggatatcaggcacgcagcaccacgcctggctaattttttgtatttttagtagagatggggttacaccatgttggtcaggctggtctcgaactcctgacttcaggtgatcyacccgcctcagcctccccaggtgctgggattacaggcctgagtcactgcgccaggcccagtggtattatttttaaaacactgcgaattcccacacaatggcctctaaaggatggccaccccagtccttggagcaaggagaggggtgggggaatgctgcccgctggccacctttgtggctcccactctgtctctggggactggcaaatttggtctcacttatttaactctggtcctatactttgaactgacttccattccagtgcctgtctcctcctactgcccagaagagcccagagcagctaccctgaaatagtttaacacacgcaccctgcattccttgctgaaggactgagctctgtctcccagaagtgacgtcactagacgaacttcacacaacacctttagatgtgtgggaaggcaacctgccctcatagccacggcccctagggcattgttccagcttccaaagctcaaagtgcctgagtcctaccctctgcctgcagcctcctcacttgtgcattccctccctgccacccgtcggactctccaggcctgtcactccttcccagccacactcagggtcaaccctgtcaatactgtccttcccacatcctgcagctccgtgcatcctgccaattcttgtctcaaccatctgtctgcttcagccagcctctgccgagagtcaggagatagtggaggcttgtagaattaccacttactgttttgcacctaaacttggcattcaaaactgctcgacagtggaggctttagagaaagaggagggagatcagtccggaagtggcaatgaggagcaggaaggacaccctttgcccccacctccgggcccggaatatgagggttggggaggaaaacaagcctcaccagagaggcagcagtgtcttccggggagggctgggtttgggaggtgacaggaagattaaagatacagggaattttgctaatgatatttcattgagtgccagagggctcagtagaagcgtttaatgagttggggttgaggggaggcaaaatgttggaaaagaaaagggagtgaatgtccagagctcaggaaacaggggtgacctgggagcctcagtcttctcatgacaattaacatagcaggcatatcagctgtctattgctgcataacaaactgtcctaaaactcagtgacttaaagcaaacatttatttgctcgcgagtctctgcgctaggctgaatttggactgctcacctctgctctagttggtgtcatctgggcacactcaggcaggagcccatcagatctggggtcggctggctgtcagcaggcataggggtggtactcatcatccagcaggccagtgctggcttcttagcttcctggtctcagggttcccagattcgagtgtcaccagtggggaagttcttcttaaggctctgttggcctcatgtttactaaggtcccattggccaaagaaartcacatgaccaagcccagactcatggtgggaggggaccacagagagtgtggttactgggaggaggactgggtctttgagggtcacccatcttacagtccacctcctaggcttaagggcacactgtagtgccattgctattatgttcagtacatatctgaaatattctgagaatgcttaaaaaaaaaaaccctgctcgtcaacccattaaattctccctggaacacccctcctccactgccacagcaaacctgtacccctgtgctcagcctgactccccacctccatcctctcctgcctcacacagcactggacctcactgatttcttcttgcctgtgtccagttttttgttttttttgttttgttttgttttttgagacartcttgctttgttatccaggctggagtgcagtggcaccatcctggctcactgcaacgtcagcctcccaggttcaagtgattctccgcctcagcctcccaagcagctgggattacaggcgcccaccaccacgcccagctaatttttgtatttttagtagagacggggttttgccatgttggccaggctgatctcgaactcctggcctcaagtgatccacccacctcggcctcccaaagtgctgggattacatgcgcccacmaccacgcccagctaatttttgtatttttagtagagacggggttttgccatgttggccaggctgatctcgaactcctggcctcaagtgatccacccacctcggcctcccaaagtgctgggattacaggcatgagccaccgtgcttggcctcaggtccagtttttaggctgatgccctcgcatcttcctccctcctgtctcagagaaggggtagcctcctctttctttcctgcctagcctttgcccctggacccttgactccatctattccttctccactaccaaccagtgcccccactcccatccttctctcctgtccctttctctgttctgtctcatagtttccatgtgtttctctggtgatccttagtaagtgagctttttttcttttcatgtttattagccatctgtattttttggtgaattttctgtccatatcctttggttggttgaagggtggagtgtttatctttttcttgmtgatttgtaaatgctttctaaaaaggatgccaagtctgttttatcaccttcttggtctcctttgctggcggtttttcctttgcccgcccattcatggttggtgtgccctggaattccatcctcgtctcttctcatccttcgtgtgaaagcccagacatgctcaggtcttctgcttccacctaatcctaagactccacatctaaagatgcatctccagccttgagtgcccatttcctgccaggcatctccaacgggctatcttgaaagaactgtctttctagaactgtcctctttctcttgccccttcccaaagtgctctgctgcctccattctcacccgagcaccaagctccttaacagagttttctacacttagcgtcctccactctctcccggttctatgaggcatcgtgggatggaaaaggtgtcccgtctctcccaccgatgagctgagtggccttaagtccccttcccacccagtgtttggggctcttcatcaataaaataaagtgagccaggcgtggtggctcacgtctgtaatcccagcacttgggaggccgaggcgagtggatcacctgaggtcaggagttcaagaccagcctggccaacatggcaaaacctcatctctacaaaatgcacaaagattagctgggcatggtgacacgcacctgtactcccagctactcgggtggctgaggcatgagaattgcttgagcctgggaggtggaggctgcagtgagccgagatcgcgccactgcattccagcctgggcaacagaacaagattctgtctcaaaaataagtaaataaataagtacaatgattagaccagaaaaatctccatggttcacactccctaatcaattcaaaaagtcttaggtctttaggaaaaatgagcacaggcttcttctgtccatggaggaggcagtgtccacactgtcttccactgaaccctttaagcattgctgtggaaggacaacaggtgcaaaacttcgcacttctggagggctccataactaaagtttctttctgctttagggttgccatccttggcctgaccggaagggcttctccttccctgcttaaaaatgccttccctcccctgcaggcagtaccagcgacatcatgacgagtgaccacagccctgtctttgccacatttgaggcaggagtcacttcccagtttgtctccaagaacggtaagcaaaggayrgtgtctgtttctctgttttcctcaatgacaaggagtgttgggagcttgtcttcaggtggcagtcagtggtctgcattagaggaaggcycattttcccaggcaagtccacaatatcagtcagtttcttcatgtcccagccacagcacaattgcagtccagagaatttacttgctctgcttggcaagtatgtcagccttttgagcctcaattttagtctgaaaacgtgggtaaatcagtgtttaccaaggtgtggcctgaagacactgaagataattctccgggtgggatgggaggagggggcgggggacatgaataaacatttattagtaatgcctttgttttaacatgttttacatttctgtcttctgtttaaggcaagcaccattacttttccatttaatattgtgatataccttattcagctacacttaattttaaaaagtgagtctatttagagaaaatatgaagtaaagagtagcacaggtgcgtggtaggcagagatggtaaaaatcgttaagatgggatgcaaatgactgagttttgggaaacaccacagtaaataatatttagatttgcaggtaatttttcaaataatccagctcagccctggttgccaggccaccctcatcccagctgggccaggtgttctctgtaatgtgcccatccagcccttggcctaggtgaccagggagccatgttgtctctgcccagtctctgcttccgcggtcagcccagtggtcactgggctcctttaggaagaccaagcgtaggggacccaaatacagggaaagaccatcttgctctgtgtccttcatgccctgggggacacacgtgaggccgaagcactgtcttcctggggtgctcttatcyatcctattgtatctaacatccatggccccagaaatgtgacctccctcctccacccaagccttgacccaccatcgtgtctccttcctaagtctggccactgtgcctttctagaatcttcctagtccttaggcaggacctcttccccgacttccacccatctctcctttctstgagctcctgcagccttgaaggggttgcccttgccatctcctcctctattccggggtagggcatcctccatgtcaggctgggcttccctccacgggggatcagtacacagcagatgctggaaaacactgatcacggggattgagcattgacagggcatctacctaagccaagcctggactgggcactgtgggrtttagaaagagaaaggaaagaaggaaggatgtgagggatggaggaaggaaaggtttgttcatggtctccgaacaagtctctgttctgtggctcaaaatttctatgaaaggacagaacacttgtttaaaagcagcttaaggatgcttgcaaaagcatcgtctaaattaatacagttgcaggcaagttaactctgtacaaatgagcttatggagtccagaggaaggagtggggataactgtgcctaagggagagagagctgctagccctcattatctgaactcagaaacagcattgatctgggtattgagcaaccgagccattgtacaaagtctttttgctggaactagctgggagcctgaaatagtgggggtattgcctgaggtcacacagctttagtgacagagatgaaatgaggtccggactcctgggactstgcatctttctgccccgctctctgccctggccagctcacgatgcatcagagaggttgaggatgctyggctgggtgctggatttcgctgtagctttagttctcctcccactagactcccaccttcctgggaccctgagaaggagctcagtatgtggcatgagaactaatttgaaatgctccatctccaggcacattgtggaactgaatccrtgttctcccctgttccaggtcccgggactgttgacagccaaggacagattgagtttctcaggtgctatgccacattgaagaccaagtcccagaccaaattctacctggagttccactcgagctgcttggagagtaagtggctgctgagccaccttctgggcagaactgcccggagccttcttataaacacctttcatacttggcactttgccccatatcttctctccctggaaaggactcacgaagctgatcagagaagtggggctgcaggtggatgactcaaggggacactcagttattgtgaggggtccccctgtggcctgtgcagccctaggggcaggggtggccatgaatgtactgascccccagtcccttgtaggtggcaagcagggtccaatccctggccctcagggtggactgtgacccactctaggttccctgcaagctggggctctgactcaaccagagagtgttgggcccaggtccagacctcaaagagccggtgtgagggcctgagcagcagctgcctgttgtcgccctggcccctcttgctcgttggagatcacagcgtctttctcggggggactgcagcgtccgaaagcaagcaggagatggacaggctcccctgagccagcagcctttagcacaaactgtgtttaggaaacaccctttccgggtgacatttctaggcagattgtctaaagctgtttcatggctagggaagagctgcgtgtgtccagccgtcttcgctgagatggtctgcacagtggtcgggggaggaaaagggggcatcacctcctcaaaagggcattttgtgagggcctggctgggatgcttccakaaatcaggaagaagcgtgtgctgccagttctgcccctctggtccctgcctccyccaactgaggtgggcccaggcctggtgctagagcggcctttgtcactgagtccccaagctccagttcacccagcagggtcaaagcggttcgaaaaatgatgaggatttttgtgcgggtgtttttaataaactatcaagacagttccatacatttctatggaaacagcatattaggaagcttaaattagaatttcaaaaggctgctatcttgagtggcgtgggacgagctgtcaagtttcctaatctttttgcctgtgatgtgatgatttctttgttgcctggtttgttgcaaagaggaactgaaaaggagggggaatctctttgattttcctaaaaataattagaccatgttggcaaatgaccaatccctgcacaaaaacagaatccccggcaggcctgactcctaaatgatgctgaggccccgagataaaaaaaaaaaaaaaaaaaaaaaaggagagagcacatcttcctaggtctgggtggggtgaccccagggagtcttttctgtctggttcttgctctgttttctgaaaaccagcctttttgtcctccaacaggttttgtcaagagtcaggaaggagaaaatgaagaaggaagtgagggggagctggtggtgaagtttggtgagactcttccaaaggtaattctagagcaaggcattccccagagggagatttgcatttactaggccagtagtaccagccagtggcagagctatggccaggcctgaccagaggaagcaggaatctcatagaccaaatgcagaaagagacccactctaggagcaagctctcgctcaaggtggttcgtaacacactttacagcagtgggtatgtggccttattattcctaaatggtttcagttcccctaaaggatcacagaagggatctagaggtcagctcgtctaaccacatgattttgcaaagaaggaaactcaggtgcagggccaagcgctgtttgctcatggcctcatggctgcagtaacacacctaggacgcaaccccaagaccccgatcccctctttgacgcttgttttcctattcagtgctggttcatagaatcgagtacaaagaggcatagagaggggtccattggctactgatcatacacttgtgaacacacgaagtactcgacatgtctgtnnnnnnnnnnnnnnnnnnnnnnnnnnnnnnnnnnnnnnnnnnnnnnnnnnnnnnnnnnnnnnnnnnnnnnnnnnnnnnnnnnnnnnnnnnnnnnnnnnnnnnnnnnnnnnnnnnnnnnnnnnnnnnnnnnnnnnnnnnnnnnnnnnnnnnnnnnnnnnnnnnnnnnnnnnnnnnnnnnnnnnnnnnnnnnnnnnnnnnnnnnnnnnnnnnnnnnnnnnnnnnnnnnnnnnnnnnnnnnnnnnnnnnnnnnnnnnnnnnnnnnnnnnnnnnnnnnnnnnnnnnnnnnnnnnnnnnnnncagtggcatgatctcggctcactgcaacctcaacctcccaggttcaagcgattctcctgcctcaccctcctgagtagcttggactacagatgtgcaccaccacacccatctaatttttgtacttttagtagagatggggttcctcatgttggccacgctggtttcaactcctgacctcaagtgatccactggtctcggcctcccaaagtgattagaggtatgagccaccgcatccagcctaaaacatttttttttaaattagccagacatgatggcacatgcctggagtcctagctgctctggagactgaggcgggaggataacctgagcctaggagatccaggctgcagtaagctatgatcatgccabtgcactccagcctgggtgatgcagtgagacgctgtctctttttttgttcatttgtttttctactgaaactgcttttgtggagctaaattgacagtggagatgttgggtgtcctcgagtacaagcttattatgagcttattagttgttcatgctgggtgggaagtggagtttctttctcgcaccatgagggaggggtggaatgaaggggagtcccaggccaggcagatccatcacaggaggtggggcgtcttggaggctcccctaggagattccctcagaggtgacactcgaggtgaattttaaaaggacagtcttaagcaggcaragggaccattctctcctgagactggggtaggatgttggcaggtttcagggggctggacccacattggcattaacttttgattggaaccaactctcaggccatgtaaaaaggccatgtcatctccggagcagaggctgatgcctgaactccagattcccccagctgcggcacaattccaaattactcagaggctgcggccagctcacatggctctgactggggtctcccactgaagccccagaagagctgtcagaagtccctgttctggggctgtcttcaggcccctgagtcgtgggggctctgggctccaaggagacatttctgcctcacccggcccaagcccgtcctcctgctcctcctccctggctgcttccaggcagggcctgaacagtagtttcctcctttggtgaaggtggaaaagagagcagcaccccattccacaacatgttcaccccctggtccagctcagggacccctagggcccctgtcttcctccattccccacatcctcacagccgccaagtcctgctgttcctcttgcctctgtcccctccctcagtccccctgccccctcccagggggtccactcctcctgtctcctgcctcttgctgaggcatcctgaacgctgatggatctttctggaatgcctctctgatcctggagtccccctctttatccggtcgactccctgttgcctagtgaggcaagcagcctcatctgctgttcccacaggactgcaggggccttcaccgtctcctgctccctgacccccgccccacccctgttgcctggcggcctcctctgttcaccctgtaaatccctgctgtggccccctagatagttctcctccctgccaccgcctgccagggtggtggtgtcgcacagagacatttgttgttcagatgtctgtcaccccatttccactccatcccagggaggaccgggtcttcctccagcatccaagaaccccagctctggccctgggtctagcttagagcctgacatcacctcatgccaggagccaagtgataattggtgcagctgtagaaccctggagtacccagagctccactgcagtttccagtcatctgttctggaacttttttttgagactgagtcttgttctgttgcccaggctggagtgcagtggtgccatctcggctcactgcaacctccgcctccaaggttcaagcgatttgcctgtctcagcctcccgagtagctgggacgacaggcacgccccatcaagcctcgctaatttctgtattttttagtagagacggggtttcaccatgttggccaggctggtcttgaactcctgacctcaagtgatccacccacctcggcctcccaaagtgctgtgattataggcatgagccactgcacctggcctggaactttctgaatggagatatagtgagtctgccctgttggccaacatggtgcccagagccctgtaccaggagccttttggtgtctggaaaggaagggagggaatcgcctagaacaaagtatcacctttttatttggcccttctgtatgggagtcatcgtgagaaacagccccacatctgaaaaagtcataactcgtggcagacgaggagctagtgtgcgtgtgatgctcctccctgcacttgcccggacacagcccccactggccagtgctgtgcaaagcctgttagcagccacccccgctgccagccaggccagcagggcctctgggggagctggcactccccagctctggaaacttgctcgcagatggaatgtgggagcctgtgtctgtcattcgctgagccacacccccaacaatcggtaggacactccaggcccagctgggggctctgccaggatggacacagaggctgcatcctccctagataggggcaagccagacaggggcagggctgggatgcagccacagtcctggagggggccaaggagaaattctgtgctctgtagggggagcctggcgcagggtggagtgcatggatcattccagacctggtgcctggccccacttccccgccagcctgccttctcctctatgaccctggcctagggatgggaaggaacgggggcaatggatggggcccatctggggtcaggccttcttgctgggacctgggagccagctcagtttaggaggcctggggtgcagcgtggaggtgagggggacarggaaggaagctaacccccaccttgctggacagggtgtatgtgaaagctataccccacctgctctcttgggtatggacagcagagatttagatctgattactaagaacacctttcgtcatcttcatccacttgtccacccacctgtcccctcacctgtcccttgcccatcaactccagtcctgtgcccttctctctgcagctgaagcccattatctctgaccctgagtacctgctagaccagcacatcctcatcagcatcaagtcctctgacagcgacgaatcctatggtaagggtctgtgggcaggtgccacacctgcctgtgaactggcggcctctgacgtagcattgccttcaggggagctcacctggcacttccggtcataggctcctgcctctcctttcctcatcccagggctgctagtgggaccgtcaccactaagtcatccttccctccccactaggcttctgggcaggacagccagcagtggcaaccccttccatgtaytgagccttccctatgtgtgagatctgtgccaggcactttccagtatcatgtgatataaccttgacaagaccttactgttctccaatgagtaaacagaggctcagaaagatcaagtgacttgcccgagtcatataggtagtggtggctgggccctagtttgaacccaggcctgcctgcccttctctgcttctcaagtgtcctgagtcagccttctcagctcacaggtctggagctgcggactcccctctgctgacccagtctctaaaacacctgctcaggcacaaaggggctgctccttctgcccccaaggagccaccctctgcccgaagaccccctctccccagccagagcaatttgggctgaggtgtcgttcagggtcccctgagtgggacttggggtgctggaaacaccagctcagggctctctggtcttctgctcagcatcgcctggtgcccagaccaggcaggctgtggaggcccacagccagagagacagcaggggcttttgtaccatctctgcctgtttgtggctccagcccaaagtcaggctcacccttgctagaccacatgtgtggctagaccatggggtgagagaggcagagagagcctggaggggacagagagaggcaggaagcaggagccaggccaagcctctccttacaagccaagctaagagcaaataccttatcccgagggcagtagggagccattgaagattcaagcaaggaagtaacaggatcagattcacatcttggaaatccgcatctgcagtgatcaagacgacagatgagtgagccagaatagaagtagtgacagtaaaaaaggagagaagcggatgacattgagaggaatggagtagaaaactgtctgggcctgggattggggaaagggtctgtattagtctgttctcatgttgctgtaaggacatacttaagacgggtaatttataaaggaaagaggtgtaattgactcacagttctgcagggctggggaggcctcaggaaacttacaatcatggcagaagaggaagcaaacacatccttttcacatgatggcaggaaggagaagtgggtgcccattgataggggaagctccttataaaaccatcagatctcttgagaactcactcaccatcaccatcactatcactattgagaaaaggatgggggaaaccacccccatgattcaattatctccacctggtccctccaatgacacatggggattgtgggaacgacaattcaagaagagatttgggtggggacacagccaaaccatatcagggtctgagcggctgcatgaatgatgcttctacttcttgcactgggttagatgcagtgccgcgggtaagggagaccaaggcacagccacagcrtatgaggaagaccagaatgctgttgtgctggggacaccatcagaagagttgggtcaaggagagggtgtggttacaatagcaaatgtggccaagggacccaacacaaagaccaagcgtctcttagatggagatactcagaccatcagcagacttggtgagcgcagtgtccgtggaagagctggggtgacatcagacctcagcacttaggagtgaacaaagcatgaggagggaggcagaggagaatgcgcctgggtcaagggagcacatttatccacgtgcttatttatttgaaatggaaaacctttgaatactgctcggtggaagtcactaaagaggaagaggctgcagacacaaatgaaagccccacgcatagtctcccattgtgcaggctctgccaacacctgggtgtgggcactgtcgctcccctccttggggaggtgaggaaaggaggctgggagacctgaaggtcatgcagctactgagcagcttgttggaggtaactacgtgatcttgggcttgagcccaggcagctcttccccgttcccagtgcagcactggcaagagggtccccaagctgcaggaggggtgggaagagcttgaggagtgtgatggccctaatagggatcccctcgtcacggatgcaagagcatctgaatggctgctgaaatgtttgaagctttgttagcaggaaacaggcagtacgcaaaacacacgcttcattttctcattcaaatcctgtatttctgcgacacggcaagaccatgtctttaaaaataatatactgtaatcctcctttgtttcttccgcttcatattcatactcacaagcagcatatcatcaaaataaaaaggaaaaacatcaacagtctcattccagtaatcatttttattttggtttcacatttccagcctcatacataggcatacctagattttcatacttacatcacagaaacatcattttatactctgcttccctcacctggtattagawgaaacacattttccatgattctcctgccccatctttgtgactgttccttttgatggctgcattatattccatggacttactgcatcctcattttaaaagtattcctcactttaaaagtactattattgaggctctgtcagttgtttttgttggtgctatcagtaacactgagatgaatctctttgtggacattttttattattcttcagctacattttttattcctttgagtaatctcattaggacaggttcccatgtttgccggatcagagggtgtcaatcagtgtttgtgcttcttggcgcttgacaccaaactgattgccataaaggctgtctcagctgacctcaccacggataggcttccccagatccttgctggcattgggtggttttgttttttgtttttggaggccagagtgcagtggcacgatcttggctcgctgcaacctccgcttcccakattcaagagattctcctgcctcagcatcctgagtagctgtgattacaggcatgcaccaccacccctggctaatttttgtaatttttcgtagagagggggtttcaacatgttggccaggctggtcttgaactcctgacctcaagtgatcagcccgcctcggcctcccaaagtgctgggattacaggcgtgagccaccacrcccggtgcattgggtgttatttttctcgcttcctatctatgctaacttcatgtctgtgaaagagcaacttaatgattccttagtttgcatttttgatggctaggaaagtggaactattttccatttattaaaattaaccagctgcaattctttttgtgtgaaacgtctgtctgtattatctgttcatgcatctgctggagagggtaccctcttgcctggggagctagctgcagatactgttcccaatccgtttcctttttattttaggttttttctctgtgcaagttttaaacttgcatgtcctcttgcccgccaattttgttctgtcatgtcttatgctgcatcaaatcttgggaagttttcattccctacagcgatcagatgagtgtttaattctgtctttctgctgcattttctacaatwtaattttttttacatcaactaatccacgttttgttctaagacttgagacatttgcccccaaagtactgtggtgttgttctgacggatttattaaataacccttgcctgggctatagtttcaaaggaccaactctccggccaagagtttggtgtttctgccatgaaaaggcagggtcttcacccagctgtctcccactttccctgcaggcgagggctgcattgcccttcggttagaggccacagaaacgcagctgcccatctacacgcctctcacccaccatggggagttgacaggccacttccagggggagatcaagctgcagacctctcagggcaagacgagggagaagctctatggtaagcagcaagccccwccccagcgccctcttcagccccccacttagggacgggaacgtgctttctctcagcaaagctgtcgaatatgctctctgctgcggcctcagagcagaaatccagcactggaaaakatctcagacaatctggcccaaccctcactcaactcaaaaatgtcccaacagaacccaacatccagcacccccagatcaccctccccgaccctgtggattttttagggccccgaacctcacctgtcagcctttaggccttgtcattcccccattagcacctccactaaaagaaggacccagtgtaccaagcgaacctacgtcttgttaaatggctccttccaggctgtccggggaaggccacagctacagctgcagatgagatttagaatttcttgggcgacctctgcttgcccacacggccacatggtgcccactcccatatacaaacaggccctcgtacgtacctaaaccctgccctcatggtgcccacccaggtttctgtaccttctaaactgcttttttttttttttttttttgggacagagtctcactctgtggctcaggctggagtgcagtggcacgatctcagctcactgcaacctccacttctggggttcaagtgattttccatcttcagcctccagagtagctgggactataggcacccaccaccatgcccagctaatttttatatttttagtagagacagggtttcaccacgttgactaggctagtctggaactcctgacctcaagtgatccacctgtctccgcctcctgaagtgctgggattacagacgtgaccactgcaccgagcctttttttttctttctttcttttttggagacagtcttactctgtagcccaggctagagtgcagtggcacaatctcagatcactgcaacctccgcctcccaggttcaagcaattctcctgccccaccttcccgagtagctgggattacaggtgcccaccactggctaatttttgtatttttagtagagacagtgtttcaccacgttggccagactggtttggaackcctgacctcaagtgacacacctgcctcggcctcccaaagtgctggggttacaggcatgagccaccacacctggcctgtttattttaatctgacaaaacatacttgcctgttttgtttcttgctgagaccagtaagttggaaatgtcacatgaaatggcaactctggatcccaactctcctctctgtggatccactgagaggcataactaatcaatcactgaactcttaggaggcctcagaatcttgcttaactcacctctccaggtactcactattcactgtgcagcttcagcctgcaaatggaaacccctttgccatccctcgcctaagctctggaagctgggccctcacatgctctttcccrtccctttccttccagactttgtgaagacggagcgtgatgaatccagtgggccaaagaccctgaagagcctcaccagccacgaccccatgaagcagtgggaagtcactagcaggtaamgygggcgtggggtgggtgttggggggsgtggatatcagggactcatgacaaattagcatggtttggccgggtgcgatggttcacgcccataatcccggcactttgggaggccaaggctggaggatcatttgagcctaggagtttgagaccagcctgagcaacatatcgagaccctgtctctacaaaaaaaatgtggtggttcatgcctgtaatcgcagcactttgggaggccaaggccggtggattgcttgaggtcaggagtttgagaccagsctggccgacatggtaaaaccccatctctactaaaaatacaaaaattagctgggcgtggtggtggcacacgcctctaatcccagctactctggagggctgaggcacaagaattgctcgaacccaggaggcagagattgcagtgagccgagatttcaccacygtactccagcctgggcaacagaccgagactctgtctcaaaaataataataatacttagctgggtgtagtagtcctaactacttaggaggctgagatggaaggattgcttcagcccaaaaggctgaggctgcagtgagctgtgattgtgtcactgcactccagcttaggcgacagagtaagaccttgtctcaaaaaaaacaaaacaaaacactagcatggctctgcaaacccagggcctgtgagaaggtgaactgaagcacagagaaacccaggacacaggagaaagaagctccagcccaggagaggtgctctcctgcctcctctgcgagtctgttgaccgctggagaggttgatgtgactgtgacaaagctggggaaattctaatgtgacggaaagttcagtttgactcagctaacatttgttgagtccctgtgatgtgtccagttctagagaaatcaaggcaaattcagtgcagtccctgacttaggaacttgcggcctagtgcatgaagaagtgactgcggagagaatggagagattccaagtctacaaatggtggctgtgtctcctgtgggacagaggacaccagcaatcatgggatctgtggccaccaaaccccaccytatccactagcaagaaaaatcactgggggaaaatgcacactggttgctcttggcagagactgaactgagaatagtacagatgttaaagtctgtattaccagaatacagacgtccttggtagcagggctgccctaactcaccgatgtggtctccgagatccagaatcaagttctggtctctttgccggctcaccagccgrggaggcagaaccatgccagcagcagacatagcttgttcctctcctccctcccttccccacaactcatcccyaccaacccttgccctcaccccagccacccccgctgtacacaggaattctcatctctagcacattccctgatccacttccagcttccgatgttcacagccgtgggcacacaagcatcccctttccctctttccctcccatgataatcccatcagcaaatgcatcctggctctgaagtgtctactgtgttccagaatcaggatcagtgtagggaaacaaattcttttccattttgactagcatgagaacgagcatttatttctgaagcaggcagtggtggatgggaacaaggtacagctcggaaccaggctggcagagcacatgggagctgtggagtgtccctgacagcctatacgctcagaactcagttctcaggaggccggtgcctgacacagtggcagcgtgcagtgtgtctgttggggccaccttgcctgggtctgggccatcccctccatagctttaagctgattgcccccaattccaggctccaaccttgatctctgtgacctcacactcatttttctaaatatgcacatggctgtctctatgctgacgctgcacacacaaatgtgtgagctgatgtgttccagaggaacccctgctggagtctgccctgaaaatcccctccttcctgccacccaggctacccccccaccatctctctgccctgccagccttgccagcttctcattccatcctctgcacctgctcaccagccttcggaccgtccaggaacaggccaaacccctctcacctggaggcctttgcatgtactcttgccactgccgagaacagtctccccttctttctctcttatctgcttatcttcttatctcagatgaaagaccacctcctcagatggggcctcctggggtcacccaatgcccagttggtcccaacacttcactagtccccatctctgccccttgttattctcagacttcagcactacatcaataccgtgtctctgtgtcactgagcttgtttttctctcccatcaaaagtgagttccataagaacagagaccatggctgcctcactcacagccatattccctcctcccsgcctggggccaggtgcttacgaggccctcagtaatcacggtgttgcatggatagatgaatgaatgaatggatcactgcccaagaggtgaaggagttgaggagagctcgagagagccctagggttatcagaggacactttccttgggctggtgctgaccccgagaagggaagggacccctgagatgtgactccatgtcctccctgcagggcccctccgtgcagtggctccagcatcactgaaatcatcaaccccaactacatgggagtggggccctttgggccaccaatgcccctgcacgtgaagcagaccttgtcccctgaccagcagcccacagcctggagctacgaccagccgcccarggactccccgctggggccctgcaggggagaaagtcctccgacacctcccggccagccgcccatatcacccaagaagtttttaccctcaacagcaaaccggggtctccctcccaggacacaggagtcaaggtgagcatcctcttyattaagacggctccctccctccttatgaaagcrccctgggctttgggctttcaccctagaatggaagcctcataagggccacaatttgtgtccacttggctcatgacttatccctggggcctgaacacagcaggcccctgacatgtatgtggagtcttccatgtcctaacctgttagtgcaactcgattgctttttaaagggtaaaaatttgtaaagatattgccaagaaaaggaacctcctataaaaactatatacatatcaaaaaacatgttttgggccgggcatggtggctcacgcctgtaatcccagcactttgggaggccaaagcrggtggatcacctgagatcgggagttcgagaccagcctgaccaacatggaaaaaccccatctctactaaaaatacaaaattagccaggggtggtggtgcatgcctgtaatcccagctactcaggaggctgaggcaggagaattgcttgaacccaggaggtggaggttgcggtgcgccgagattgcgccactgcactccagcctgggcaacaagactgaaactccgtctcaaaaaacaacaaatttcggccgggcacggtggctcacgcctgtaatcccagcactttgggaggctgaggtgggtggatcacttgaggttaagagttcgagtccagcctggccaacgtggtgaaaccccgtctctactgaaaatacaaaaattagccaggcatggtggctcacacctgtaatcctagctgaggcaggagaatcgcttgagcccaggaggcagaggttgcagtgagccaagattgcaccactgcactccagcctgggcracagaacgagactccataaaaatgccaggtgtggtggtgcaygcctgtaatcccagctactcaagaggctgaggcaggagaatcgcttgaacccaggaggcagaggttgcagtgagccaagattgcaccagtgcactccagcctgggtgacagagtgagactccgtctcaaaaaaaaaatggccaggtgcggtggttcacgcctgtaatcccaacactttgggaggccgaggcagacagatctcgaggtcaggagatcaagaccatcctggctaacatagtaaaaccccatctctactaaaaatacaaaaaattagctagatgtgctggcacgcacctgtagtcccagctactcaggaggctgaggcaggagaatcacttgaacccgggacgcagaggttgcagtgagctgagatcacaccactgcactccagcctgggcgacaaagcgagactccatctcaaaagaaaagaaaaaaaatgtttctagagctagttaacctttgggcatctcccgctccctagagggccctgtggaacagggtgggagtttccatgwagagcctgctcgcaccctccagttcccctcttttttctcgaccatgaggttccccattctataagcagcttcctagtctctcctgtaggggacacttagttagaaactggaactagggatgtaaaaggcagggcagccagcctgcagagagaggaggcccggccctgaaactctggggaagccccggacggtggagaaaactgatctgagtctagaactggttcaggcagaagaatggaagccagataggagaccgggctacgcagccgaggaacagggtcagcacttcccaaaggcacagacgctctctggtgctgctggaacagagcagagccaaccatgggtacctcgtggatacacaagtggggagctctacatgtttctagtagccacaggatgacagacagacgtgaaagtgcaggcccaattaccaacgatttaagatgggcaagatagcttgagcactgtcttcccttgaggctctttgctggcttatcataacctcaggggttcactctcagcctctcttcctctaacactggttttttcttcatcctttttccatgaggacttgcgtgctgtccgccacatggggcagagccagcagcggtgtgttctccatcacactgtcctccagctccctccagttccacccttcccaggcctgacctggcagggtcttcctctggatggagaagctgttgacagtctcatttctcaaaatatgcgagatatgctctaagaaacggataggccaggcgcggtggctcacgcctgtaatcccagcactttgggaagccaaggtgggcagatcacttgaggtcaggagtttgagaccagcctgaccaacacggtgaaaccccatctctactaaaaatacaaaaatcagccaggcgtagtggcccacacctgtaatcccagctactcaggagtctctgagacacgagaatcgcttgaacccgggaggcggaggttgcagtgagctgaggtcatgccactgcactttagcctgggtgacagagcaagactccatctcaaaataaataaataaataaataaataaataaataaataaataaataaatagatgagaggaagtcaggaagagagagagaaaaggacaggacaggatagccctgaagctcagctcagctgtctctctctctgcctctgtacagagtttgttgatagggtgtcagaccctggtcattccctaagaaacttggagggaggagaaacagcctcagtttcctgccctggaaatatgaggacaaaaggcactattcagtgggtatcaaggtgcctgtgtggccacctctttggagaccccaggaaatggagctctaagcaaccagaaagaaaaaggagcatgattatttgtgtaagtgaatgcttttcagctcccaaagcgaatggatcttggtgcataacaacgagcacacagcttggtgggagcatgctycccacagccccatggtgacagctgcagacaggctgccatccacgggcaaggggcccccagggtacgcttctaactcactgctcaccaaggaggcgcttggagcctggagccctgcagctcgcacacctgcctcatccctttccgctgctccaggtcccaggctcagccagagcaaaggctgtggaagggggtgttccaagcaccatcagtgtttccccaccatcacccagacccaagtgcagggactgaccttcccggtttgccaagtactgtcccagttttagcactgaaagtcccacatctcaggaaacccttcagtcctgcgtaagcaaggacaactggtgaccccagatcgaagctgtgcaattaggaaggggactcttctcagcccctggccagtgcttagctgctttggagatgagactcgtctcctgaatctgagaagtacagtcatttgctgcaggaatcaactcgtcccctagatatcggttcccttattcaacaactgtggcctgctataggagtcaatttcttgttacctttggtcaggggaataagacttacttttgagtttttcatggttttccccagtcttccccgcccgccccaccaagcttcccctctctaagtgcaacagaagcctcctcttagagggaaggcttccctggtctctatctcactgctcttttcccagaggagtgagctttagaatcacaaaagggcttgcacccagggctcttcctggtcctgcccccagttctctgaagtcagccccctcctcccatctcagcccctgagagagggtggtcagaggtcaggacttcttgctccttcatctgaaaacttgtgaccatgccagttgcaccctcctgtgccctcttcccttggctaactcacagcaacggcctttgagggtccacaygggggtcagaagagggctgmacatggagggggccctttccaaagtccttgtttgaggccccagcatttctatgtatgcacctgctctaaggtgtttccaaaaattaatgggcaacacccccaggtgcacagtcaggctccctttggtgtgtcccggaggccagcctccctggagctccatggcttctcaccggcacctgtgtgaggacgacatcccgcctttgtcccctgagcccacacctgctccccagagtcactgttgagtgcctgtgagcagcttctcagtgcacatcccatcagtaacaggcgcaacagcctcaacagctcagtgggttcccagcgatccacaatttcttcacgatagcttccttttctgtagaaagcagaacccagaacactcccctgggagattctgctgctagtcaggaagtaaaatgtgttcccatttctcgttctcatagtttgctcagcaggaaatcacctccagtcagagcagtgataaatcagaacacaaacaagcaaaggcagcacttgcctactttgggtcacaacacaggagcttcccctgcccatgagttgagtgggcctttcttctagctrctggccttggcttccccagtactcgcaagtgtccaagttccctctgacttgcaccacagccaccacgtgttccttccactgtgagttaggagaggcttccagggagaggacttcatgtggctgggaaggacactgtgttaaccgggatgtcgggccccctgagctcagattctgtccttgtttgtggctgtgttgctgtgcctgggaaagtgtctcacacatgagtttggtagatggagcctcttgagctttcaccctcaagtagcacaagtggttcctgaggaggaggtgtgatcgccttcctgagcggtcatgcaaatgctgggtcggagcagaattgctggagtcagaggagaggctgcggggtggggatgggaggaaccgggaaaggaggcctgttgactggggaggtgggaaggggctgtggagagcaggctcatctgatgaggatgaggggttgatactgaggtgccatgtaagttctcacttcatttctcccacaaatcctccagtgccatgccccttgctcacagatgctctgatgtgaacaggttttatagtggaaaaggtcccaggccagaactgaggctgtctttgaggacaacgtatgatgaacacagtactgtttcctcttcctttttttcacttgaggtgaaattcacttaacataaaattaaccatttcaaaatgaacagtttgctaggctgggcacagtggcttatgcccataatcccagcactttgggaggccaaagtgagaggactgcttgaagcgaagagttcaagaccagcctgggcaatatagtgagactccccatctctacagaataaaacaaaactaaaaaattagccaggcctggaggcattgctactcccagcaatgtccagctactcctagctactcccagctactcccaagtagtctcagctacttgggaggctgaggggaaggactgcttgagcccaagaggttgaggcagcagtgagccatgaccgcaccactgcactccagcctgggtgacagagcgagactctgtctctaaaacaaaacaagacaaaacaatttggtgccattcagtaaatttgcaatgttacacgtctctatctagttcagaaacatttgtatcaccccaaagaaagacccagagccattaagcagccatgctcccatgtcttctcccctggacatgtgtcttccctgctctgtccctggctctaggcccagtgacctggggaagaacgcaggggacacgctgcctcaggaggacctgccgctgacgaagcccgagatgtttgagaaccccctgtatgggtccctgagttccttccctaagcctgctcccaggaaggaccaggaatcccccaaaatgccgcggaaggaacccccgccctgcccggaacccggcatcttgtcgcccagcatcgtgctcaccaaagcccaggaggctgatcgcggcgaggggcccggcaagcaggtgcccgcgccccggctgcgctccttcacrtgctcatcctctgccgagggcagggcggccggcggggacaagagccaagggaagcccaagaccccggtcagctcccaggccccggtgccggccaagaggcccatcaagccttccagatcggaaatcaaccagcagacccygcccaccccgacgccgcggccgccgctgccagtcaagagcccggcggtgctgcacctccagcactccaagggccgcgactaccgcgacaacaccgagctcccgyatcacggcaagcaccggccggaggaggggccaccagggcctctaggcaggactgccatgcaggtgcgctgcgccacacgtgggttcgtgtgcatttkgtgtgtgtgtgcatgcgtgagtgcgtatgtgtgtacctatgcatatgtgtgtgcatgtgtgtgtgcacgcatgcatatgtgygtgcatgtgtgaacgcatgcatgtgcacacatgcgagtgatggtcctgggaactgctccatgagargggagagtcaggatttgaacccaggtctgcctgtcccacacatccctgaccctgcattgcctctgcagcagttgttaaaaggaagaaaggcggggctgtggataaacttagtctagtgtcagtcccagaggaagaagattccataaagaaaaggagcctaaatcatttatatctcattgttattataaatttgttttgcaactgagtttcgccaggcacagtggatcacgaggtcaggagatcgagaccatcctggccaacatggtgaaaccccgtctctactaaaatacaaaaaattacccgggcatggtggcgcacgcctgtagtcccagctgcttgggaggctgaggcaggggaatcgcttgaacctgggaggcagaggttgtggtgagccgagattgcgccactgcactccagcctggtgacaaagcaagactccgtctcaaaaaaaaaaaaaaaaaaaattaaaaaacaacaacaacggagtttcactctttgttgcccaggctagagtccagtggtgtgatctcggctcactgcaacctccgcctcctgggttcaagcgattctcctgtctcagcctcccgagtggctgggattacaggcacctgccaccatgcctggctaatttttgtatttttagnnnnnnnnnnnnnnnnnnnnnnnnnnnnnnnnnnnnnnnnnnnnnnnnnnnnnnnnnnnnnnnnnnnnnnnnnnnnnnnnnnnnnnnnnnnnnnnnnnnnnnnnnnnnnnnnnnnnnnnnnnntcccccagtcatttgacctcaggtgatctgcctgcctgggcctcccaaagttctgggattacaggcatgagccactgcacccagcctcattgttattattaagtcgcattcatacttgaaaatttcccaatattttggagaattcagcacactttccctctccttcatgtaaaataaaaaattttttgagcaaaactaacagtgattaagaacagactccaggccgggcgtggtggctcatgactgtaatcccagcattttgggaggccgaggtggatggatcacctgaggtcaggagttcaagaccagcctaaccaatatggtgaaaccctgtctctattaaaaatacaaaaattagctgggcattgtggtgtgcacctgtaatcccaactactcgggaggctgagacaggagaattgcttgaacccaggaggcggaggttgcagtgaaccgagatcgcaacactgcactccagcctgggcgacagagtgagactccatctcaaaaaagagaacagtcaggctatgttggatttgaatcccagccctcccacctcctggctctgtgccttgagcctcagtttacccatctgtaaaaaggggctgttaatagtacctacctcatagacttagaaggagaattgcattgtaggctattatgtattattaccatgtattatcatctatatagaaattatatatttatatttatgtatttacattgatatccattacatatcatttcatatatatatactatacatattacatatgtgtatatattttatatatatatatggtacgtacctgggtgtggtgccatgcacctgtagtcccagctactggggaggctgaggcatgaggctagctggaacccaagaattcaaggctgcagtgagctatgattgcaccactgcactccagactaggcaacagagtaagaccccatttctaaaaaacaatttttttaaataagcaggtaaagtacttagagcagtgagtgctggctcttctcagctacacgttaaaggaagcctggcctagcccacagcatgcagggacctgggccacttagttcaacatggcctggtgagaatgagccctgacagcccttctrttcttgtcccacagtgaagccytcagtgagctgccactgagtcgggagcccagaggaacsgcgtgaagccactggaccctctcccgggacctcctgctggctcctcctgcccagcttcctatgcaaggctttgtgttttcaggaaagggcctagcttctgtgtggcccacagagttcactgcctgtgagacttagcaccaagtgctgaggctggaagaaaaacgcacaccagacrggcaacaaacagtctgggtccccagctygctcttggtacttgggaccccagtgcctygttgagggcgccattctgaagaaaggaactgcagcgccgatttgagggtggagatatagataataataatattaataataataatggccacatggatcgaacactcatgrtgtgccaagtgctgtgctaagtgctttacgaacattcgtcatatcaggatgacctcgagagctgaggctctagccacctaaaaccacgtgcccaaacccaccagtttaaaacggtgtgtgttcggaggggtgaaagcattaagaagcccagtgccctcctggagtgagacaagggctcggccttaaggagctgaagagtctgggtagcttgtttagggtacaagaagcctgttctgtccagcttcagtgacacaagctgctttagctaaagtcccgcgggttccggcatggctaggctgagagcagggatctacctggcttctcagttctttggttggaaggagcaggaaatcagctcctattctccagtggagagatctggcctcagcttgggctagagatgccaaggcctgtgccaggttccctgtgccctcctcgaggtgggcagccatcaccagccacagttaagccaagccccccaacatgtattccatcgtgctggtagaagagtctttgctgttgctcccgaaagccgtgctctccagcctggctgccagggagggtgggcctcttggttccaggctcttgaaatagtgcagccttttcttcctatctctgtggctttcagctctgcttccttggttattaggagaatagatgggtgatgtctttccttatgttgctttttcaacatagcagaattaatgtagggagctaaatccagtggtgtgtgtgaatgcagaagggaatgcaccccacattcccatgatggaagtctgcgtaaccaataaattgtgcctttctcactcagctgtgtgtgtggcgtttttcctgacattcggagccatagatatccttctagatggcagggcctgcacagggcacaactgaggcagttaagggttcatggtggtgatggatggtgttgccctgaccagatgggacaccatagagccagtttgaagctggtcctggactaggaacaggagtaaaccgcaccccttccttccttccacccacacatcttcctggcactccaagcaccctgcggccacccagaggccacgagcatcccctccaaacctgctgtcctgcagcccacaagttcctcccagcttttataagttttcaccacttaagctgcagtgacaaaaaaaacacgtcaacactccccaggtcatgggttcccaggtcagggagtagacccccgcccagaggcacagtgcgggccacttccacggcgcctctgccccaccttgggctgcctggcctctgcttctgctcacagacaccaggcctgggctccaggcagggcctggagccgtgtctttggcagcctccaagcaaaccattcactcccaagcctcagtggcacctggagcccagcaggggcaggactgagtgcctgctgggaccatggctccctacccccactcaggtgtccccgccctgcaggctcactgcctggtgtccgtgtagaacctgacctaagtcccaggccccagcctctgactcaacagaccaagggccacggtggagagagagctggagacacccagacattctttagtctcccagcccccatcaccagagctgaggacccaggcatggatgcccatggtccctggggaacccactggctgctggggtgggctggcctgctacacaagtgccatcatctgctcacccacagggagaatgtcaagcccaaggccccatgcccacttaggatggatgtctaggcactccccagcatttctgtgggttcccaggagatacgggtaggagagcaactgtttggggcatacatcatgctccccgtcacctgctctgggttccagtcactcaagcaaatgcagtgcccccaccacagtcaaacccagggctgctgtgaggacctggctttgattgcacgtggtcggacagctgaggcccacctggtgctcagaacaggaaacgctgtggaatgcaagaattttcatccttgccttttccatctctctaccctgcacccaccccgagaggtcccggaccactttctccctaggctttttgctgccgtgatcatctgggttccaccttgaccaggtctctctcctgtctctcctttcctgacaattctaggcattccaaacacccaggttcccccttctggcagagggggaacccagacatccccacctccttatcacctacataattcacctccaagtaattcacctacaccaggctccctaatcaagaaggcaggtcaattagccagctctcatcaaagtgctccattcctaggatgaatttcaccgccccctgagattgcagatgctgctacagtcactgttccttttcagaggtaatttttttccttctctgcttgatgctatgaaggctggttgagagcagcagagtttgtgccgacaggaaggtgttaccctcatgatggacagtctctagcagcgctcttcccagtgcctccaccgcagccccccccccacccccccgcagcctggagggcagcgcctgcagccagtgccacctgcagggacagagtcagccacgggctcctcctccttcctgcatttccattctttttccacaccattttccccacccggataggagagaaattagtgagtcattcagaaaagctctctcccacagctaccttccctggttccagcctaccaggttctcatctttgcatgtccttaaaatagctcctttctcttggcaaacaaatttccatggagacccagctatgggaaggcccagaagctttctgcaaggcagcaaactcagctcccagccttcactctgacagagaccctttataatgcaaatgtgtgktctcacccccacagacactgccacccacgaaggtcccattttgggaaatctgaaccacccagggaacgcactgggaggttgagtctaggtataggcaatctagtttcttgttattttctgacgggctggctggcctgcactggtgagttctctctcaggtcacagcagaccgaaccactaggcttaccagtgactaatctcacagcaggcatacccagctcatgctcttcctccatgcacttggccacacatgttgatggcgtgcactgggccttgggggtcagtgcttctattgagggaggccatgggtgggagggatcctggactatgggaacagatagaatggggcttaaatgtcttttatttcctaaaactataatcttgcacaggtttcttagcttttctgagcctcaatctcctcatctgtacaatggaaagaaggctacctggtgtggttgtcgaagattcactgagctcatctctgcaaagcccctggctcggcgcctggccctgctgtaggggttcagtgagtgttatcccgttccctcatccttcgagacaaggcagtgagggagggcaccgtgcacagcatcggaaaagaagcaaatagaagagctttggggatgcaggaacgtccaaagcagaggtaaaggcaagagcacaaattcataaacaaggcaggccatccagggggcaagtcaaggctgtgaaaagccatgaagagcagggagatagatcaggctaaggcatggataactgaggccaggaggaactagatgaggccaggtgggctatttgaggctaaggaggagctagttgaggtcaaggagaggcgaggttagttgaggccaggaagactagttgaagccagaggtgcaggtggattctctagctacacagagcacagctgctcagatgacctgagccaatgggagcagacccagcggacgcataggaacacttcatggggcagtgctgggcagtgtttctggccaccagggacatgtaggcaggtccagtcaccacaaagcagttttgtgccccacggcggttctggacgcacctgtccctgcgagattcggctcctgcacttgtctctccctccttccgctttttcttcctccttccctaaccatgtcaatgacttgcagtcctgcctcattctgcagggaatggggagccttggggactccggagcacacaatgacgtgcttgcttagcatttaggaaggtcgagaatagggtaaggccagcaagtctcgggggtgcaaaaggtaaccgacactcactctccagtgctcaccctgaacttgcaccacctcagatttaaacatcccccccacccatccctgccttgcctccccttcatccaagccctgcagagcaggcagaaaagtgaaagttagattccagaaggagccgaattcctgtggctgaaaggtggcaacgctccaacccgcagccctggcagggccttggaagaaggaagggctggaggtgcaggcggaagaggctgtcctctgtatcatgtggaatcctgttttagtgcacgggctataaattgaatttccaggccttatttagagtacatccccagaaatggtttgtcctgcttctgctatttttaaaaagcactctgtttaggtagtagttgagagcacagacttgggagccaaactgcttaaacacatcaaaaatgtgccaggctgtgaccattgtgcagaagaaggcaacatgcccagcttccagaagaggccgatgcacaggccagcagttacagtgccaggtggtaaggggtatgcagacaaaagcccccggccatgaatttcctttcgggattagctgggaaatgtttcatgatttagtgttagtattcagaatgataaccagactggtgctgaggatcttggactctggggtcagaacacttgggttcagcccccagccctgccacctgccactgactggcaggccatatgaccgtggctaagtacttaacttcagtttctccatctgtaaaaaggagatgataatgacatcaacctcacggaggccttgtaaggatttatttttttatttttttaatttaattttatttatttattttgagacggagtctcactcggttgcccaggctggagtgcagtggcacaatcttggctcacttcaagcttcgcctcctgggttcatgccattctcctgcctcagcctcccgagtagctgggactacaggtgcccgccaccacgcccggctaatttttgtatttttagtagagatggggtttcaccttgttagccaggatggtctcgatcttctgacctcgtgatccgcccacctcagcctcccaaagtgctgggatgacaggcgtgagccaccgcgcccgggtggccttgtaaggattaaaaggcatgctaatgtaaatagccctggctgcaggtaagcactcaatacatgtcactgttatcaacatgatgctctcacaaagacaacgtaattctccgtgttcccaccgcagcctcgacagctacaaggccacagtttttaccatttacaagcccttctcaaggtgactccttcgtttctggactcagggcctgatcctggccccagatctgacaagcggcagggccttggccaggtcactcctgcaggccacaccatttgtgacacctgtgacatgagaagtaaggccctgtgcctgccaggagyggcacggcacctgcagcagcacagccaccaagcacagccacagtcccagcacccatgtgccggtgaggtccatcactcattccccatcctcggatgccttctacaatccggtctacaggaccggaatcctgtccgaccaccgatgactcacacaaagcaatgggggacctgggacaagtgtgcctccatcttgcaggctaactcctggaggaactaacccatgcggaactgctccccacagggcaggggttctggaccgagacactactgacatgtggggctgggtcattcttcggtgtggcgctggctggtgcaccgcttagtggcatccctggcctctgcccactagacgctagaacccacccccagacattcccaaatgtcaccatctggcagagagaatggcagaatcacccccagaagtggacaactgccacagagcagttctgagaaaaggctcctccttcctgaagaaggtgaagatccgaattctgacaccaaacacacacaaatacgcacgcatgcacacgtgcaggaagctagcaggagggaggtgccccgcacaaatctggagaaatatcacagggctcggctgggcgtgttggctcacgcctgtaatcccagcactttggcaggctgaggcaggcggatcacgaggtcaggaaatcgtgaccagcctggccaacgtggtgaaactccgtctctactaaaaaatacgaaaataagctgggcatggtggcgggcacctgtaatcccagctacttgggaggctgagggaggagaatcacttgaaccccggaggcggaggctgcagtgagtgagatcacatcgctgcactccagcctgggcaacagagcgagactctgtctcagaaaaaaaaaaaaagaaaagaaaacaaagaaagatcacagggcccgttaggctccttccatttcaaggggcgaagatgcagcaggtcacctcagtgtttcacgtgtccgtgtgaaaagaccaccaaacaggctttgtgttagcaacatggccatttatttcacctgggtgcaggcgggctgagtccgaaaaaggagtcagcaaagggtggtggattatcattagttcttagaggttttgggataggtggtggagtttggagcaatggtttgcaggcagagggtggatctcacaaagtacattctcaagggtggggagaattacaaagaaccttcttaagggtcggggagattacagagtacagtgatcagttagggtggggcagtaac

SEQ ID NO: 94089 - DNA, 167013 bp, Homo sapiens
  misc_feature (1)...(167013): n = A,T,C or G
attagactgcatttacattttaaatcttcaaaattggtctgcagtatgaaatggcactagctcaattttttgttgtctctcgcccagccatcaccaagtctagtttaattcttttgtcagaagtcattgagatgacagcttcctgtcacaggctggcatgcaacctcaggtgttttcagtctttagtgccacaactctaatgcacttcaaaaataattgccattttttttagaggggtgagctttttcatttttttttttttttcaaatgacactagcttcatatatctttttggagctttggataggatttagaaaaagagataaaacaagacgaatctattgcccaattcttccttctttcatctgctggagttaactataacatattggtgctcttcggacaaccacctgggttattggctgcaagaggccgtatctgccagttcccatctacttagcataccattattctctttctaacacttttccagtatttgtcacattaaacctaagttaactgttctggccacctaagcaacacttccattttgagaggacaaagaagacaacatttcaagagtacaatactggtaacagtaccctcctggaccacttagaataaagtgattttttgcttcttctaaactcatagattttaaaacacctgcactcattaacttgccaattggtcatgaacttcctttggagttaaaaaaaaatacaacatataaaagattagtcattaaagtgtttttacaaatcaaatactagctacattctccccactataaataggaatatatatgtgtcatgaaagtacaaactaaataatattcaagattctttctagccctggccaggtttggtgtctcacccctgtaatcccagaactttgggaggccaaggcgggcagatcacttgaggccaggagttcaagatcagcctggccaacatggtgaaaccccatccctactaaaaatacaaaaattagctgggcatggtggcgggtgcctgtaatcccaggtactcaggaggctgaggcaggagaatcacttcaacccagaaggtggaggttgcagtgagccgagatcaccccactgcactccagcctggatgacagagtgaggctcttgttgcaaaaacaaaaaaaaaacaaagatcctttccacccctaacactttattaatctactggttttcaaagaattagaatccaatataagaaaatatatgtaaactactagagctagagtaagaataacagtatttttttttttgtttttgagatggggtctcactctgttgcccagtggtgagatctcggctcactgcaacctttgtctcctgggttcaagtgattctcctgcctcagcctacccagtggctgggattacaggctcatgctaccatgcccagctaatttttttatttttagtagagacagggttttaccatgttggccaggctggtgttgaattcctgacctcaagtgatccacccgtcaggctcccaaaatgctggaattacaggtgtgagccaccacacctggccaagtaaatcttatttatttatttatttattttaaagactgagtcttgctttgttgcccaggctggagagcagtggtgtgatctcagctcactgcaacctttgcttccagggttcaagcgattctcctgcctcagcctcccgagtagctaggactacaggcgtgcatcaccatgcccagctaattttttgtatttttagtagagatggggttttgccatgttggccaggctggtctcgagctcatggcctcaagtgatctgcctgtgtcggcctcccaaagtgctgagattacaggcatgagctgtgctcagccccccctttttttttttttttttttttaagagaaggggtcttgctatgttgcccaggctggtctgaaactccttagttcaagcaatcctcccacctgagcctcccaaaattctgggattacaggtttgagccactgtgcccaacccttgagtgaatctttgatttagaaagcagcgcactattttttctaaagctggagatcatcattataaagatcagcttcgagaaactaaactgaccccaagctgtaatccaaaagttatttatttgaataaaacccctctcccaagacccaaaacaacatggtatcaagcagtaaaagagaagtgcctgtataagcatacagtatatttcaaatgttactatataaacaaagaaaatgtttatgtataacatttatattctggactatgtcagtggtggtatgacactaatgagagaaatatctgccctcaaatccatgtcaaatgtgcagttatttggatttaaggccaacgaaaaagatgcagtgaaaaagagactaaaaaacagaatcagcatgaaagaaggattcatctaaatctggggcataatttggataatatacaacattaaaaaaataaagacaggagaaaggggaggaaatgtacaagaaataattttagaaagtcattccagaaaaaaaatctatcttataaaacatattttaatgctagtcttttagtacttatttatgtcaggccacctcttactggatgtttggtttcctgtgctgagactcagaaaaattgtcttgtggttagaaaatagcatattctcaaggcagttgactgaaaagtatatttttttggcatgccattttttacaacaaattttactttaaaaagagggtgaattaattagcttggagattaactctcactggtagaagtgtagtggatttattcagcatgcttaaaaaagaaaatggatcagaatttaggattttatatatatgtaactgacagaacctgagataaaggagagtttttcacttgcaaaaaataaaaaataaataaataaataataaaaataaagaaagaaaaagaaaaattaagaacactgaagggatggtgggaaagatttcttaaaaaagagtagttagggccgggcgcggtggctcacgcctgtaatgccaggagatagagaccatcctggctaacacggtgaaaccccatctcaactaaaaatacaaaaaattagccgggcgtggtggcgggcgcctgtaatcccagctactggggaggctgaggtaggagaatggtgtgaacccaggaggcggagcttgcagtgagctgagattgagccactgcactccagcctgggcgacagtgcgagacgctgcctcaaagaaaaaaaaaaaaagagtagttagaggaaggcatgcgcctaagttagacttgagagcaaagtctgaagaacaccaacaacagaattattctttaggaagccgaatgccagggagcactcctaaggataatttactaaaataaaaaggtaacaagatactcagcctggtgaggcttacaaatgagagaaatgaagcatacttgtaaaataccagaccttcaggggaaagaaaatgcaaaaaaagacaaatttttaaaggctgtaaaaattaaaacattctaacttacttgaggtagataaaaatagaaaatcatgtaagattagaacagattatatttttgaccactcatgttaggaggtgaagaaatgttaggatcataaatcttaaagccagccaggctcggtggctcaagtctataatcctagcaatttgggaggccgaggcagctggatcacctgaggtcaggagttggagaccactctggccaaaatggcgaaaccccgtctctattaaaaatacaaaaattagctgggtgtggtggcgcacgcctgtaatcccagttactcggggggctgaggcaggagaatcgcttgaacccaggagatgcggaggttgcagtgagctgagatcgcgccactgcactccagcctgggcaacagagggagactccctctcgataaataaacaaacaaatcttaaaacaaatggaaaaatcaataatccgtttaaaaaatgtacaaggccgggcgcggtggctcacgcctgtaatcccagcactttgggaggccgaggcaggcggatcacgagatcaagagatcgagaccatcctggccaacatggtgaaacgaggtcgcagtgagccgagatcgcgccactgcactccagcctggcgacagagcgagactccgtctcaaaaaaaaaaaaaaaaaaaaaaaccaacaccaaaaaaaaagtacagaaaaggatacctttcagtatttcatacatcactaaatgtgcaaaaccccctaagaacagtttaattaaaaatttgagtctgaccctgggcccactgcctatgaattagccctgctccgcaaggagcagtactgttttaaaaaaaattttttttggacaggctgattttacatttgtaatatttctaaatcttaaattaaaaaatatatattaacatttatattttaaaagatgctttcaaaaatataaaaaaattaactcattacctattttgtttaagggctcctggaaaaactgagggaatgatcaatatgcacaccaaaacaaatatatacaaacttctaaatttcattttataggaatagtatctattgaaagggcagggtgcatgaataactcagtgacaggcgtaaactcagccaggattagaaacgtcttcccaatggaggccccgctcaagttgagaatttcatggacacagtaaatcatccaaaagcccaccttcaataaccaaagtaggcataaaaataggccgatggttactttggagataatataatcctcggtctwgttgtggagcagatgtcattatgggtggggctgaagcgcagagcagctgaaacatttttataccaccacccgcacactttcaatgggatagaagggactccaaaaggtaagagctcccaatcgtcagttgctactagaaataactaagttttgatgtggccgtggcacgcgtaaaggccacaaagagatttataaaattctccatgattaattcctatcctggaaaagaggcaatctccttttcccctccctagccggctcctccttgggacacttggctgagtcgttctttccctccttctcacgctgaggtgaggccgcacgcaagccggagacgcccgttttcctcttcgcgcggaggaaactctacgggtaagaagccggggtggcgggaaaggagcacgcggcaccgcggggaggcagagaaggcttgccagggactagccgggctcggggagagcagggacacgcgggccgtcggaccgaggaggccgaggtgacgaggaaaatctcccggcgcggagccgggactgggcgcttccggcgggctacggttgctcttggcctagcacagcctgcgtcccgggccccaaccgggccaggtagggagttaggagagagggtaaaccgcggctcgcacttgcctgagaccgggtgaccagtaactggtaatagtctttgctaggcggcgggccttgtcctacagtttcaaagagagtctccggcagccacgacgccatcttgggacgccaccgccgtcgctaagacaaccaggaaggggcggggcttggttggggtcaaggggccaaaaccctagtttaaattgaaccacgcttatgagctggcagaaggatttctaacttggggcgatcgtcccctcttccaagggtcttagggaaccctgatccrtgaaatttccagctccaggtcccgggtgacccgagggggaattagttcctgctaccacggaggggagggggtgaccccggcggagggataccaagtagatctccacagtccccttcctggtccctcgaagggatcgggcggagatcggaggctgctgagagagtcgagccgggaggcgtgggagggaggggcgatgtgatgggccgccagtaggcagcggggccggtcccgcggacgagcccgtaaccggagcccgaggacaaagtagttccccgagggtgtcagagcaggcggggagggaggcggcacgggcggaggcgcacgccgggcgcggtgctgcggctcagctgataattgaaggaacccggagccgccgccgccgcgccgctggggggggtggggggagctagtggaagttactgccgcgccaccgagtccggaccggagactttggggcctaactaggtaattggggcgcagctctgggcggcgggggcaagccttgggggagggggccagctgaggggttgggggggcggggggaggagctggaacagaaagtcccaggaagcccggttgtgtcatcgccgcgattcggcccccgcttggcctgctcccggcgccggcggcggcggggccgcggaaggaccgggccgggggtggacgggagagacgctcgagggcggccgcggccggagggaccggggcctggcgggaggtaggggtcgctgggtccctcctccggcttcccgcaatgaggagggcccttcacagaaccggggtaaggcttgcgggtgttggggagctcggcggggaccaaggggggccggaagtgggctttggagcttggagggtgtctgggaagagagaaagtggggggccggaagtgcaggtggggggtgtgaagacggcaagggttccccggaaatgggacgaggggcccggaaatcgggaaaggggaggctccrgggccgtggacggcccggaaatggaaactaggaagcagctccagtgacaacagttgtgggaagcgagggtcagagaagggagaggccagagagactttagaccgcagtaaggggtttcctgcccagggggacggcgagggacggttgagggagggcgagcccggagacggggtctgcgcggggcagttttttaagccgtgggaagttgaggctgagggaggatgatgacgaggggggcatgcagggaggcctaaagaagccgagaaacttgactgagaggaatagagtatccttttaaatagatcagaatgraaattggtggtaggtgggtttaactaggacttgggggagggaggtgggccaattgtcaccccaatcgtattagcattcagagcgagtcaggcgattratttatttatatgtggattacataaaacctattatttacaacgtttgtccatcagttcagcccctctccttccttctccatagtgagtgggtttctagtacaggaacaagttagaggggagttcgaataacgaaggtagtaaaacctcaaatcctgtcttcctcggcgtctctcccttcctcagaataagaaatccttcatttcctagacggaaaaatgcggaaaaacataaaaacacatgtaaatcggggggaaatcacactttgaactcctggtgggggacaggagggaattggttaccttacgtggtgaggagataacggaaggggcagcttccaaacccttaagacaaatgttgtgtttttttgataatgctgttttactttgggggaggtttagcctaagcatcgagtctggtggtgggcatagtttaattgcttctttagttaattgggggagggaatgtgtttgtgtgtaaaggttgggccggtgcggggggaggcgggtacggttaatagcgcagtgaatccgttctaagtggacgtctaactgctctcctgctgtctcctttcctagtcgcggtcctcgatcttgcctgggctgccagatcacccgatctccgggctttactccgttttgtaggccctttagtgatgtgtttaactttatgttcctctcgagagtctcattaggtatttttggcatttcattttttaaagacctagcaagttgagtctcagagtctcctctttaaaaacaaaacaaaaaatacggggtagaaagttgaaagagctattgagtggggtaaaacgacgctcagaacaaaggtcctagttgtgttagaaaaaaaggcaagaggcctgtatatgaggcctgtgtgtgtcgcatttacaccccgggggggttgaggaatggaattagcagaggtttagagacaataaattgtagaggattttattgaggctgattttcatatttaccacatgcaaagtgatcaatattaagtgtaagttttaaagtatacagaatttctaattctttcttttgacacttcctgctgtgtgttcagccccagaaatgttgaactgctgtgactatctttgtgagattgagggagttttattttaagcttaagagtacataatatgattggggtttgtgggctttgtacatgtctgcctttctatgaatgtgccaatatccataagaattggaaaactgtaattaagattatcattgtttccattcaatccccagtttttctggagtgtgagcagtttttaagtctgttcagctgacatttatactacttagtttgagtctatgaacaggctttatttttctttttttttttcatttactttcaaaaagtttgagaacaattttggcagttaggttccagaaggtgctaaactaaagtagttacatttaaaaaacgaatgggatgctaggtagatcacggtaaaatcagtactttcacctggcaaagtaaatttgtagtaatgtatgattccatgtatgattcctttcccattgtaactttttttttttttaaagcagaatcttgctctgtcgcctaggctggagtgcagtggtgcagtgtaggcttaatgcaacctctgcctcctggttcaagcgattctcctgcctcagcctcctgagtagctgagattacaggcacgcgccaccacgcccggctaatttttgcatttttagtagagacagagtttcaccatgttggccaggctggtctcgaactcccgacctctcaggtgatccgcctgccttggtcacccaaagtgctgggattgcaggggagagccaccacgccggccccagtgtaacttgtaagattattgtatttatgttatctagacaaggttttaatatcctgctttattttaaggttttcatcttagcaaggaaaacatcactggcttggaaattcacacactaccagttagtagctttgtgaccttgagctagtcacttaacctatctggtcttcatttattttatctgtaaaatgggagtgggtaatctctattttacctcactgggtggttgtgagacccaacagatgtaatgactgaaaaaaaacaacatgctaaataaattaattttagaaaattacatgagctgttttgaggtcatttttaaaagatacagcttctcattagtcgtggtggtccatggggcaggggagaattaatgtaaactaggttgaaggtacagagttatagaacttcataatttgaaattgctgcttaattggtagtagaatttgggtctcatttttgtctttttaaagttaccttctttttttggtatcagcatgccagatacttgtttgccatacattctactgaaaaaacttgttaatatgtttaaagaaacttcaaattcatttacgttttttattgacaaagtacctgttctggtttgtgactctaatgaaattgacttaatgtaagagattacaattagggaataatgcttctgaatcttggtcactgttttctttacagaacctagggaactttccccccttttaagtggatgggtagggatctttttgagcaaatgtgataccagttgctcctttatttttttgtttgctatttgatggactcaagtcaaaacagcaacctacttggttttttaatcttcactgaaatcattccttgcaattgcctgtttgacatggacttttccctcatttaaatcaagcaagcacccactatgtacagaaaaacatagaagataaaggatgtgaagaacaacttacaactcatgtcttcagatcacttcctcgaacaagtttctacctgtgatctttgtatttctgattaactgtacttgcttcgtttctgcattacagtattgcatttgttgacatgtgttgcttttgtttccctgattggactgtaggcttcctgagggcaaggatgatttcatgtcaatgtggtatgtgtgaaggtatactaataaacctgattggtctgggtgaggtggcactggaggtgaggacgtgggaggatcgcttgaggctaggagttgtagcccaggcaacatagtgagactgtctccacaaaaaagaaaaaaaaagttagctgggcatggtggcatgcatcagtagttctaggcaactttggaggctgaagcggaagtattgcttgaacccagagatttgaagttaatagttatgatcatgccactggactccaacctgcttggaagggttctttgaccccagcagattcttcagaatgctttctcttggttggttcagtgatcagggcctcttcacatctcccctgactaacgtgccattagagtgcctggatggatatcaactgtcactgccatgttttagtgttaagccagtggattattctgtgccacttttttcataggccaagctttagttaataaggccaagcctgaggagagtccaggccagatagggtggaagagtaaaaatctggtggatgttacagaataaatataatttttagattgttgtatataatcttagtgcttggtaatttttttttttttttttttttttttttttttttttttttgagacagagtctcgctctgttgcccagggtggagtgcaatggcgcgatcttggctcactgcaggctccgcctccagggttcatgccattctcttgcctcagcctcccgagtagctgggactacaggtgccagccaccacgcccagctaatttttttgtatttttagtagagayggggtttcaccttgttagccaggatggtcttgatttcctgacctcgtgatccacccgccttggactcccaaagtgctgggattacaggcgtgagccaccgcgcccggccagtgcttggtaattcttaacgtgtagtgtaatgtaagctttacttgtgtattttcttttggtacttgtgtatcatttcagcagctgtgttacagacttgaagacataacctcaaagcagttgttctctacctctctgctgggtttctctgtgcataatggatgcttgctgttatttgtaataaatagataagtataccgatgctagacctgtcccttgatttttcttttttttttttttaagtaaaatttaactctgctaatgtcttgggttttttaaaaatgtagttctttaatatcctaacttactgatagttttaggttattggcaaaaagaggtttcctagactgaaataagtctgttcagtcatttttctctgaggccttttagattttggttgtttattgtgatttcagtgatttcattaaactgaattggatagaagaaaaaggaacttacccattattcaggcttacctgctttgtcttgagagtgcagaagctattggcagtagtcagtttcatggttatgcttgttcgtttgttgagacagagtctcacttttgtcacccaggctggagtgcagtggcgcgatctcggctcactgcaacctccaccttccaggttcaagtgattctcctgcctcagcctcccaaatactgggatcacagacgggcacctccacacttggctatcatggttatgcttgatttaaaaagtcattcaaatggtctagagtgaaaaatacctgctactgtgtgttttccttaatagcactgttcaagtgattatctgatttgaaggcaagacttaggttccaatcctggctatgcatttcccatctttgtaaccttgggcaaataatttaacttagtactttgtgagcttcaagtgcctaatctgaaaaatttgattattaccacctaatgtagagtcagttgtcatttatatgctagacattctgtatttagattaggctccacagatgaattggaacacaaggccctttctccacttgtttacagtactgtggaccattgcctcatttgttaaaactcttttaactcgaacatacctctgttatatgcataggtatcctacttgaaacatttgacccagtggctcatgcctgtaattccagaactttgggaggctgaggcaggaggatcacttgagcccaggagtttgagactagcctgagcaacttagtagagaccttgttgctactaaaagtaaaaaattagctgggcatggtggcacatgcctgtagtcttcagctacctgggaggctgaggtgagaggattgcttgagcctgggagatggaagctgtgctgagctgtaattgtgccactgcactccagcctgggtgaccgtgagaccctgtctcaaaaaatttttttttttttttagtatacaatagtattccttagttgattatgaattctttaaagtctttagccctcaccctttttttaacttttataaggacactaatcccaagtagtgtccctttttatctctgcatctagcacagtagctggcccatgatagggattaagcgtttgttgacagaataagtcttgtgaaaataaaataagatactgtaagtggaaatattttgtaatggcttaatgtcctatttttaaaattttgattcttattttgcatcgttaatgctaaaatgactttgagacttttagtcagtatatattttggagactgcaagttactttaaatcatacattttaaaaagaattagggcaagccattttgttactctttaattgaccattatgtgcatgtaatagttgataaagtacattgaggacctaaataagttttttttttgagattgagtttcgctgtgttgtccagattggagtgcagtggcgcaatcttggctcacttgtaacctctgcctcccgggttcaagcaatcctcctgcctcagcctcccgagtagccgggatacaggtgcctgccaccacacccagctaattttttgtatttttagtagagacaggtttcactctgttggccaggctggtcttgaactcctgacctcacgtgatacacccgccttggtctcccaaagtgctggtattacaagaatgaaccactgtgcctggccaatatgttttaatgcagtgctaaatgattagtgtttccaatttataatagtatacatcattgtagtttattctgtttgtttctttttagagagcatgtacatatttctataaatatggtgttattacccatacatggatttttgaaggctatttataagcctaagtgtccatcaacaagccttcaagacttgaagttacagcatttcagtgtgtattttaatcaacttgttggctgtcataaccaatgagttytaccctgacttcaaaactcctactcactctagccgtgggcagtgctctgaataaatagatgtaccttgtgctgtgttcttaaggtcagatgaacttaatttaaagattttatactggtaaacatgtgcgatgccctggaaacctaaagtgagttttcacagtagcccatctcttgaaattctctcttcagttgtaatttaagctactttgtgtccttagagagcaggttcatagagatcatatgaatgtcccctactttttttgattctcaaaaaccaagtgcttctagtagccttgtaaataggaaatatatgcaaatgctgtcaacttctcagaccccagtgtttcgtaattctgttttacatccttggctgcaatcagattgaactgtttcttcctctctgaacacacccagcaactttttagcatttttgctttggttttttgtctacttgaattgacaccccctctcacatcttgtatctattatttttattattatttttattttttgaggcagagttttgctttgccgcccaggctggagtgcagtggtgcgatcccgactcactgcagcctccacctccacctccttggttcaagcgattccctgcctcagcctcctgagtagctgggattgtagactggtctccaactcctgacctcaggcaatccacccacctcggcttcccaaagtgctgggattacaagtgtgagccaccgcgcctggcctgtatctcttagaaatatatatacttacacttaactttcttccagtgactcctttaaaatttttactccttactctcctattctccttctgtaacatatttcaggatgactttcacgttctgtcttacataattagttgtttacattttaacttaactgggtttttggcctcttcaaggtagagatctcattcttttatcttcacagtgtctagcacaaggcttccaacataatgcattgtacatggtaggtgtacgtggtagtgtgttctggtgtgacacattgagaaacgatgttgtgaaataatattagcatcgtttgccataatttacttgcttgttttcatttttcaggggttggcagctgagtgtagaatataaatttttcaaaattaggctcattaaaatcagctacttaaggaattgttaagaccctagaatattttagttagttggttaccccaaatttagcatttggagatgatgtttattagtagatgatgatttatttatcaatacatatttatcaagtgcttactgtgtgccacaattgtgcttgacagaatataaaagggacctgaaacttattccttgtcttccaagttctgttatgtttcatatagttgatatttatcttattccatcacagcttatttgtctaaaactgtatataggagtatagtatttagcatagagaaatattctgtaaaattctaaatgtagattttctgcatttagaaaatctgatattagaatgtaaattaagaaacatgaattagggcatgatttgtggctatactaaataaattgttgaagcatcttcatttacaaatattcagccaggtgctgtggctcatgcctgtaattccaacccctagggaggctgaggcaggaggatgatttgagcccaggagttcaggaccaacctaggcaacacagcaagacatcatctctactaaaaataaaaaattagcctgatgtggtggtgcatgcctgtagccccagctacttgggaggattgcttgaacccaggaagttgaggctgcagtgcgtcatgccactgcactccagtctaggccacagagtgagactctgtctcaaaaaacaaaaacaaatactcatcagcagctaatgtgagtgcatatctggttccatacaagatctgccctcttagagggtgctgaaaaagaagagatttataaaaggagattccttatcttgaaatgtactttgttgtagatgagttsaaacttacgacwacagcacacaacatctaacattgtgcatatttgttattaagtacaagatcgagttttatacagtgggtacttggaagtttagagaggttcagttctgggttgaagttacttaggaagactatgaagagagaggggcttaaactggccctgattgtttggaggaagatatagaagaatggggagcttaaaggtgtaattgtggtgaggatctaatattaaggtaaatgggctctctggagtagagggtccatatatatgaaataacaggaaattgggctgagattattgaagttcttaaatgggagatcacggaattagatttaacagattatgttgaatgattgttgatccctgaataggtgatgtgaaaaaggtgtacaaaaatatttatgaatgaactgaaaacaaaaataaaagtgcttttagatgtcattttttatgacagtgcttccctttctgatactacatataaaagtttttgtattaagttttggaggagatagaagtagtgaaggtaaaacttcttgttttttcctgttgtttaaaatgttaaataagcagaagctggtttattgtctaaatgacccacaccagtcctctgttggacacagaagtcttcctttagtggaagctatcagtcattttgtctcagcacattcaactgttgtttgttcagattttttgtaattcaaaatactttttgatacctaatgcatgattttttgtgagttgtcctcagtaatttgtaagtcttatatagggaaacttttgcttagcgttcaatacagtgaaattatgtttaaaacaaaagtgaattgtggcttaaatatttaaatacttctggttttttttttctagccattactgactctgggataaatatgtaaatacttttaaaaagtacaaattaatattacatagtttaatcaaattaaatattctaataaaatattcgctttgcactctgcatagtagagttgttacccctttaattgtttttaaaattttattttgacacataatatgtatgtatttatggggcacttagtaatgtgtcaatacatacaatgtatagtagtcagaccagggtaattagcataccatcatcacagacacttattatttctttgtgttgggacattcaatatcttccctctagctatttgaaactgtatattaaactatagtcaccctgcagtggaatagaacaggagaacatactcttcctatctagcacagttttatatcctttaacagataccattacttttatacaagtatgtatacaggattttaaaaatgagaagttaggttgtatggtggctgaagagaaactaaaaacaatttttttcagtgttctgatagctatgatatttagctttctttagcagcttttatttctggtgtgttcttacagactttcctaattgcagtttggattaatttgattcttatgtagaaagcagagatgctagctatgcagatttatgactcagaattgtacctgtttgtagagtaaggaaggctgtattgtccaacattttgtggactttagaataaaaatattcgtgaagtctatctgttttactgctgtagcacaagagtgcctgtttttctgtaaaacagccacccagcttcatatattttttcctttatatgaagcatgtattttcatttcttcccacctagggaaagcagcttagtctcaagggaatttgaccctgctctctacccttccaccccaggtccaaatgcatttgtgcccttcccccagtagatggcaacaagtaggctgatgtttaagaagattcagtagtcttaactttgtgatcagacctatttactaattatttctcaactgtcattagtaatgttagtgttgattttcacattctggcctcaaaatcctttcagaaaactagactgttaattgcagagttcatcttttttactctactcttcatcctgccttttgaaaagtgttgcctttccagttgctgctatgaactaagacttggggtatttcagcctttggtgtggtgctgtaagataatctccttctgcctcttctaaccatctagtattacttttcagctgcctgtatattaggccatgacattttttccaggtatcttgtcattacagaaagtaaggactactgaaaggaattactgaagagctaatacaccatcattttatatcttcattgtggtacatgttttaattgatactcagtttatttcttgaatcatttaaggaattggtaaacttatgtttgctggaataccagagtttctttctcttctataaaatgggtctactacctaactcatgtgtttactgatattcagccatagtgttacggttttgtttcttattactaaaaaagaaaatgaaggtgattcataattacagagttaacttctgagagtttactgtatctcaagaaacttagaactttttcatgattcctgctgagtttatttaaatttttaatgcaatagtaaaggatttgggaagttttccatatttcttcagacagttgtaaagttaggaatggcttaatctatctatagttattttaaggagtgtaaaatcaaggacttagtaaaacaacagttctaaaaaaattctggaattgtttctattttaagggctagtattagaatcatggctcaaggaaaggagttatcttggtttcagcaactgctgcatttagctcttaaaggtgttgcttgaattgcatgtagcaatactctcaaacctagaaaagcaatcatttaaggcatgtcagtgcagttactctagcagtggatatggaattaatacatgtgaattataagcaaatggtatatatatattttttgtttttagagttgggtgtctcactctgtctcccaggctggagcatagtggtacaatcatgtctcaccatagccttgaaagcccttggatcttgtgatcctcctgccttcacctcctgagtagctgagactacaggctcacaccaccatacctggctactttgttttttttttttggtaaagacagaatcttggttgcccaggctggtcctgaactcctggcctcatgcagtcctcctgcctcagccttctaaaatgctggaattataggcatgagccactgtaccaggctttttttttttttttagacaaggtctcaacgctgtcacctaggctggagtccagtggcacagtcactgctcactgcagccttaacctcctgggctcaagcgatcttctcaccctaacctcttgactagctgggactacaggtgttcacaaccacatccagctaatattttaattttttttttttgtgtgtgtggagccagggtgtccctatgttgcccaggctggtctcaaactcgtaggctcaagtgatccttccactgtggcctcccaaaatgctgagattacaggcatgagtcaccactcctggcccttatcagggtataataagtatttttgaacacttcttatttcaggccctaggccaagatttaggattataaagatatataaaatgtagtccttggcctggagtttacagtcttaaagggagagtggtaaacttggacaaaactaacataaaatctctttttttttttttttttttgagacagagtctcactctgtcacccaggctggagtgcagtggcgtgatctcagctcagtgcaacctctgcctcccaggttcaggtgattctcctgcctcagcctcctcagtagctgggaccacaggtatgtgccactgtgactggctaattttttttattttttgtagaggggtctcgctatattgcccaggttggtcttgaactcctggcctcaagtgatctgcccgcctcggcctcccagaatgctgggattacaggcatgagccatcatgtctggccgcatagcctcccaaagtgctgggattataggcgcgtaagccaccatgtccagcagcataaaatctttttttttttttgagacggagtctccctctgtcacccaggctggagtgtagtggcgcaatctcggctcactggaagctctgcctcccgggttcatgccattctcctgcctcagcctctccgagtagctgggactacaggcgcccgccaccacgcccggctaattttttgtatttttaatagagacggggtttcaccatggtcttgatctcctgatcttgtgatccgcctgcctcggcctcccaaagtgctgggattacaagtgtgagccaccgcgcccggcctaaaatctcttaaactgaattgtgagacgttacgcggatgcttcataagatgaccaactgtttggaataaagaatatggtaaaaatactaccaagatatttctcagaatagttgcattatttgcatctgtatatatttgcccaccttgaattcagatttaaattcctggttccctttttgatgtatcactttaaaaggtatataatatagtctaatgatctaggtcagtccactggtgtggaaaatgaatgggataagaatattaagaaaaggcatcttgaataatattagcaactaacctgtgttgaatccttcccttggctcagggctgggcctgtggtactttatatagcttagcacagtctgctggtggaggataatgtgataatgtatgaataatgataagtttagtgaagtgggtaagagcgaacactgagattcagtttaaatctaggctccaacattactagttgaataacctttttttttttttgacactasttctcccatctgtaaaatggragtaaaaatagtatatatatcctgattgttatgaggattaaattagttaatatatgtaaaacatttaaaacaatgcctggtataggataagtgcttgcatttgtaaactattattattattaatttgttatttttttctagagataaggtctctctctgttgtttagactggagtgcaattgtgtgatcatatctcactgcagcttcgaacttgtgggctcaagtggtcctctcgccttagctgtggagtagctaagactgcagacatgtgccaccatgcctggttaattttttatttattgtagagatgaaatcttgccacgttgcccaggctggtcttgaactcttggcctcaagcaatcttcttgcctcagcttcctcagcattgtaagaatactatttttagtaaccatgccttttgagagacagtgtttttattttcctttcctttgcatctgaaaagacagttttgagaagatggatttttctgatactatcttggaattatttgagtggtagaattttagagttgaaatgagatcattgcgagtgttatggactctgcagcaagatgaacttgggttctagtttttccttgtttgaccttgagcatgttactgtgtaaaatatagaaaatacatacttttcaggattcttttcagtttttaatgagtaaatgaagttcttacctagcacagtgcctggttcccagttgagtgatcaaatagtatttgttttattgtaaatgttaatagttctcctaaatggtgccttattttcacagttggtggcaatgtataaagttacagtcaacagtgtgtatttatttttaagatgttataatttaggttttgagtaaatttaatggacaattaaaatggaatctaaaaattgaaaggaaaaataaccctgacccagattacacacttagaaaagttttgtggggggctgtttctaaatttgatttaggttcaggtgttttatcactgctaattatagtctctttgactacttacagtttcaaataaataaggtcagtgttagcagtgtgatatggcatacattttttgatgtctttattttgatatagtctcagatttataaaaatcttgcaaaaatagtgtaaggaacatcccatattcctctttacctagtttcaaggtctttttttaatcgctagaggataaatttcttatttttttttctttttttttttttgttttgaggtggagtcttaccgtgttgcccaggttggagtgcagtggtgtgatcttagctcactgcaacctctgcctcccaggttcaagcaattcttctgcctcagcctcccaagtagctgggactacaggtgcccgccaccatgcccagctaatttttgtagttttagtagagacagggtttcaccatgttggccaggatggtctcgatctcttgacctcatgatccacccgcctcggcctcttaaagtgctgggattacagttgtgagccactgagcccggcctaatttctttttttttaattaatggaagtcttttatttatttwttttttttcagaaatagatgtaaaacctgatgaagaaagattcatgcagtaaacagtaaacatgtttcttttcttttctttttttttttttttgagacagtctcattctgtcagccaggttggagtgcagtggcaccatctcaagctcactgcaacctccacctcccaggctcaagcagttctcctgcctcagcctccagagtagctgggatcacaggcgtgtgccactatgcccagctaatttttgtatttttagtagagacagggtttcaccatgttggccaggttggtttcaaactcctgacctcaggtaatctgcccacctcggcctcccaaagtgttgggattacaggcgtgagccactgcgcctggccatgaacatgtttctttatgtggttcttcaacagttactatataggtgttgatttttcagaatgttctgaatgcactgtaatgttttgtgcctgagttgtggccatcattagtgaacattggtttattatacttagccttaaggccctcattggctattggatactcctaaatggcctgctttttatagaacttaattgctttgtgcagtgcatgtgttctctccttgctctgattggtgggcgtcttggtgtttaggcactgtgagctacaccctcctcccccagcttttaatatgcattgagttgcaaaactactttctagacttgtgtaccttaagttcagggtaaaggcttgcattatgtggctttaagacagtgataattttggtagctcaaaggtatttttaaaagtatattcgttattctcagcactttgttacctgaagggatcaataatgcttttgttatttttgaagatggtttaaaccttttgtgtctgaaaactgttttaagagactgcagagaagacagtataataactgagggccttattctacaagtgagggtctgtggtgtgctgggtattcattattgtgtataacgttttgcccttgactctttcaaaatatatcttctctcttcctaaaygactttgtctttttgcctgctataacttagtaatgactcctattatctgcacttgcccacttgaagagtctttttaaatacactttttttttttttttttgagacggagttttgctcttgttgcccaggctggagtgcaatggcgcgatctcggctcaccgcaacgtctgcctcccaggttcaggcgattctcctgcctcaccctccctagcagctgggattataggcatgtgccaccacgctcagctaattttgtatttttagtagagacggggtttctccatgttggtcaggcaggtctcgaactccccacctcaggtgatccgcctgcctcagcttcctgaagtgctgggattacaggcatcagccagcgcacccggcctaaacacactttttattttaggtcagtttcagattcacagaaaagcttcagagatagagttctcctatactscacatccagtttctgtttgtgaaaattttaacattagtatggtacatttgacacaactaatgacccagtattgatacattattactacctatactttatttgaattttcttaattttcacctaatgtctttctgttccaggatcctatccagggtgtcacgtaacatgtagcgaatgactttttaaaacttatgctttttgaggcatttatttctgattataaagtatagagcaattgttaaaatttgaataaagaaaactaagaatcacccccaattttgccacctcatataaccactataaacatttttgtatgtagtctttccttctagcctctgttttaataatagcagatcatattgcttttccttatgctattatatgatgagcatcttcctgttgcattattagttcttcattaatgtgctttatatttacttaaccakaattgttaaaatctttccctttttgtcagattaaaattttttttttttttttttttttggagatggagtctcactctttcccaggctggagtgcagtggcataatcttgggtcagtgcagcctgtacctcctgggttcaagcgattctcctgcctcagcctttcaagtagctgggactacaggctcacgccaccatagctggctaatttttgtagttttagtagagacagggtttcactatgttgactgggttggtttcaaacttctgacctcaggtgatccatcctccttggccacccatgctgggattacaggtgtaatccaccacacctggccagaaactattgttaataatcctttttaaaaatgctagctttgtactcatatctgtgaagccatgcttttttaaaaagttaatttatttttatttttattttttgatacagggtcttgctcagttgcccaggcgggagtgcagtggctccatcttagttcactgcagccttcacttcctgggcccaaactatcctcctgcctcagccctcctgagtagatcagactataggcgtgcatcacgatgcctggctaatttttttttttttttttttgtatttttggtagagacaacatggggtttcacmatgttgcccaggctggtcttgaactcctgagctcaagtgatctgtstgctttggcatcccaaagtgctgggattacaggtaatgagccaccgcgcctggccaaaaccatgtttttaaatgaaattttcctcccttatcttttgtattaccttggagtatcttgcattaacttgggatacttgtaatatcatttgtattaaccttgtgcaggatgtggctctttgcttgtggcagcccaatgggaagagtaagaagactccttgttgtggctcacaggctcctacatggccacctctctgacatcatctcctgcttttcttgccttctacttgctcttcttgctccgtggaacgtcatcttctagatcttaatggctgtttcttcatgcgtaaggttttagctcagatggccttacttggtcatcctatccataataattcctttttctgataggaacattttcacctgcaagtaaatagaaaacttgaccaacaaggccttaaacagattggggtttgtttttccttgcacgacatggttcgtttgcacagtggttccagcaagggccaggctctgtgtgtttctgctctgccattctaagcagcaagtggttctcacggttactgaatggctgtcaaggcttgaagtcattgtgtccattgcatttgagtcaggaagaagaaaagatactgttgtgttcctattgttgtttatctagaaagcaaaagtattcctagaggatgcctagcctgtctccctgtatatcttattactgacaactggatcatacttctggcaaaaaaaaaaaaaaaaaagaaaagaaaaagaaaaagaaaaaaaaacccgcacacagtaatggtattttgtacacagccaggtttagaccattggcttttaaattcttctaatatgcagtctaatatgaatgacctactgtgtgtcagcactgtatgtgaaggcatatctgtgtaactgaagtaagttgcatgagctgtgcttaatgattatgcatgctctattttcttttctctgtttcatttgaaagttttggttaggaccttttaagtctggatgccctgaaccttttttgaagcatagattctttagcagtctgaagctcgtggatacctcagaataatattgttaaattcacaaaattaatacccataagattcaaaaaaaccaaagatctcaaaatgttggaagtctagctctcaaactgtgaaagctggtatgtaatcagtaatatgtttattagcactgtcagtaacgatctagcagcttctcaaagtagttgagtgtaaaggatagtttgaggtatctgcagcaattgtaatgtgatataatatcagtgatttcttttggtacaaacttaaaggtaccgccaataatgctgtggtttgttgcctattcatatgagaaagaaatgttaaaattcttttttttttggtggggggaggacgaagtctcgctgcattgcccagactggagtagagtggcgcgatctcggctcactgctacctccgcctcctgggtttaagtgattctgcctcagcctcccgagtagctgggactgtaggcacgaccactatgcccagctaatttttgtatttttagcagaggcggggtttcactatgttggccaggctggtcttgaactcctgacttcaagtgatccacctgccttggccccctcagagtgctagagttacaggcatgagtcaccatgcctggctttaatttcaattagaggttagtgaaattatttcttccaagtataagaatcctcattatgaaccagtggtctaaattgatttcatgcctctaatcttgaagtttgaaagaaataactggctttagcccaatcatgactcatccctgagggcgagggaatagcctgcttcctgggaggttaaaggcggttgtagctggattcttttagcagggaagaaaggtggggtagttggaatttgggtagggaaccytgtctgctaccatcttctgtctgtagtctctacttcttcttatcttcttctcttcccactgcttagttttcctcacagaactgtctggtaattgctatttgtctgccgaccctggtagagtgtatattccttgagggaaaagactgtcttattaccttccagttcctaaaaaactgttctgaagtagggtaacagtaaaaataaaattcggttctcatttttttttttttttcagwcagtctcattctgtcacccaggctggagtgcagtggtgcaatctcggctcactgcaacctccaccacccaggttcaagcagttctcctgcctcagcctcccaagttgctggatttacaagtgtgcgccaccacacctggctaatttttgtgtttttagtagaggaggggggtttcaccatattggccaggctggtcttgagctcctgacctcaagtgatccacccaccttagcctcccaaagtgctgggattacaagcgtaagccacctcgcctggccaaagtgagccactgcgcctggccaaagttttccttattatgtaatacttttgaaggtagaaagcattttgtgaacaaaatagaatttttaaaaacagctttattgagccgggtgtggtggctcatgactgtaatcccagcactttgggagggtgaggcaggcggattacctgaggtcaggagttcaagaccagcctggccaacatagtgaaaccctgtctctactaaaaatacaaaaattacccaggcgttgtggcacatgcctgtaatcccagctactagtgaggatgaggcaggagagttgcttgagcccgggagacggaggttgcagtgagccaatattgcgtcgctgcactccagcatggcggagtaagcgctactctgtctcaacaaacaacaagcatagctttattgagatataattcacatgccatacaattcacctatttacagtaggcagtacttttttttttttttaaagacagagtctccctctgttgcccaggctggagtgcagtggcgcggtctcagctcactgcaacctctgcctcccgggttcaagcgattcccctgccgcagcctccagagcagctgggactacaggtatgtgtcaccacgcccacctaatttttgtatttttagtagagacagggtttcaccatgttggcctgggtgatctccaactcctgacctcaagtgatccacccgtgctggcctcccaattgctgggattacaggcrtgagctaccgcacctggccaaattctattaacttttaggttaaattttagaattaatgttgtaatgtgctgtcttcttagttaaaaatcttatcaactgaaaaatatcttaatcatctgtagtatgggactgcaaatggaaactgttatttggatttctctttaggaagaaataccccattggcaatttcaatttactatttctacttaaattatttgaatttaaacatctcgttaactagaaaatacgtttgttggttatgatagtgtcacttcaagcaggttagataggaaacagttattggaagatgccaaattcatttcagaaccaaattcaagtatagtgatgactctactttttgcgaaacaatttaccaggtttctgtttgttttttaattcctaggttgtagaagttcaactaaagcaaacatgaaatgtgtgatggacttttaagagcttcctttgtataacagtctgtacatagtgtgttaagttctcaagaatctctccttaaaaactttgaagttmttttgtgcaactgtgttttgaataaacccatgtcagttaaaaacaaaccaaacaacagaacttccataggctttctttttgtatgtaacaacttgttttaaaagacctattagcgccttctatatatttggtatgcagtttgtttggaagattataggtgtgaattgtgtatttgggttgttttgtcatttcagttgtttgcatgttttcaggctttcctttgaaacctatccacagttatatattgctcattcattcatgcccctagacctttctgaagttgtctcttgctagaactccctttttgcctcccattctagaccattccacttctctcttggggaaataccttattttcatgagttcttatataccagctcttcctggaatgtgtattgccacccctagggctcgggttgctcttctctaatagtacttagagtagtagtttgtcgccttttactccagttacttgtttccattttggtcttccgttggtctgagcttcccagcattcttttaaaccttgcatgcatcctaccaaagattccagtatcaccgytggctatctgcacacctcacttcaagttgtctttgaaagagggcttgggctagctcatgtctttcacagctgatagcacagggtagaatcttggtctagtttattctagctcattcttgctggttttcctgattttttttccacctgaggaaaaccttaactgttctaacactttggaggtgtggcagtacctcctgtttctacttctttttacagttttaactatttttctattccctgtggctgaaaaagtgattgcgtatataaatttggtggctagaccgtgtgccatggcttgtggccaaggtgggtggattgcttgagctcaggagttcgagacaggcctggaaatctcatctgtattaaaaaaagaagaaatttgatggctgtggttttgtttagccctctttttcttgctttactggtttcttaatgtttttctcttttacttcaataaggaatgggaaaagaaaatataccattttattgtttcttgctgatgacttttagtgtattcagcaatactgagcacagtkgctcatgctttgggaggccaaggttggaggaacgtttgaagccaggagtttaagaccagcctggggaacagtgagacacctcccaacctctgtctctacaaaaaataaaaataaattaggtggatgcggtggggcacacttataattctagctactggggaggctgaggtgggatgaccacttgagcccaggaggtggaggttatagtgagctttgattgtgctactgcactccagccttggtggacagtgggaccctgtctttaaaaaaaaatttaaacaaaatgctatctgatgcaaattttagagaagaatcttttttttatactgtgtattatcacttaaaaagttgatttttttattactgtatatagtataatacaaatagaaagttttgatttgaatttacccttttaaaggtcagtgtataagtaaattggcctgagagtcaggcgactggagttctaattctaatccttagacgcttgagcatagatgaatttcctttgcgtcttactttttgtgttaaatgtgagtaatggctttctcttgctataattctggggttattagggttaaagagagacacatgttagaagtctttgtacattgttgttacttcgtgcgctgtggcttaattttgtctttgttattgggggaaatctctgaatgagtcaagtttacactaatgtcaatttggaggtgtaaaaaataaagtgggacttaaaaaatattcaaacattaattgaatgcctgcttacctaagactattacttgacattgacttatcaatgtgtgtctaatgaaatccttaagaatggaattaggcagctgggccttagggaaaccagtatttccgaaactatcacctattgtctctactgtctttgtgtctgctgtctctctctttctctctaaagactgctttctaatttgactgtattaaatacagccattataatgccaaacttaggttttacaatctaggtacccaaagagtcttgggaggagactctcattggtccatcataggttgtttgttgagtcttgaatcctggttaacttgtggcaggtgttgtgactatctggaagggtgttaggtattatgttgcagcattcataggagtctgtgggaacatagrggggagagagaggaggcaaacatggttgtctaatgtaagtacccacttgcagaggcatctaacgaaatgtctaagtttgcaaagtgccatggggctcttcagagttgtaattatgcagaagtatagagaactttaaggcaagaagattttgtaaaacttgaatagataattatctttatttatttagagacggagtctcactctgtcgcccaggctggagtgcagtggcacgatctcagctgactgcaacctccgcctcctggttcaagcgattctcctgcctcagcctccggtgtaactgggattacaggcgcatgccaccacacctggctaatttttgtatttttagtagagacgaggtttcaccacattggccaggctggtctccaactcctgacctcaaataatcctcccaccttggcctcccaaagtgctgggattacaggcgtgagccactgcacctggccccttatttattttttagttgtcttgttatattggttgctgagagaagtgttttaaaatccactttggatttggtattttttagttttttaatatgtaatattaggccttgtatataaatgaagtgtatataaattgagaattgcagtgtcactggattaaaccctttttcactatggaggtactctttttatctctggtaatgccttttaatgccttaaaagacttcttaagagtagttttaggctcacatagcaaaaatcagctgaaggtacagagatttcctgtacactcctctacccctcaacatgcatagccttttcctgtgatcaacatcccccaccgaagtggtacatttgttacagtcagtgaacctacattgatatgttattacccagagtccctagtttacattaggatttattctttttgcatcttctatcaaatttgtaatgacatacagctaccattgtagtattataaactgtaatttttaccaccctaaaagtttttattacttttaaaaacaagagtcttattgtaaagtcttttttagatacaccagctttgcctagtgtttgtatggtatttttcatcttctttcattctgtattcttgtttcttagattatctcttgtagttagagtattttaaaagcctagtctgataatcttaactagagatggagttttacttcattttattttctgatttgttgccttcataatagtttattattattattttattatttttgagacggagtctygctctgtcacccagggtggagtgcagtggcgccatctcagctcactgcaaccttcacctcccaggttcaagcgattctcctgcctcagcctcctgaccatgcccagctaatttttgtatttttagtagaaacggggtttcaccatgttggccaggctggtcccgagctcctgacctcaggtgatccacctgcctcagcctctcaaagtgctgggattacaggtgtgagccaccacgcctggctgagtttattatttttaatagagagatgattctagtctctgcctgcctgttttacaaagtaaaacagtatatttaacaaggtctttttgtggaaaatacaacgaccttaaaatgataactccatttaccaagttcctgttggccttaagatactgtcatttgaataaatttttttgaatcttactctatagtataatatagagttaatattcatttacatttagctgtaaaggtgacaacctttactttttcctgggccacttcttttctgctggtggaaaaacttttaatctgaccaaaacttcattcattggagataatttcacttggtgtagaatgttttattttattattttattattatttttttagagatggtgtctcactctgttgcccaggctggtatgaagtggtgctatcatggtcactgtagtctcaaaattctgggctcaagcgatcctcctgcacagctctacatgtggctagtttattttgtttttgaattatgacatgtctgggtttagatgtcttttatttatcctgtttgagctcagttaggtccctcgcatctgtggattcatatcatttactggttctagaaaattctcagccactaaatgtttagatatgtctctcacatttcttcactcttctacttctggaatttttattaaacttatatatgaatttctcactttattctctgcatatcttatttttaatcttttgttctttctgtgatatattttatataattccttctgtcttccactttgctgtctttgtctaataggccgccacacctattttgtttttgacttaggacatgtctgggtttagatgtcttttatttatcctgtttgagctcagttaggtcccttgcatctgtggattcatatcatttactggttctagaaaattctcagccactaaatgtttagatatgtctcacatttcttcactcttctacttctggaatttttatttaaacttatatatgaatttctcactttattctctgcatatcttatttttaatcttttgttctttctgtatatattttatataattccttctgtcttccactttgctgtctttgtctaataggcagccagacctgtctgagctttattattttatttttcatgttagaaattctgtttggttgttttccaaatctatgtaacatttaatagtttttctgtttcatttatctttctcatgtttgtcctttatgcatctacacattgtgagcattttaagatctgataattctcctatctgaaatgttttgtgtctttttgcaggtttttattcatgatgccttgtttacttgagtgttatgtatattctgttcattgtccttagattatgtgtagcattttccgaggcctaaaggtgcctttctctaaaggtttactttgctcttgtcaagtatttagatgcactaagagcttgctacccaaagtatggttctcagactggcagagaagtttttttaggaaacatggcacctcaagttctatccctgtattttaacaagaatgtgaattttaacaagatccataggtaattcttaggcacgttaaatactgagcatcgctgcgttaagtgatcagtargatttgaagttccttggcttaaagtttcttggatcattcacctgatttgaaatatgcctacaaatcttggccacacatgtataaattctcaggtatagattttcttttccccttccttctcttctctcctgctgtctcccctgtcttgcttgctttttttagcaacaaggcaactttcccagcagtcggtttgggatggggttcaggaatatttctggtcatcttcatcatgaaagtgtatcccatagttttttttcccttatttcatgagttgagagttgataaaggcctttaaaaacaatattaaattgtgtaatccttacacaggggccatgctattcttctccgtatagttccacttttagtgtatgtgctgccaaagtgatcacgataaagactttttttaaaaagcttgaaatgatattagattcttgagtattttgggtttggaaagtcggcggggggtgcagttagcttcaaacacaaataatcagcatcattagttattagggaaatacgtattagaacaataataagatactactacacacccagcagaataacgaaaacttttttttttgagccagagtctcactctgtcacccaggctggagtgcagtggtgccatctcagctcgctgcagcctccatccctcaggttcaagtgcttctcttgcctcagcctcccgagtagctgggattatggttatgcagcaccaatctggccactttttgtatttttagcagagatggccaatactttgagaggctgaggtgggcggattgcttgagtccaggagtttgggaccagcccgggtaacatagcaacatcctgtctctactcacctccatctccccacaaggaaagccaggcatggcggcacacacctayactcacagctactcaggagggtgatctagtgattctactcttagttaattctgctcaaaagagatgaaagcatgtatccatggaaagacttgtagaaaaatctagcagctttaaacttaacgggcaaaacttagtccatcaacagaaaaatgggtaatcaaaatgttcatattcatacagtagaatattcagcaataagaaagtaaaaatattgataaaactcagcaacatagatgaatctcaggatattattatgctgagtcaaagaagccttacacaaaggagtacatactatgtttccacttacataaaattctagaataggcaagacaatggtaaaaaaaaaaaaaattagaacagtagttgcagagttgggaggtgaagtgcagggactgattggggaggagcgtgaggaaagtttcttgggtgatagactgtatatcctggtaaggatttgggttacataggtgtgtgtgtttgtcacaactcattgaattttacacttaacacttgggcatttcgttgttgaaaatttaactgaaaacatgaagcaaaatttggaaactgttttatgatacataaagtataatggtgcctgcaacttactttgaaatacatcaaaaaataggatggatagttggcagacacaggggtacgtaaatgaggatatggatacatatgtaataaaacatatgtaaaacttttcattgtagaagctagatgggacttacaggtattgagcaattctcaacttttttgtattttgagaaattttataatctgcatgcaggggaaaggtagtgagaagtaaaagaagaatcaaaatggaaagttcaggaagataattcaatttgtgtaactagcctgttttacaaatgttgttcagtttatgtttatgcccatttgaagatgagtggtagctgtagtcttactgatttgaatgtgaatatggctttttattttttatttttattttttcgaggcagggtctcactctgtcacccaggctggagtgcagtggtgcratctcagcccactgcagtctccatctcctgggctcaagcaatcctcccacctcagccccgaaagtcgctgggactagagatgcgcactaccatgcccggctaatttttgtattttttgtggagaaggggtttcgccatgctgcccaggctggtctcaaactccgctcaagcagtttgcccactttggcctcccaaagtgctgggattacaagtgtgagccaccgtgcctgacctaattttttttgtattttgtcacattattctcaaatgggtgacaatgtctttacctctgaaaggcataatgatttctttgacagatgagaaaactcaggcttagttatgaaatttttccaagataacatgacttaaaatggtagagccagggtttgaacagactcaagacataggtactttttactacttctctctctgctccactgttgacatttaggtgtatttttgcagacttttttcctacacatatataaacaaatacatacctttccttccccctgcttctttcttatgctttgagtctcagcttaaaatgtctcttcagagagctgttacctgatgattcaacccaaagtagctttttccttcctccttcccattatcctctactccttcctatttttctcctatttcacttttcatgggacttaccacaatgtgcatatagtttgtttattttctctttccaattgaggtgagctccattgtagcaaacagtattgacacctgtcaaataggccttcaaatatttgctgaaggaatgaattaacaatgttctgtctatgaatgtcagtgcagtatatacagatttacccctttgcttttgaggacctctaaatatgccatagtattgatacagtatacttattaactgttcctttgctgagaacattcggatcatctccatttttccacagtgacatactgcagtgaccatcgtgattacatccttgcttacttgtgcaagtatttctttaggttagattcctagaagtttctaaggatatcagtggcagtttttaattgtgggagttgggagagtcatgtaaaaattacaaaggaatagaagatgatacgtaatgataccaaaacaatagcgtaaatctgtgtcacagttgtcaaacctagctgrtactagaaaaatagttattttgctttttttcctttttaatttcttttggtgtttttgttttgttttgttttgacgcagggtctccctctgtcacccaggttggagcacagtggcacaatcatggcttgctgcagccttgacttcctgggctcaagcagtcctcccacctcaccaccttagcctccggagtagctgggcctagatgtgcatgtcaccacacccggctattttaattttattttttatttttgagacagtttcgctctgtcgcccaggttagagtacagtggcatgatctcagcttactgcagacttcacttcccaggctcaagcagtcctcccacctcagcttgctgagtagctggggccacagatgtgcaccaccaccacgccaggctaaatttttttttttttggtagagagggggtttcaccatgttgcctaggctggtctcaaactcctgagatcaagtgatcctaccgcttcagcctccaaaagtgctggcattacaggtgtcagccactgcgcccagccccagctaatttttaaatattttgtagagatggggtctccttatattgcccagactggtcttgaactcctgggctcaagccaccttcttgtgccttggcctcccatagtgctgggattataggcatgagacattgcacccagcctattattctaagaatggtttgattttcccatacccccattctgatagggtccaggaatctgtattacagaaatttacgtttgggaaatacagctctgaattttctcttggctcctggtttgtacgtattctggctcaatatagaggcagtctttggcatctacttatttttggtaaaaatgctaaatgtagaaatgtggggcattagtctatagagtatggcatttaaaatttttttttaacttttgaaaaatattygagacattctaaatgaatttaggtataattactctgaaatgcatgatcttaaacaaaaatttgacactattattcaccaggtgttaaagttacagtctgtattttctccccgactttgagttacattttaatgcttcctttcccccaccttaactataatcttaataatttttgtttctgacagttccccaggttgtagctctattgatgacaggctacatacttgtttggaaaagattataacacaaatccatggttatcacaacgttaaaatattttttattgtaagtcaggaatagacgtcctaatctgaactatgttaaagagttaacctctgtaggctgggtgtggtggctcacacctgtaatcccagcaccttgggaggccgaggcaggtggatggaggccgaggcaggcggatcacctgaggtcaggagttccagaccagcctggccaacatggtgaagccccatctctactaaaaatacaaaaattagctgggtgtggtggtgcgtgcctgtagtcccagctgctgaggaggctgaggcaggagaattgcttgaacctgggaggcggaggttgcagtgagcctagactgcgccattgcactccagcctgggcgacagaacaagactccatctcaaaaaaaaaaaaaaaagagttaacctctgtgatgtcattattatggtggagttcacaatagtgacaagaatatatattgaagagaatatttttgaaaatattgccttattatgtgtgtctgaatgctggaaaggtcatttaccaaatataaaattgtttttgtccatagggagcactttgctgtaatctacagggtaccttgtactgtgaataacttttattcttagccaggaggtttctgtctgtcgcttaagggagagaagcatttacaaatcattctttctctgctccctcagcagctcctcatttttcataatcacctaatgagtccctaataaatggtattattatatctttataaggaagaacttttaaagtaccccattgaagaaaaactgaaataaacattaggttggagtcttaaaaaatttggaactgaatccgattttagagactatctagtctgatacccttaagaggaagtaactagaaagrctattgataagctgacctcctatccccattcactggctaatgatggtagccaacaggattgtagacctgttaaaattgggtctgtgcaccatttttggcatgtggactaaaagttgctgtctgtgtgcttttgagacctgaagaatatcctctgttacatgaatgcagttagtattctaatggattatacaagccatctgagctaagacaggatttatattagggaatgagtggctctgtattttagaaatagcttagcaatagctattcaggataattgatcatcttacagtgttctacaaaatagatttttggtctattttggacctccttgtgaagggttacctcctttcttctttgcttttctcacacctgttaatcacagattcaacaagttaggcacgtacttccttacttggagttgtcatcttctyatgcctcagagattgatatgctcttctgatccaaagcttatgctcttaatttttttccccctgcgggatcctgttagtagactgtcctttattcccaaccttttctttcagtaattcttttctttacctaaatacatatgctcaaaatttatttttttaaaaacgacaaacagggaaattacatatatccatgcaaacacagcctttgtctctctgccttcccttctctcctggctattgtctcttctctttataaagtctagcacttccagaagagagttggtatttattatcttaccttataccctctccttccccaccatttctagaaatagctctcaacattttcttttgttttttttttggaggcaaagtctcgctctgtcccccaggctggagagcagtggcgcaatcttggctcgctgcaacctccgcatcctgggctcaagcagtccttccacctcagcctcctgagcagctgggactacaggcgcgctaccacgccctcgctaatttttgtattttgtgtagagatggggttttgccatgttgcccaggctgctctcgccattttctaaatctgatggacatttttgagttttttgaactctgcctatctgtcttcctcttggtgtctgccaacaccactatcctgatttattttcccagtgcttgtggtaagttcttgattttccttgactggattctttttttttatgttttccttagattttagcatttcccaatatttcatcctgggcgtattcctctctttatgctgtctgtttttcatagagaaaatagaatcttattgattaccttggtttctcttacctcctgcatgtcagtgtaatttctcccatctgtatatccagttgcctacataattctcaatctttacttccatttgcttattgaarctctacctggatacctacatgatgagtcaggttttatatgattaacactaaatgtactctttctgctcatgtgtatcatttgataatgctgctacaatcattttgtataattttctaaagttaaaagcatgacttttagaactatagaatgtaaatagcaaagatactgtttgactagttaataaggacaggaagctgttgtagtaaagctagtttaaagagcatttggggaactgggtatttataggcaatttaataaagaattttagaatgagattactgataacctacaggcaacaaactgcaatctttggggttgtcttttcttctgtacataaactgtatttctccagacttaaatctacaggttaacatgtaactttaatgtctgaacccctgattaatagtaaatataatagcaaaattaaaatatgatgctcttgcagaaaattaaataattcctaggtaagcctctgatgtagcatttcctaggacattgaaaggatgtgcagtcatcttctttatatgttttagataacttttcttaacctttgtcaccagtgtaagaaatttgagtcattttagggtttatatttgtctgaagtctgagaaccacagtcttagactattctttctcactgtgtagatcctgtcatcaaaatgtttcttgaccccgtcttcattttgccttcttccattgttaacagatcctcatctacccttagatctgtttggtagctttctacttgatctgcctccttatctgtaggtcttaaatgtaaaactttttgtttctggcccttcatgatagagtttaggcttattttcaggctcaaggaaccactccacatccctgcattataatttattctctcattcctccatgtctttcctcactgctctagcatttcaaggaacatcagcagaagtgactggtcatcctcaacctgtgaaggcaaagttagccacctttttcttctttgtttagagtagtacatttgatcttgcttctcaaatcaatttagcatattttataattattcacttaatgattggccagctaagctgatttaccaaatggcaaaggatcagaattttctttctatcccccataatcctttaagcttgggatgtcatggctttctagtattttgattttttttaaggtaaatacataattatttttccttgtttgctcagtcaaacttgtatttgagtgctgagcccgtcccctattagctttgtagccttagggttattttaacttactgtgtgtcatgatttctttttaagaaggttatttgcactaccagttttgtaaagttggtgtgaaaattaaatgatttaaagcacattgcctggtacatgctaagcacagaatacacgtaacccatactttactgttcaacttaaatcttgtattttttccattaaatattgttttctagtgttataaaaatacaatttgaaaatactagtttggccgggcacagtggctcatgcctgtaatcccagcactttgggaggccaaggagggtggatcacttgaggtcaagagtttgagaacagcctggacaatgtggtgaaaccctgtctgtactaaaaatacaaaaattagccatgcatggtgttgcacgactgtagtcccagctacccgggaggctgaggtgaggcagaagaatcgcttgaacctgggaggtggaggttgcagtgaaccgagatcgcgccattgcactccagcctgggtgtccagtgagatcccgtctcaaaaaaaaaaaaaatgctatttttacatgttgtataatatcccgttatcacattcaaatggttttgatgcccataaattgcattcagtgcctaacagaccctaacgtagccctttctcttgcactcaatggcccttactctcctaatttctctatagaacttttctgattaactggaaaaaaaggcagtaaatttctgttgcccttaattcaaacgtgaactaataaactgcattgtgctgttctatatcagatacagctatttcaggtttgacatatggctacttaagagtttgacatttgacttacgaatataccatacaaaactgctgattttgtattgcttccttcctaaatcaaagtaaaataataaactgtcccagtggttttgtagaaagtttttgttctttttccccttcaattcctttctggcacatgatggacctgatgatttcccccgtttttctttaagattgtacttaataagtactcattaaatggcagctatcatgttcaggtaaggttctgagagccttatatgcagttctctaatacttaaatcccaaagtataatattgtctctaattaaatggagaaacaaactgagatgaaggtaagtacttgtaggtcttaccaagcagcagaggcagaatttgagcctaggtgggcgatacagagcagtaagctccttgtgaggagggattgtcttgtcattgtttctcggcacctctcaatctcagcacctctcagtgcttttggggaatgttaagggttattcattcccactttaaagataggcttatttgaagtccttgctgtttttaggtaggcaagaatgacttcttttatacacaagggtgatttctattttgttttattgtagtggtttaatatatgctgccccttaccacacttggttctgggacctagtcatttccttctttatctggtgtgtgtagttcagaactggagctccagatgtcagttcttgcttgcagtctgcaggtctggatgccattacttgtttcatgcagggtactaattttgtaacatttcagtttctttatttgtaaaataggactaatgggcaatggtttatatgactccttgtcacatttaaattttacaaaatgagtaaagtaccttgcaaattgtgtttattactgtaatttacctccaagttaatgatctgaagctaaaccaagcctttttggaggaccaaatctaaataagtccgtaagaaattaggggggtacatactggacaaatgagatttacctgttgcaaacatagcaacatgtttgtaacatacctgttcctctaccaaatactgtaggtggttgtaacaaaatggtaaatatttgtgtgtctaaaaatatccaaacatagaaaaatcacagtaaatatgtggtattatgtaatcttatggcaccactgttgtatttctggtcagttgttgaacagaatgtcactagtgcaatatgtggctgtattttttgtttgtttgtttttttgagacggtctccttgtgttacccagactggagtgcagtagtattatcacggcctgccacagcctcgtcctcccaggcttaagtaatcttccacctcagccttctgagttgctgggaccacaggtgtgcaccgtcctgcctggctaatttttaagtttcttacagagacaaggtttctgtacctgtgttgcctgggctggcctcaaacttctgggatcaagtgattcttttgccttagcctcccagcagcagagactacaggcatccaccaccgtgcctggctttatttttttgcaggtgatttctttcagtgttctgaaagttctgtaccagaggaaggattgaatttttaaaaaatgttttgggttttttttagcctttctttgtgtgcgtatgatattaagaatttagaagaaaaattaatttccggccaggcacaggcagtggtccacgcctgtaattgcagtactttgggaggccgaggtgggcggatcacttgaggtcatgagttcaagaccagcctggcyaacaagatgaaactccatctctactaaaaatacaaaaattagccgggtatggtggtaggcatctgtaatcccagctactctggaggccaaggcaggagaatcgcttgagcccaggaggtggaggttacagtgagccgagatcgtgccactgcactccagccagggcaacagagcaaggctctgtctcaaaaaaaaaaaaagaaaaagaaaagcaaaattgcaaaatgtttttagtttaagttttcctttaaggactattcttgatagatattttaggaatgaatttttaaatgtaaatataaaacaacaacatacaggtttttgggttttttttttgaaatggactcactattagttgggctggagtgcagtggtgcaatcttggctcactgcaacctctgccccctgagttcaagcgattctcctgcctcaccctcccaagtagctgggattttacaggtgcgcactaccacacctggctaatttttgtatttatagtacaaatggagtttcaccatgttggccagggtggtctcgaactcatgacctcacgtgagccaccgcgcccagccgattgtttttgtttttgtttctctatgtggtatttgcgtgtagagttaaatacattttcacataaaatgaaaagtcatttaacttaaacagtgaataagttggttgtatactctgtgattaaaattgtcgtgaatttgttttcaaccttgaagacatccattagcctttttgtttttcctgttaaagtcatacatgttctctattttatttcagtaccttaggactgaatatcaaaggttttatgtgaaaaatcttgattagttttacagaaatgaaggtatggccatggttagaaaagactagtgtatttcaggatttgatagggatattaaattgggtttataattctagtttcacactaggagttaatctgttaagatggaatcttcgagttcatattcactaccggctatgaaaacataacttttagcagtgtaatagtgtaattcccacttgtgttttaaaaattaagtaatatatggtagacataagtaattggtcaagtcagtacagaatattctataaggaaaacattctgtaattcattgcgtagagaaaacttttggcctctgggttcttagctgaagccaaagaggcattaaactttttttgaagttgaggtggtgatacctatgaagtgtgtagaactgctcagtaccaggattcagaagactggttcttcaacaaattacttggaactttcttcatttggatttgtctgcaaagtataaggggttgaacttgatcatctccgagggtcccttccagccctctggttttattgatacctggcagagggagagatcctgtatccatcatatgttaatcttttatttactttcaggaaattaaagttcaaatgttttacaaagcctggcctctttttaaaaagatgaatttatgctttaacagcagggagtaatttgataaacagctttgttcttacctgctattcttcctcttatatctcaagaattatcgacaaataggctgttggctgataatggtgctggttgaccagcactgaagatgttggggagcattgttaaggttacctaggtgactctaggtcaaaacaactagcctgacttagtttcatttgaatgacttaacactccatgacatacagtaggcgtttaatagcagaaggtgggcaggtgacaactactaaccttgtttataatactattctttgccttttaaagtgagagcagcagtatcatcctattctcttgtatctgtccttgctgtttgggtccaggtgaaatggcattgagatgattgaagtagagaaatttctaacatgaattttgaaaaagactggccttttattctttgatgtgctgaacttcttggtgtatcgcagtatacccaggaaagctcttttaaactatgtctccaatttttgtgcccaaagaatgaggatctgaggttaggggacaggcattcatattttgacaaagcttcccaggtgattgagatgtttacccttaattaaaaacatttcacttttgaaagtattttgccaaaaattaagactcatatagacagtgatttttatggtgaagcctttcccaatatattagattttattttaccacaagtatttttattcttttgaataaatgtttatagtaataataatacttaacatgtactgagcacttgctacatgattggcactgtattgagtagtttacatggatttatcatttgatcttcacaactgccatgtgagttctttatcctcatttgatagattgaagcacagggggaagtatgtatgcacacactcatatatgcaagattatgtacaacttgttagtgttagagtccagaattgaacttgggcagagacagtttgacttgagagctctgtacttaaagctgttatgctagagcagcctgtttaattccttataaattgacaatcagtctcaatgacaacaaaaatgatttcttccattctaaactctggatcccccagtcctttctcaaaggcagtcattattaacgaagtatgtttcatgcatctttccatgaatttttaacgtggacagtatacagaaacttatatacaagtcttcttggtatacatacacacaaatgagagtttcatatctttccatatcagtacgcataagtttaaccttttcttctctctctgcctgcctctcttttaatgtttaattgtatttatttttttctttctaaaactgactatccttaaattagtaatttgaactttctaattaaagtttattatattaatttggacatatgtgatagaaacagtctttttctactgaattgtatcaacaatataacccaaaagaaaactactttcttattacagtataaggaatctctaaaacaaaatccagtacagtaatagatttaattatgattaatttgcattctctttggcaccagtttctataatgtcatatgttcactctctttcccagtaaatagaagtaatgaaagaactccacttggaatttgactgcaggcttacaaaaaatagtgcaagattttatttgtgcatgtcgtaattctatgattgttatgttggcttgttttaccagttaaactaattttctgagtttcgatattttatctgcacaatcatttcttatagaaagttcagtttgattaagaactgttttgagctaaatttgagctaaaaatactttcgcaatttcttgttgctgacaactctgttgaggtaggtaacgtactggttttaaaggagagtaaattaaaggtagagattattttgtccaaggtcacggccagcagagctgctgttgaaaatccagaatatctgagaccattgctcaatttactctatttgagctgttttctcctcatcttttcagtaagatactatagttttacaattttgtttgttttgtttagttttgaggtggagtctcactctgttgcccaggctggaatccagtggcatgatctaggctcactgcaacccctgcctcccgggttcgagcgattctcctgcctcagcctcccaagttgctgggtttacaaatgtgcgccaccacacctggctaatttttgtattttcagtagagacggggtttcatcatattgaccaggctggtgttgaactcctgacctcagatgatccacccacctcagcctcccaaaatactgggattacaggtgtgagccactccacccggccacgattttgtttgtatttattttttcatttgttattcacaacaatactgtgaagaagacatgacatacattgttaattctgtgtctaaggaatcctaggcttagaggctgtgatttgtacaaaggcaaacttctttaacacctattccgtcacaagacttgagccatcatcttttgacttgaggtgtagtgcctgtttaggcacaatactagaatggggaaacgaagacatatttctacctgtgctctgttttctttgaattgagaattttctggctattccgtgaaatctaagttaattttatatactgagtccgggaccacatggcttgaatatgttacacgtaccctgacattttgttaacacgttgatcagtcagacttcacagttcagtgagacattgcagcatgggtgaaggctgtaaaatcagatagtttgcagaaaatttccatgtcaccgtaagttcccctcatttcttttccatattgtattttgtacatctgataaattttgtttatttttttttcttttagtgaatggtagtgtctagaaagggtatgtcccttcaagagagaggtgccaatgtccaaccggcctaataacaatccaggggggtcactgcgacgttcacagaggaacactgccggggcccaaccacaagacgactcaataggaggaaggtatgtatttcatggtaatttgaaaaggaattgggaataaaagaaaaaatatttttaagcctccttgcgaggtccaaaacttgaatggttcattgcatatgggtaatttttcctgatttgtgagccargtacttaaaagcaaactggaatccaaagcagttcctaaatttttccccagatatgctagactcaaagaagtagttcatagccactgacatgatcagacacctcatttagcatgtggtgtgtcatgttttgtttgccctttctcttcacttcgttaaatgtatgttacaacacatctttcaccattcgtggtctttttccttatgtgttgacttaatgatactttatggaaaagaggcctcatttgttttaagaacttgagttttaatactcagcttttgagcttttgtcctcatcatgccttttgacagcatagatattaacagggtagtgaggcactctgactttgttagtgaacgagttgtcttatgtttttagtggtctggtgtttctttttagttggagtagttacatatgaagtagtgtgaagaatcagatcagatgtgttttcttgaatgtaatactccaagtcagatttagccaaggactgtcacttcatgtaaaaaatactcagaactcttcttgcaaggcctagttctctaattttgggactaacattgattacgtttagcttgtgatggataattgttaaatttttttgtttttgagagtctcatcgctctgttacccaggctggagtgcagtggcactatttcagctcactgcaacctctgcttctgaggcttaaaaatccttccacctcagtcccccaagtagctgggattacaggtgtgcaccaccgcacccagctaatgttttttgagacacagagacaagattttgccacggtggccaagctggtctcaaactcctgacctcaagcgattcacccgcctcggcctcccaaagtgctgggattataggtgtgagtcactgcgctcagcygctgaattctaataggattatctcatacagcagtttgcggccataaccatgaatgcatattatctagtaaagtatttaaaaattttttaggccgggcgcggtggctcacacctgtaatcccagcactttgggaggccaaggtgggcggatcacgaggtcaggagatcgagaccatcctggctaacatggtgaaaccccgtctctaccaaaaatacaaaaaaatttagctgggcatggtggtgggcgcctgtagtcccagctactcgggaggctgaggcaggagaatggcgtgaacccgggaggcggagcttgcagtgagcgagaacacgccactgcactccagcctgggcgacagacagagcgagactccgtctcaaaaaaaaaaaatttttttttaatgtcaaatgtaaagaataaaagcacatcatggtgatgtcagactatttagtggttaagcatagggactttggactagggcagctttgcgtgtgatttctttttgttttgttttctttttttttttttttaaaacagttgctgtcgcccaggctggagtgcagcggcatgatcttggctcactgcaacctccacctcccgggttcaagcgattctcctgcctcagcctcccaagtagctgggatttcaggcacgcatcatcacacctggctaatttctgtatttttagtagagatggtgtttcaccatgttggtcaggctgatctcaaactcctgacctcaagtgatccattggccttggcctcagagtgctcggattataggtgttagccaccgcgcccagcctttgtgtgtgatttctgcctctgccattaaatagctatgtgtcttttgttaagagtttcaggaaacctcagtttcttagtccacagaatgggatagctatttcataggattattggtaaacttcagtattttagcatgttaagctcttatcacttatacttagtatatagagctctgttctgaaaatgtttgctcttttacattcaggttattctttggagcagccacactcaacttcatgtgactgattttaaaatattattcctcctgtaataaaagtgttacatgttcattttagattattttgaatatatagaaaactaaaaagaaaaacataattccacacttataacgtgtgctgttgacattggttactattgacatttcttctgtcttttaaaaaactgcgtgtagatgtacattatgtatgtgcatgtaagtaacttgtacctttagaacaactgcggttttatgcatattaatcctcaggttgcattgggactcttgcatgtgaactgacaatcattgtgggctatcaacagcgcattgcttctaaaatccacagtgtttcagcatggtcattttttctatatatcagtgttatgtagattaaaaaattttttttaatttattttttgagacggagtcttactctgtcactcaggccggagtgcagtgctgtgatctctgctcactgcagcctctgccctctgggttcaagtgattctcctgcctcagcctcccaagtagtagctgggattacaggcgcctgccaccttgcccggctaatttttgtgtttttagtagagacgaggtttcaccatcttggccaggctggtcttgaactcctgatccaaccgccttggcctcccaaagtgctgggattacaggcatgagccacagcgcccagcctaaaaaattttgtaaattgtattatgtttttattttatttttagagacagagtctaactctatttttctggctgtagtgcagtgatggaatcatagctcactgcatcgcaagtagttgagaagacaggcgcctgccagtatgcccagctgtgtatttaacttgatgcaaaagtaattgtgatttttgcagttttttttaatagcaaaaatcacaattacttttgcaccaacctagtatcatgtattttaaaaaaatgagtaaggccgagcatggtggctcatgactataatctcagtacttgaggtggctgaggtgggatgatcacttgtggccaggagttcgagaccagcctgggcaacatagcaatacacatcatgtgtcatcacaagacacatgtagaagttttctgtttctacaaaaaataaattagctgcgcacagtggaacacactgatatttctagctacataggaggctgaggtgggaggatcgcttgagccgaggagttcaaggtttcagtgaactatgactgggcacgccagtgcattccagcctgggcgacagagaaagaccctgtctcaaaaaataaataagtaataaacaaagtagtgggacataaatggaagtggttaatactagcgattaagatgtgttggtttaagtagctcaaagttgtaacagagatggaactcgattagatttgtagaatgacaaatcttgttgtagttcatgtagtttaagccagtcaataatatgctcagttgtgaagagtgtgatcaggacatagaaatttagagctttagccaaaacatcttattagttttaagaatgcaaatgagatgagaagatgctggctcttctaaatatcattttgccgtcttggcttgattcttttgctcataataaaatgtcaagactgggagtaactttgaaggccttcttatcagcccccaggttgatatatttttgttttgttttgttgagatggagttttgctcttgtcacacaggctggagtgcagtggcatcatccgggctcactgcaacctcctccccctgggttctagcaattctcctgcctctcagcctcctgagtagctgggattacaggcacgggccaccacacctggctaatttttgtatttttagtaaagacgaggtttcactatgtcggccaggctggtcttgaactcctgacctcaggtgatccacccacttcagcctcccaaagtgctgggattacaggcatgagccactgcacctgacccagattgacttttgaaacccctatagagtgtactgttctagcaattatctaaactctcagaaacctttccagggagttttgggagtgagaggattgggattaattgggagagaacaattacagctatatatttattctcttcatgtgactcgtttagccttcctaagtaaaatgctgtcattgtagccttsgtttcctgaaaatggttgacttgccccataaaggtattcacagtgatacagtgattcaactaatgataataatagcagttacacaacagcattaatggagtgttttaagtttaaaaaattattacacattctttcagttgaaactcagaaattaaatatgtaatctctcttacaaatgtggaagcttgctcaactttgtatagctagtgtgtagtcaggacttgwttccagacctcttgactgtaaagtcagtgtaccttttcattatgccagagtgtttcattgcagcccactggatccgtatgatgagggagtgttagaagagggtataaactttagttttgaatttaagtagcacttttctctcctaggatttgtgctaggattcatttttgacccactctgtttttttctaaacctctgcattaagctgtcttctttgtgtaacctccttccagtgacctcttgtgcctttctcccaaatcaagatggtttctttttaaaaatagtttaaattcattcttaagataaatgaaagtagagtctgaggatatatttaatcccttttaattttacctctgctctccttttcacccatccttcatcactatccacagttgaactaggcatcttattcctcttctattatttttcttagcccctttcctctctaattttttggattgtagctgacctgttcctctcttttctgttctctttttcttctataggaaatcactcctttccactgcttctctgttgacttgctctcagggatactacctagccttttccagttctagcacaggtatttgtaggctaccacctccctcttggcaaygcagtagcgtttttattataccgtgtgctttttcttgtttttctcaagtggcagtggtaggattgaatttaattttatagcaactttaagattgctttagtggtagtgtcttcaaggttgatttaactatataaacagtgcatattgagaatagaaaattgggacgcttcaggaaaattaaagaaaacaattttaatcctaccactcagagataaccatggttaatatttctagtctatgttcttacagtcttttctatacgtgtagcttctttttgtttttttcaaaattccacagagatcaatatatgtatacttgcaacatacaaataatagggatgatgttatcactagatgtattttctggaattctgtaacattcttccatgaggtaatttaaagtggctccatgattttctttaatataaaagcccatgatttaaatttgggcctctaggttttttcctcagatttttgctgtaaaaaatattgcttatgcctatcatatttgaatgtgagctggttttatcaagtcgaattcttgaaaatgggtttacagaatctaagggtatgaatattttgaagacttttgtctttcagaaatcttgggccaatttaatacttctaatacttcatgagagtcctcattttgccaaatcctagtcaatagagcataccctttttaaaaagaaaagtttgtggggaaaargaattccttggtttaaagttagcatttcttcgtttactatagagtggaaaaatttgctccgtgggccattttcatttattttctgagctgtttgttagcgtcttttgtctaattttggagatacttactcttttattagggccctttatgtgaaaggtgttgattcactaacatggacaaattttttttctgttttttttttatggtttattttaatttctacaacattttaaaatcagataattaagtctaccaactctgtttttcttcctttgccttctccatgctaagaataaatttttcctcagctttgttatggacccgtttttacatctgactagaatctgtctgaagtttttgaatgatgagaggaaatgcttgtatacagttgcctacttctcacccccatcaaaaaatttgcctgcaaagttttaataattatgtattactcagtaaaaactcaattgtgagaaatataggatatagccttctatttattatttttctttacatttttagagcagagatttttttaaacccccattagttatatagaaagaaatagagttgtgttttcacttaaaaaaactatttcaaaggattgggatgcagaaaagtacaaaaagaaaataagaactattcagagaaaagtctgtgttaactttttttatctgtacactttggcagatcacactgtgtgtacagtttggtatcctgctcttttctctcaataccctaacattaacattgcccatgtcattgtgatcttttggtaatcatttacaaatggtggccacattattcactgaatgagtatacagtattttccatggctacttttttcagtttttggatagttaggtaggtttaggagaaattgtttttgcttatgctccaaatgttcacatttcaggtatctcttcaggatagattccctgaagtgaaactgcttggtccaagggacttttttatgaataactttgttgtgcattaattttttacttcctgttcacattatcaccatcaggggaaagagtgctttttctcattgttctagtcacgttatctccattttgcatttttctgctaatttgataaagaagaaaacccttattcttgttttattgctgtttctctagtaatgaggtcacattgaaaaagtaggtttaaagaatgagtctggctgagaataatttttgatgcagtctccttctattatttttttctttgtatttgttattaatctccctttgtaccactgtacaggagaactgactttttaattggtttagctgatacttaccagtttattgtgtaaaaactacagtcctattccttaaaggctggcttggagaagtataagtcagtctcaaagaagctttaaaacagttggcaagacaggagttacccattagaagataaatgacatacactggttaggaaagtagacttgagtcttgtaagtcctgtaagtttatagggatacttaagagtttgtagaaggtgcagagtttaacagactcttaaaagacaggaagattttagagtaagaggacatttttgacagctttgtatttgtatttttgttcatttctttctttttaaggatagaattattttacataccgtaatgtgacttgctgtcttcattaactgtttcataggcatctttttctttattttttttggagacagagtcttgctctgtctcacaggctggagtgcagtggtgggatcttggctcactgcaacctctgcctcccgagttcaagcagttctcctccttcagccttctgagcagctgggactacaggtgcctgtcaccacagctggctaatttttgtatttttagtagagacagggtttcactttgttggccaggctggtctcaaattcctgggctcaagtgatctgcccctcttggcctcccaaagtgctgggattacaggcatgagccaccacacccagactcttctttttttaaaagagagatgggggtctcgctatgttgcccagactcgtctcaagctcctggcctgaagcagtcctcctgccttggcctgccaaagtgctgggattacaggcatgagccactgcacctggccttaatataggcttctttttttttttttttttttyttttttttacaatatctgtcattaaaactatattatcagttttaatgtctctataattttccgttatgtagatatatcaattatgcatatatgtaatcactcctttcatcatttggtttcaggtttttgccatagcaaatgatgccayacctgaacattctcactgtcatcgtgaacttgtactagtacttctctagtactagttagtactagctaggttattgcaagtggaattgctgggttgagtatgttttcaaatatttactcttctagaaaattgtcttctataagactactttcatttgcatataattactagttgattatactaggattattgattttccttattaatattttgtttttgtattttctaatttcaaattatattaggcttcagcattgctgtaaaggaatacctgagactgggtaatttataaagaaaagaggtttaattggcttatggttctgtgggctgtacaaaaagtgtggcgctggcatctgctcctggtgagggcctcagggagcttaaaatcacggcagaaagcaaagccagcataccacatggcaagagtgggagcaaggggtggggaggggtggcaggcacacacttgtaaacaaccagatctcaagtgaactcagagcaagaattcattcaccccaagggcattggcattaagccattcatgagggatccatccaccccagtgattcaaacacctcccaccaggccccatctccaacatttcaacatgagatttggatgggacaaacatataaaccatattactaatgtcttttaattttctaatattgcaaagaaaattgggaagaaaccatacttatgtttggattaggatctcttctcttttctttcttcttttctttcctttccggtcccctcccctcccctcccctctcctcccctctcttcttttcttgacagtgtcttgctctgttgcccaggctgaagtgcagtggtgtgaccttgactcactgcaacctctgtctctcaggcttaggtgatcctcctgcgtcagcctcctcttgcctcagcctcccgagtagctgggactgcaggtgtgcaccaccatgcctgcctaattttgtatttttagtagacacagggttccaccacattggccaggctgagctcaagtgatcctccccctcagcctcccgtagtgctaggattacaggtgtgagccaccgtgtctagccggattaggatgttttctagtgaaataatgaagccacactcaagaaggactcaggacaagctgtcagtgtaccaatcaacttaactttccttttcttgatttttgaaagaagtataccgcaaaaaaataaataaataaaatgccaaacttaattcctatctactgatttcagagactaaaacttgatagtttttactctatgcttaactacttaaaataccttgcaatttccttctttagtaattttgatcatgccattttccttttaaaatgcttgccttctgtattctagaccttatcttactgaaattctgccagtctttcaagatccattcaaaagtttccacatcaatgtagtttatactcttttccagtcttagaaatcttatacagatcccaaagcactgtaacattttggagatccccgggaactacagactcagtatctgtctggctgcctcctctctgttcatctgtccttacgttactgcttcttgctaccatgtcatgtccatccaggcagatctcaccatctctttgtacaccatgtttatttctttccctgtgccttaaggcttaacttttaggcctctcatcttctgaagctagatcaagccctctttcattttgaattattaaaaagattataccattttcatggaggtggcaataaataatgttcttcatggtttttgttgtgcacggcacctctccttaaaacagtagtcttgtggaatggcttcccatgcgttttgatgggtagttactctgttctaatacagttttactctgatcctgttagctattccttaacctttggtgaaagctaggggaatcgacgtactccctctttctgagcacagtgataagcctggtgtggtcacatgatcaagatgagaaaagttggaagatttagcttttttctttctggtgacaaagatgggaagatgtgaatctgaagttgccaactactgtgtatgtgccttatggaggaagatggacaggcagagaagagcaaagagtatgtgtgtgctaacgttctggcaagtttaaattcgttagtagttctttaaagttgtgttgactcttagccttttctaggattgattattccactgttgttctgattctggagataatgcatgtgttattttaataatgcctcttttggcattttagagttctgccttaatacaacatcagtataagattatattcattcatctgttgaacaccacgttagtaagcaccgtgctctatagtagttatagaaatgagggtagggtagggtttttcttttcctaccagggaaagaacccagaaagcaacccagctcggtagggggaatggggatacaggttgttactagagtcagatgagaaacatttctagagatgacctcattgatctgggctctgaggctgaagcaacagttgcaaagcaggtgtggtatatgtcaactatatttgtctttgacatgtggtctcattaattcctttcacagtctgggttttatttcgaagttgcntgtattgtgttaatttgctggtaagtggtaggtgttcaacaattactagtatgggttagaaaaggatatttgtttccttggaatttctgggcacagaaatgtgactttcttttttactgaaatgatgaaaacatgattggagtaaggaagggttgaaatagggcatagttaaaatgggctatgtagcaaggtgggttagataatactacaggaaaaaacatctcctagatattagtggttataatctagccactaaaaaggttgtctgtccaggtcagtggtaagctctgctccatgcctgcacattcagatattcagataccttgctgtgttgtcaagtaagagaatatggtgaactgtactcttgaatctccaaaacttcccccagcagtgattcacttctgttcacattcccttggctgaagcaagtcacatggcagtacgtgcttccaagtggttggacaagtaccatcctaccttgcatctagaaaaaggaaaaacagaatattcttgagatgtagctgtcataggatgtttatacgttattttgcattcttatttgcatctctatgatagtttgtttccctaaagcctacttagtgaaacttagccactggtcccgtgtgttttcttcattcgtctgtttaaccggtgtgagtgccttccttttatattctttaattcttatttctttcctgtctctttttttgtcctctcatttgttcagtcagaagcaagttcaaactgcttcttgtttgggaggaggagaatgttatggggagacatgatgtgatgcaaaaataatttaatgcctcttatgactgaatttgagccactttttaaaggtatttatactagaattggttgggcgcagtgtctcatgcctgtaatstcagtactttgggaggctgaagcaggcagatcgtttgagcccaggagttcaagagcagcctgggcaaaatggcgaaaccctgtctctactaaaaatacagtaaattagccaggtgtggtcgtaagtgtctgtagtcccagctacttgggagggtgaagtgggaggatcacctgagctcaggaagttgaggctgcagtaagccaagattacaccgctgcactccagcctggactagagaccctgtctcaaaaaataaatgaatgaatgaatgaaagtaagtattctagaatcggctgggtaatttgtaacttgctcttttcagcaatagtaaatcttactgctctaattaggcagcctggagttttagctgtggagacmtgtgtgcctgctgcattggtaatgctgaaactagtctgtcccatcaggccttgggatcaggaggcaagataatatggtgctgtattcaacaatggcatggttgccttggtctaaggagaagcagaggctacttttctgtagttggaagttagaaacatttgattcttagtagtacccgtgttaaattttttgggggggcctacaaagtaatagtttatatgttttctattagtaatttcctttgcactatgctttattttaatcaagtttggaattgagtcaaagtcacatcataagcatactggaaaacctataagaaattgtcagctgccatagattgtctcatatccctcactgaggatttgctttcattcttctgatactccaaaccacttttaaaaagctttcccagtcttggaatgccttcttaaaagtgttcagtgtcacttaaaaatatatatacaaatgattcttatactaactgcaagcttttttatcacatttggaaggctgttttcttgtaatacagagagaaaaagaaggcagagggctcctttttagaaaattaatagtggtgttttcctccctttttctcatatactatctctaaagtcttcagacatttattttggccgggcacagtggctcatacctgtaatcccacaacttgggaagctgaggcaggaggatcatttgaggtcagaagttygagaccagcctggccaacatagtgaaatcccatctttactaaaaatataaaaattagccaggcatggtggcaggcacctgtagtcctagctactcaggtggctgaggcaggagaatctcttgaaccyrggaggcrgaggttgcagtgagctgagatcatgccactacacttcagcctgggtgacagagtgagtatctgtctcaaaaaaaaaaaacaaacaaacaaacaaaaaaaaaccttccctgtctgaccatagcctacacttaaaaaaaaaaacaaaaaaaaaaaccctctatgtgtgtgtgtatatatatatactttgcttatttcagtagctttcagggtacaagtagtttttggttacatgaatgaattgcatagtggtgaacatcctttcatccatattttctgatgtatctccatgttcagggcaatttatatcatttgccagttactgtatgggctttaaaatttcctgcctctgcctttgcctgtattctgcttttgactggaaagctttttttcctcagcttttcatccttcagggccaggtttaaatggtgtggcctataaagcttatattctcctgctaaaagtattcgttggaaacatctatggagagtacctggtagattactttgttttatgagactctgacctctttgaggacagggactagactgttacctatatttatgtgccctrttgggacttgcatatatttgttggtggcaaacctaacatcttttgaaatgagtagcttagtacaatggttctcaactctatcagaggcagtgctccctgtctataatgtatatcatataaatatttttattatgctcttttaatatcttcaaataaatgaagaaataaaatacctgcctacacacagtttagaaatattgatataatgtcttagcattttacaaagataaacaaaaggaaaatagttgataacaaaaataacatctcaataggtaaatgcttggacacagtgacacaaaattatagtgcatctgtatttggagtcactgaatgtgacagttacaacaatggacttaaatgccataagcagcattttcatcataggcattaaaaacggtgcctgactcttggtaaagctgccaaaaaaatagtataatcgcttgtcgttgcattcttggaaaatttaatatgtaagaactgtgcaaaacaaatctgagaaattgcaagcacgtttttcacctatgtcactgccacactgtcagggcttttcataaggttttcatatattaccaagactgtttgaaatacatggggcatgggacagttgggtctttttgttctgtatgttgctcatctttacctctaatccacacctgctaaatgggaatagcactgccgcttcccagtgtatgtttccagaatgcttcctaggggcagtatttttgctgtttagaaatactgctttactttaaattatagaatcatttgggctagtgtttcagtgtaactaaagataggaacattgatcagatgaatcaagcttctttttgtaatagaaatagaaaaacagtgcgttttacagggaacattagtgagttacttatttaaagtggtttaaagtgaactttccaccattaattattgaaaatcaatggctcttttaaaacatggattttccagcatttgaaataaaatatctaatttttagaagacaaaactataatgttataattgtgtatttaaagtagaaaagcataaaaatgtgtctgtatacacatatacacaaacaaatttagagttgtaattaaacccacaatccatttatatttggtaatatatgcatgtatattatgtaatacatgcatatattaccaaatataagtggtaatgtgtgtgtatattatatatatgcatatcatataagctgtgaatatgtctagcataaaaattaaattcaggcagtgtaatacctataataggaattaactagctacttgtaactagccactttcctcatttttcctaacattgagacagcattttgctttctttttttttttttttttgtagttgagagaggatctcactctattgcccaggctggagtgcagtggtgcaaccatagctcactgcagctttgacctgctaggctcgagtgatcttccccaccccagcttcccgagtagctaggaatacaggtgtgtaccactacaccctgctaatttttgtattttttgtggagacagtgtttcaccatgttgcccaggctggtctgtttgaactcctgagctcaagcaatccacctgctttcaaccttccaaagtgctgggattacaggcatgagccaccacacctggcccaatattgtgctcttgatataaagtttaggtctcttttagatgtcctctggactagagatggtttttaattctgtggactactgtaaaggatttgactaaatagcagtacaaatgtaggtggaagggtacagtcaatactatgtgcctaaaagttaacactcagaggcatttgaggcttcataacccaaatgatcttgaaagcacataatgatcttgaaagcacataacccagagttgattatagtctgttctgttgcagtgttggtttctttaatgtgaattggcccatacacacttggtaaatagagaaataatgtcaatataacgtggaagtagtgttggttcataagcagtttttcccacagtgctaatgtataaactgaaaatggggaaagacctttcaattaaagaggaaggtttggtaatatttgaagacattacaccaaaaaaaaaaaaaagttgaaaatctggcagaaataatttagtgaaagaaatagctattccagtggtttctaaaaccaccataccttgtactgtcaaaagcagtctcaacaagttcaaaaccatttactcctttgtttctaaaggaagaagataacaggaaagtctacccaagaataattatatttttaattttttgaagctttttaaaaaatgcctttaaaaagttacacttaaaaggagaaaatacaaaaataagtctcaagtggatttattggtgcaaattttattgggagatttaattttttattaaaattgatgtgattttgctgggatgctcattacaaaataacataggtttgtgtgctctgggcccatcttatttttaacatatcagcccggttatttttagtggataattttgcagagacatgagtttttttttcaggaatacccatatgttgttatagaagctcctgaacacatgtgtgcacgtgtgcgcgtgcacacacacacacacacacacacacacactcwctctctctctctctctctctctctctctctctytcacccaaatctttgggctataatttactaaatgacctcattctagtgctatttaaaagagtttgtcatgcattttactatactgttctacaaattttatttatagtggatataaattttactaggttttaaaaagattatgctttttaataaaaactaaagttgaaggattaaggcttgctaaattagagaggtggtaaaatgagctaaaaggaggcgtccaaggctcctttacctctgaatactgtgatgttctaattggctattccagattggacatcattattttatggagatttactttgcagcatttttgagcattaataatttataagtggacataataaaatagagctccattttgggaggccccatattgtcacttcatggtaccatctggttgtctattccttgttagccagggttgaaaactatagcgcatgggctgaatctggctcactgcctgtttttgtaaataaaattttgattgaagtatagccaccatgctcgtttgtttgagaattttctgtacctgtttttttgacatacagtattgcccaggaagctgaaaatatttactctcctttatggaaaatgtattaagtcccatgggctaaacagataggcagaagggacagttaagtatcaatattttatatttttaaaatatattttttaaacagtccttagaatatcacactttaaaataattttaggtaagatcagtgtgggcattgttgattttttttttttctttctttcttttttttttttcgagatggagtctcgccctgtcacccaggctggagtacagtgacacgatcgcggctcactgcaacctccgcctcctgggttcaagcaattcttctgcctcagcctcccaagtagctgagactacaggtgtgcgccaccatgcccggctcatttttgtagtttttattagagacggggtttcaccatcttggccaggctggtcttgaactcctgacctcatgacacatccgcctctgtctcccaaagtgctgggattacaggcatgagccaccgtgccctgctgggcattgctgaatttaagccagttttgtgagccttggttttctaaatgatttgaatactgtttactttttgtggtataatatagagagtttacatgctaagttcttaagttcattgaaggtattagtaagggcatgagaaataacacaggagtagaattaggtggatctaacataagctatataaaagtcaacagaacaatttatttgagttaaaaagaggagggctgctgccccagacctcacctttagtttcatatgggccggtttctgatgacaaatggaatgaatcataatttttaattgttttgggcatttatttttcacaaagttgtctagctttgaatgtatgtagttttctttcagaatgagttgtttaattatcaaggaatgcaacaagctatattttaaattttaaaatgaaataaagtagaaaacgtgatttaattaaaacatcagtctgcaacgatctttaagaaaataagaatgtagaggacctgaatgacataatttatatttcctgtagctgttaaattccacaccccaaaaacagaaygttacacctcttttttagaataactatggaatgatttgaaaaatagtctcatttctgaagaaaaaagagttgaactctgagatctgttagtagaaatataacaaaaacaaaagcaactcttagaaattaaatctctaataaactcattggttaaagcaaaattttagtctgcaatgggagaatatctaggaaaaattaaaattaaatcacaatatatacaaggcaggaaaatcacatgatcctgggaggcggaggttgcagtgagccgagatagtgtcgctgcactccagcctgggcgatagagcaaaaccctgtctgaaacaccaaaaaataaaaaataacaacaacaacaacaaaaacacaatgtataaaaaatcttacaaagttcagcttagctacaactttagaaaatatgcttcttgaagtatatgtgtcctttcattactaaaagtgaagactaataacacttgaaaggctcacctagagttttgtttttttgttatttttttttaagaaattcatctattctaataagtctttagaacatattattactttcagattagaaccttaaaaacaaaaatgatatgagggatccaggaactatttcctttcttaagaagctaatttcttaccttcttttaagactcttttcatgaattctggaaagatggaagaagaagtgatacagaaaagagaaaccttaggtcctcttttggaacagatggttgtacttgtatgatatcttaagaaatttatggcatccttacagattgagttagaattattttgtgagattttcagtgactcatttctaagttcttttgagatggtgtttggaataaaagccttaaacttttttttaacaagtaaatttggtattaatgaaacttttttctagattttcattggtatatgctcttatgtggaaagtggatatcagctatgaattacataaattgcatttgttacattaatatctcacccgaatggcagcagttttctggatatcaacatgtgtttgttttttattgcttatgtaaatctcatgtaaccattccccaaggtctaaaaaataatctaactgaaaacagttttttcatgttcctcaaacttgcttttagaatagtgctggcataaggatttgatttattgtaaatatgatgcaccatatcaatcatggaattatttgaatgttttttggaacttttgtggtaaattccatatttctccaggacttttttgtgttctttctgttgacaagtactttaaagttttagcaagtatcactatgttgatttcatgtaggtttattwattgtttagtgcttgaaatgattttctgtgtaaaatcagtttgagaattggttcgtctgtctctgcatttgctgtgtttacctgaattttaagtacaaattggaaatcggtatcagtgtgggaatcatcaattgtcttttccgtaaacttttaaagccattacagtcacattatgtattaaaagtgtgtttagatctaaagtctaaatttgctttttgttaaaatgtagcatatttgaatatctgcactaaaattgctgaaaaatgtgttactgcttaagcaaccttaacaacgctgtgcaattatgactactggtgataataaactcttcggtattgcggggcgggggtggttctgagaggcaatttctttttgccagattatttagtagaataataattaaaatttataaatatttggaaaaagggtagggtcaacaatgaattgtgggaagctttaagaaatatataaaaatatttcattttcagtattgtatttgcatctcagtttcctgatagatttctgttttgattttctgctgacaggtcacatttagggcaggcaaaacataagggatatagccctcctgagagtagaaaatctaattctaaggcacccaaagtgcagtctaatactacttctgaactgtcaaggggacacctttctaaaaggtaaatcttcatgttgcttatacattttcaaggcagaattatttgcattcaaatcattgcataatgttaaaacttgaggttattccaaaacgttttgatacatattttcattattctctaagtaacttttaggattgacagtttatcacctttgcagtgattagtgcagtataccctagacagtgagtttgtcaatgataaaatgatatttttgtttggagagccgtaagattccccctttgcttaacaaaccattatggccattttttatttctttttattttttaatcttttttttagtttttattgtcagagccatagtttaggtttaagtcagtgattcttaagatttaattgttaagagactttggaaagcaatgttaactttgaagatttgatagtactacaatataaaaatctctaaccttcattttgaaagtgcgtatgttaatgcttatttcttctaagctttgacaaagcagttgtgcttgtgaatagggcatcaatattctggcttcctctggttccgaacaattaagtgttgtttttcttgtaatcttaattcttgttttgtgattacgagtgttagtgtcagtaatctttgggctaaagaacacccttatcttttaatcrgatattttagtatccaaagtcacatctgcttttgttttgttcttttatttcgttttacagatttgaaccttctgaaaacctatgtttaatactggacttagtaggaacatattcatactttattttttgaaagcattatatatgacagttgtaattatgacaggctgatattaactgttttcttatctaacctcttagaagctgcagttcatcatctgctgtgatagttccacaaccagaggatccagacagagccaatacttcagaaagacaaaaaacggggcaggtgcctaagaaagacaattctcgaggagtgaagcgcagtgctagtccagactacaacaggaccaattctcctagctctgcaaaaaaaccaaaagcacttcagcatactgaatctccctcagaaacaaataagccacatagtaagtcaaagaagagacatttagaccaggagcaacaactgaaatctgcacaatcaccatcaacaagcaaggctcataccaggaagagtggggccactggcggttcacggagtcagaaaagaaaaaggacagagagttcttgtgtaaagagtggctccgggtctgaatcaactggtgcagaagagagatctgcgaaacctaccaagctggcttcaaaatcagccacctcagccaaagctgggtgtagcaccatcactgattcttcttctgctgcctctacttcctcstcgtcttctgctgtagcctcggcctcctccactgtaccaccaggtgccagagtgaaacaaggaaaagatcagaacaaggccaggcgttcccgttcagcgtccagtcccagccccagaagaagtagcagggaaaaggaacagagtaaaactggtggctcttcaaaatttgattgggctgctcgtttcagccctaaagttagccttcctaaaacaaaactgtctcttccagggtcttctaagtcagagacatcaaaacctggaccttctggattacaggccaaattagcaagtaagtttacaaaaaggtatttttctttaattaaagaaagtttctcttggtttgtcaaaagcaattatgctttaaagttaagggttttttccccccagtcttagataatcttagatgtattactgtctgtgtaattaagtacataacagcatgtagtaagtgctactacatttagttttgttgagacaggtaaggaatactaccttcctattattacgaaaccatcacattttagtgtctgtgtctttattggtcctcgcggcatctcctacttcactgatttcctaatatcaggatgggacataaagttggattttcttctataccacatacaaaattatcatttagttaggagttctttttagttatgagttgccatgatcagagatcaaatatatatatgtttttttagatggagtctcactctgtcgcctaggctggagtgcagtggcgcagtctcggctcactgcaacctccgcctcctgggcttaagcaatcctcttgccttggcctccagagtaactgggattacaagtgtgcacaccatgcctgggtaatttttgtgtttttagtagagatggggtttcactgtgttggccacgttggtctcaaacttctgacctcaagtgatctgctcacctcggcctcccaaagtgtggggattacaggtgtgagctaccatgcctggccaaatatatttttttatatgagatattcttgatgtgtagatacagtgaattaagttattactataaatatacctcaatgtaaattaaactttttcatatgtaatatctcacagtcttttaaggagttttgtctaaagatgaatactacttatgtttcactactcttatatacactactctgtgtcctaagtgagtaagaatattgctctctaaaagtttacagtggagtagaaagaatttgtgttttgagaatacattcaagcaaagaaacagaaagtagatggaagaaacatagcgttatgtgcattccttcatgagtcagttttggagatatccaggaactcttctccctctctctttaccaaaagacttcttcagggaaccagctgctcatctggggaatgctagtgtctttcttttctttcctcccttcttttttttttttgagacagagtctcactctgttgcccaggatggagtagtggtgtgagtggtacgatcttggctcactgcaacctccacctcctgggttcaagcaattctcctgtctcagcctctcctgagtagctgagattacaagtgtgcgccatcacacccagctaatttttgtatttttagtagagagggagtttcaccatgttggtcaggctggtcttgaactgggacaagtgatccacctgtcccagcctcccaaagtgttgggattataagtgtgagccactgtgcccaggcttctttccttatttctatttcagaaacctataaaggacaaataggataataaagcacttatctctacaatttttaaaagcattttaattttataatacctaattaggaagcttgcttttaagcatcttttcttctctgatggattttagatctacatttgggtagggctataatgttttcttggtttaaaaagattgtatatagtgtctactagcattcttgtcaaagtatagctcatattgaatcagcctaacttaaaattgaatcagaactattagctctgtttaatttaacactgcagtctaaaactacttttggttgattcacatattacctgaaatgacaatactattaatagtaggtactatataaaaaattttatgtttaacctgtatgataggttattgtgaagtaacatattttacttttagattgaactttgttctgttttggtattttaaatatgcagaacatctgtataaaatgttttaagtttaaaggattaagataggctagatcagtatcttgaagtgagaaggaaaaaaaggtccaagttaaaaggacaaccaactatttgtccttccaatgctttattgataattggagttacatatgtcagcttttatgctgcctttcctccctgtgttttgtgtctgtcagtcctgctatgtaatattcacagccagtgagccaggttgagtttacagcaagctgcttaggattcacttccccttctgccttccagtctgcctcacttgaagaactcatctcttatgtgtaggagggttctagggccaggcaatagcagattgtacttgagtgtcatggccttggtcctttgtagagatcagctttcttttctttatatagtctgttaacttgatttttaaaagaaaacccaactctaccagtggctaatcagtgggattttctccttggtgtttcaatcaggaaacaccaagagttttggcagtgtcattttgctgctggtttgataaaaccaatccagataattccattaagcctgctcagcacatagtcacaaactaatttagtattttaaaactcatttcaccattatttcattcacttgcacagtatctgtgttctgttgtcactattaaatcacttttccgttttcactgccactatcccagttctgatctctcatcgtagcctaagctgttgaaacaagagaatggaaccagcgtttgtgtagcataaaataagtaccaggtattttacatatgcagttacatattcttttaaaaaaaatggtgctttaggatacacttttttttttttttttctgagacagagtcttgctgtattacccaggctggagtgtgtgtagtggcgcagttggctcaccgcaacctctacctcccaggttcgggcaattctcgtgcctcagcctcccaagtagctgggattacaggcgcatgccaccatgcttggctaatttttgtatttaagagacagggtttcgccatattgaccaggctggtctcgaactcccgacttcaggtgatctgcccgcctcagccttccaaagtgctgggattacaggcctgagccaccatgcccagcctaggatagttatcaaggaaatgtattccaaggagatgaaataacttctctgagtaatatacctcatacttggcagagttaggatttgaagatgggggtagtaggtgtgaccttgaatgaagcattttcttttctctttttttttttttttttttttaaacccttgttagtttctgtgttttactgttgtaacataattgggccatttggagatactaagactctagagaaaatgaaatgttatttggtccttcattgatagtattgattaaatttagagatgaatactatgtggacccaaggattcataccatatcattcaccatatatttgctgtttttcaaataaatgaaaacatttcaaaacaaagtagcatgtatttactgtgcttttaagtgcctgacagttctgaataccttacatgagtcatcttatttgttcctcatcggtcttgtatagcaagttgttgttttttgtttttgtttgtttgttttaagatggagtcttcctgtgttgcgcaggctggaatgcagtggcatgatctcagcttactgcagtctctgcctgctgggttcaagtgattctcctatctcagcctcccaagtaactgggattataggcacgcgccaccatgcccggctaattttttgtgattttagtatagagatggggtttcaccatgttggccaggctggtcttgaatgcctgacctcaagtgatccatcccccgcggcctcccagaatgctgggattacaggcataagctactgtgcctagcctttgtgtggcaagtatttttattcccagtttaccggttaggaagctttggatcattagtaaagttacctgtctaaggtcacagaactaagaagtgacaaagccgagttaaaacccaggccagttgatctcagaaattggccttgaggacagaatgataggggtgaacagatagggcaagctcagtctgggtaggtttcttgaagtcaaaacaaggcattgtgcattttaggcatgattaaatgtgtcacttcagaaaatagtttacaatagaattaattggcaggtaatgtttcttaaggatataggggcaaaatgtggtattttatgattgtctctgggttcaggtaatgatattttgaggagtagagccaaaaatgttggattcaaatcttagttctgccattttttcagttggtaactgtggggaatgtttgtaacttgttctccgtaaaatgggcataatagctatttgaggaataaatgaaaacattagaagacttagcatagtgcttagtacacaggaggcatcacaaaatttagggtgtacaactgaaagtgaatatcttaaggcagaaaacatattcaaaggagcattttgagaatgggggatcagtaagtcctggccattggtcaattttaaggtagctattagatttggaacaccagatttaaagtttttttatttcctaaaaatcaaatactacatgttgtcatttgtaagttggaactaaataatgtatacacgtggacatagagtgtggagtaataaacattggagactgagaaggagatgaaggatgataaattacctcatgsctgtaatatacattatttggatgatggctaataccgaaagcccagactttgccactaagcaatatatccatataacaaaactgcacttgcaccccttaaatttacacaagaaagtcaaaactaggaatatatatacaaataaaattgcataattttatatgtaaacatgtaacctatataaatggatacatcaacataaatgaaaacaaaaatgtcaatattaatacatgtacattgctttaaaaaatattatctcctcatagtttggcgaggttgggcaaatcattcagctgtagttatgataccaaccctattactaatcttatttgcaaaataataagattcctccttgtgaagcataaatgaaagattttcaaagttgttttcacatatgaagtgccatagaatgcagcaacatattgtaatgtaccatgtaatgttgaattgagagttatggtcatgtatgtatgtatgtatgtatgtattttatttatttatttatttttggagtcagagtctcattcttgtcgcccagtctggagtgcagtggtgtgatctctgctcactgcatcctccccctcctggattcaagtgattctcgtgtctcagcctcccaagtagctgggattcacaggtgccaccacacctggctaatttttgtatttttagtagagatgsggttttgccatgttggccaggctggtctcgaactcctgacctcaggtgatctgcccgcctcgcccagccaggtcatgtatttaaagggcttttgtatgcatcagggttttttgttttaacgttaattcagaggccagaattagattcagtgggtggatgaaagttgagagatgggcttctgattaatacaaatcttagtagaataaaaatctaaaaattatattaaaaatagagtaggccattgtgagaaatttcacattgggtaggttttttattttattttggatatcctttgttttcttccagtttttaagaattgaacctatttgaatgtgatgtgtttccttaggtaaagacttattctaagacataattggtcagtaggagagctttcatagtaaaggaaatgttttaaaaattgtaggaacaacagtatttttaagatgctttatgaaaaaccattctccatgttcaagtattattcaaggagattctagataagcaggaatatattgaaagctgtgggaagacttgcagtaamttcttaacccaataatttgcaaattaatttgaccagctattacttgggaaccagtagtggttcatggaatacactcaggaaatgatataatacatttagtgaggaagcttaaacaggaagaccttgttattgtgctgcttagtcaattgttgatagaccaatgaacaagttcccggcgaggcactagggctggcagaagatctagtgaaaccgctactttagtgatagacttcctgaagcattgctgcttgccagctgtatctcatcaaaacagctctgagacaaaggtcattctgtgttacttggtaaaagtctcctgagtaccccagaaagaaaattgttatgtaacaatttttaatgtacattaggaagttatagctgtctcttgtttagcctaagtaagtagacatttttgcaaattttatacagcataaatataaaaccagtagggtaatataatgatatagatggcttcaaaaatctttttatattttaatatactttaaataattttataatagtttggcttcaaaatatattttgctaatctaccttcttataaaagctaatttaaaaaaaaatttgcaataatttcaaagtgagtagatgatgatggtatagaattataagaaacaattggtgatcaaaatctgagtaattatggaacctgtttatagaaaaacttaagttatatttccaggcagatgttctattgaagatctactttactctctattatttaaagtggacatcatgtgcacgttattagtaacatagcagtagttaacagcttacttttgtcttgagtttcatattctcctggtgactttgcatgtagcctgtggtttttatcagacctagacaagaaccaggcaaaagccaaattctagaaaagagattctgattagattaggaagacttagtgctttgggcccctagcacggagggaggaaataagaatgagttaagcaggagagatgaatttaagttagatacatggttttgtgtccggaattggtggattcttggtctcactgacttcaagaatgaagccgcggaccctcatggtgagtgttacagctcttaaggtggcgcgtctggagtttgttccttctgatgttcggatgtgtttggagtttcttccttctggtgggttcatggtctcgctggctcaggagtgaagctgcgcggtgagtgttacagttcttaaggcagcacgtctggagttgttccttcctcccggtgggctcatggtcttgctggcttcaggagtgaagctgcagatcttcgcggtgagtgttatagctcataaaagcagtgtggacccaaagagtgagcagtagcaagatttattgcaaagagtgaaagaacaaagcttccagtgtggaaggggacccgagcgggttgccactgctggctcgggcagcctgcttttattctcttatctggccccacccacatcctgctgattggtagagccgagtggtctgttttgagagggtgctaattggtgcatttacaatccctgagctagacactaaaggttctccatgtccccaccagattagctagatacagagtgttgacacaaaggttctccaaggctccaccagagtagctagagagtgtcgattggtgcattcacaaaccctgagctagacacagggtgcggattggtgtgtttacaaaccttgagctagatacagagtgccgatttacaatccctgagctagacataaaggttctccacgtccccaccagactcaggagcctagctggcttcacccagtggatcctgcaccggggctgcacgtggagctgcctgccggtcccgcgccatgtgctcggactcctcagcccttgggtgatcgatggtactgggtgccctggagcagggggcggcgctcgtcggggaggcttgggctgcacaggagcccacggaggtgggggaaggctcagccatggtgggctgctctcccgaggcctgcgctgcgggaaggcagctaaggcccggcgagaaatcgagtgcagcgccggtggtctggcactgctgggggacccagtacactctccgcagccgctggcccgggtgctgagcccctcattgcctggggccggcagggccggctgctcctccgagtgtggggcccgccaagcccacacccacccggaactccagctggcccgcaagcgccgggtgcagcccccgttcccactcgcgcctctccctccacacctccctgcaagctgagrgagtgggctctggccttggccagcccagaaaggggctcccacattgcagcggtgggctgaagggctcctcaggtgccgccaaagttggaggccaggcagaggaggcgccgagagcgagcgagggctgtgaggactgccacacgctgtcacctttcagtttcaccaacttgcatcttgcaggatcatctctacttgcgtgaaaaaggtagataatctgtgagctctgtgaagagttgggcagggagcttaaaaggaaatgggttgagtgtcagttttctatattacaaggcagctattaaagtaatttagcaacttaaaagtttagaagttccaatatgtgaccgctttgaaaaattactaacaaataatcctagtgtttttgaggctttaaaaaaactttaaacagaagtggccaaatttaaaaaagagatcatttaattgtaaatacagcattgacttctttgttaacaaggctttgctttgtattacattgtttggaaattataaatggccatgttatatattgttttgtatgcaaggtcaaaataagaattaaattagccaaattatgttttactcaatttacattagtaattgccctttatattcttacgtgtattctggaatggttttgacacttctgattctgatatatgtttgttaaaagtaatccagaaagtaccaaaatatacaaagaagaaaaatacaaaatcacttttaatttcattcaccaagggctacctcttttttttttttttggtgtgtattatgccaaaaattttcactttatatttatcaacacttatgtgcagtgttaagtgaaagagttatataagaccttttttttcttcttcttcaagaagataatcatagcttactgcagccttgatctcaaaagattcaaacagtgttcccacctcagcatcccgggtagctgggaccacaggcacatgccaccatacccagctaatttttttagaaagattttttttttgtagagatgaggtctcactatgttgcctaggttcgtctcaaactcctggactcaagcgatcctcctatctaggcctccgaaagtgcttggattataggcatgagccactatgcctggccagatctattatttttttttaaagcagtctttctgccactttgcccttttctgtggctgattattttgawgtttcagtgtctagattatgtgcttttatatgtccctttgttgattcttctcccccacccccaagtgtttgatccctgttgtgttccccttagggaaaatgaagattttgcattctaaccttaccccaccccattcacctaccaaacacatactgttacatacttcctgtcttcccagtgatgatcagcacgcagggtttatygtatcgtgaacatctaaatgttatttacactgagccacgtaaaggaacatttcctttctcacacatttttgcttttcctgaattttaaattcctttttgttgttgttttccttactttcccatgaacttactcaaactccacattccttactaattgtcacaatcttttctcaagctgtctgcatgcatttgtttcatcttgaagaaatgaggcctctggatggttgttcattatgcctggttatacggcttcagccttgggattttcttcagtcttcttagtttcccttttctagatttcatgtcatcttggtttcttgttttggtggaatatttcttcttgactctaaggaaaagtatgagattttaataatttacaatttattttttcaaaatttagatgtctgaaaatgttataccaccctgatatttatttgccagattggtgaatatagagttctgggttgggaattactttccttcagaattttcaagaattatatagtgtattctgtctttcaatactggcaccattcctagttctgatttattccttgatagggtgaccaactggttttgctttctctggatctggggcattctgaagactcaggacttacagctctaaaaccagcatagtcctaggcaaactgggactgttggtcaccgtgtacttgtttgttttctctttcttgattttctattgagtgcttgtcctcttaaatggtcttgatcttactgtttgacattgctttcctttttcgttctgtttctggtagatttctacatcttccaacttttctcttgaaatgctttttttcccccatgtttgccatgttttatttccaagaggtgattttgttttcattttcttgtttatagaatcatgcgtttggtttatggttgcatttcttttttgatgacattaatggtgagttttctttgcctgtgtaatctcaagtatttgtgtgtgtggggggggcggggggggcctgcattttggattggttttgtctttcatgttaggaactttcctcatattctggtaattctggtaattcctggttgtctcctcatactcaagtgtaattcaagaccaaaagtctaatttataagctctgagtacataagggaggtttgaccgagattcattgtttagtgatctggttgggtcattttgttgtaaacttcctcttatcattatttttagatctttttttctttagctggtaaaattccacagagaagattgtttcaaacttctgcctcaaggtgaagccctaagtgcctgagttctgggggccaagtgggagaagaggccacagatggaggcaggataatgtatattgtcagacagtatgtctgtactcgattcccttctctccctcttatttttggtgtagtgaacctatttgtactgtgtactttagtcaggaatttctatattctatacttcctaaagaataaaggtcttgttttttgctggaaccaggagaggaatggttacccagctgtacaagtgtgggagaggatctgaggatctgatgccttgtaaacagcctatcagccaatcttcagttttaatcccaacactgccctagaggtatctggcatcatcagatcctgagcctttttgggtttctctggtgtcagtttgattggtagttaatctcagctttctactttcagctttctggacttcccagtgcatttagccccggcatttctggttttcatctcctaaaattgtattgtaacaatagtgtcttccattcttctcatccttgtagatttatgtctcagattgttttaatgctgtattagtggcatttcatgtggagacagaagtgmgtgcatgtgtgttaagtcttctgtctttacccagaagggagacacttcgctaggcatatgcaaaagtatgatctcgctgtacatgacagtgggcattactttttgagtgcctgttatgtggccaggctctgaaatagacatttgatgtccgttaaatttcatcttcagaatgacagagcaaggtaatagttgtggagaaacaaaagtgcattatttgtctaaacactttgtaatagagtggtttcctttcaaataactataaattacatcattcgtaatggctagatatggatgtaccctaattaagtatagctttgtaatttacaccactctttccttgttaagtcactggttatattctttttagatattgacatatattttgaaactgcacttagaaatacatgaattcccaccagctgtgtaaaagtgccaacatgttcaaatccttattaaataataactgttttcttgcaactttaattaccatactgttttatttaactattccctgttattgggcatctagctcctttctagtttctcctcattataaatactgcttagatgaatacctttggacatttccaatatttgtaattcatattgacaaatcagtgcatgaaatgctgtgcattgactaggaaataaaaatttgctttaaaaattgcatttgggatttagctcattatctgcaaaatctgtsttattattactgagttattttaaaataaaagtctgtgattcctttttataacctcatagattacttttcattttttttaaatttatttttaccaaagtaaccattaatatagttacacgggcataccttggagatgttaatgcactcagttcccagccaccacaagaaaattaaaatcacagtaaagtgagttccatgaatttttttgtttcccagtgcacataaaagttgtacttacactatactgtaatctagtaagcatgcaataaatagcattgtgtctaaaaaaacaatgtacatggcttagttaaaaatattttattgctaaaaattgctaatgatcatctgagccttagcaagtcataatctttttgctggtggatgatcttgcctcagtgttgatagatgttgactgatcagggtggtggttgctgaaggttggtgtgattgtggaagtttcaaaacgataaagtttgcagcgttgattgacttttgcttccacgaaagatttcaatatagcatgcgatgctgtttgatagcattttatctatagtagaacttctttgagaattggagtcaatttttttccaaccctgctgctgctgctttatcactaagtttatgtatattttaaatcctttcttgtcatttcagtgatgtctacagcatctttccatgaataaattccatctcaagacaaaaactacctgccccccccaccttttttttttttttttgaaaaaaagagaggctctcgatctgtcacccaggctggaacgcagtggtgtgatcatagctcactgctcaagtaatcctccttcctcagctttctgagcatctgggactacaggcttgtgtcaccgcacccagctaattttttttttcttcgtaattttttgtagaaactatgttgcccaggctggtctcaaactcctggcctccagcaatcctcctgcctctgcattctgaactgctgggcttacagatgtgagccactacacctggccaggcgtttgtgttttaaagatcatcatagtcatcccctgatatgcctataaatgtaaatgacttgtagcaatttttttgatatctacccttaagatattaatttgtatactgtattcttttaaaatataaaagaggctttatttcttttgttttggagagttttaactagtttttgaaatttggatgaattcttacgtggttttttttcccsctcaaagtctgggtcagtaaccattttctgcaaatggccatatagtaaatattttaggccttgctgaccacatacaatctttgccacatattcttcttcatttattatgactttctggaatgtataaaccattcatagcttgagaggctcaggttgccagtcaaatttgttccacaggctgccgtttgtcaacacctgctctagactaaaaattctaataatgacttacggtctgaattttgggattaatggtggatattcaaccaaaattaaatggaaatacaaatcagttcacatgatgggtggtaaagccaagagaatgcctagcttcaggcttggctggatccagaggtcaaatgaagatagcacttgcaatctcacatcttgtgacctccctcagactctccctttacaataaaagaggataatatctactcatttatatatcaacatttaaggaagtccctgatttccttgggttatatacctgtccttgaatgaatcagtatggtggaggagaaaaaagggtgatgatggtgaggattggtgtttgaccctcttgtgtaatagtagaaatgtgttggagaagacatttccaatggtaccacgtggagaagaggtaggagatagctctccagagaactttaaaaataaataagcagtgcactcagaaaaagggtttctgtacattaaaaataggtgtgtgtacttgatcatctaaagtcacttgaaaatgcatgtgtaagttggaagataacagtaattatttgagtggaataattacttatggaatgaagatcttaaatccacttccctcacctcttcgtccctgcccgatttttatagagtcttatcaaatacattgacattgatgtttgctttgacttcttgtgtaacagaaggaatcttgaagaagctggaaagtttacttatttcattgctagaatactttatcatggtgggggagactatattttgattgtgggactgtgtaataggtctgatgtgtatctcagattaccatatgaaagattaacatgcctttaacayagatcatgtaagaatggaagatagcataaaaacaggacagcgaagatttattattcagttgtctatttctagtttttaattaacataacataactaagagtaaaagccattccagtattggtagtgacctacctttggtgactccttttaagtaggcagacatttctccttgagctcatttctcctgcaaaatgatgagattggaatcattaaataatagtctaatgtaatgagaagtacattttaaaatttataaaatttcaagtagacaaggaaagtaaatcatgtaagcaggaagtaccccaaagcatcttaactattcttacataagagtaagtaaaatatctaaggtcattgtcactcctcaatctgattctcttacaatgttgttttaaaaattcaaagcttgcaactggatacatacagttttaattatatcacatttcgaaagccaaaccttgcaaattgccgctgttttgaaagactgaaaccttgaactttgaataaatcagtttttttttttaattaggaatacatgttcttttttttctttattttcctccctttcttctcccctcccttccttttcttccttttcttttcgcaaggtcttgctctgtcatccaggctggagtgcagtagtgtaatctatggccttggactcctgggcttaagggatcctcccgcgtcagcttcctaagtagctgggactatagacatgcatcaccatgcccagctaatttatttttatttatttattttttgtggagacacagggtcttacagtgttgttgatgctggtctcaaactcctgggctcacccattcctccagcctcagcctcccaaattgctgggatttcaggcatgagccactatatccagcctgtgttttttgtttgtygttttggtttggttttcttgtgaggacaagatctgcgttgcccaggctggtctcagactctcaggactcaaatgatcctcaggccttggcctcccaaagtgctgggattacaggcatgagccaccatgctcagcctgtttttgtttgtttgtttgttttatagatacgtctgtattggagaacagaacaattaggatttttaggcagaccatactaactgccagtttcatctttatccagaggtttaaagattatagtaacaagggcatatatacttataccaatataataaggtcaagaattttgaggaaaagagtacatctacatttatacctaacttcatgacacaaaacctttggggtaagagtatattaatctaaccagtgacattctggttgagtggcatcataaaggtaaatgataaatgtagttttgctgcattacagagcctgggaaaggggggtggggagagagggagggagagagagaaggagggagggagggaaggagkgggggagagagagagagaaagagagaataagagagaattacctacaagggatcaggaaggatctttttagagtaatggaaatgtttgtgtcttaatggtgatgctggttatatgggtaaatacatttgtcaaactctgaaccactcacaataagtatattattatcacatttaagttatagttgaagacagtgtaaaagaaacagtgaagtctgttttaggacatgaatagtgaaagagtaaaataaagtttgattaaaaaatatgtcatcacttcaaatcagcagtgtagcccacagtacattaatttgaataatttatttttaatgtcactaaatagatgcaaaagtgtgtgctactgtctattactgtatcatggtatgtataaagatattttagtattcatgaatgaagtactgtgtaatactaatgacaagaatacagggttttttttaagtgctttgttataagcaaaaacactgttttttggtgtgttttaatataatgtaaatttgcatttttttctctctaaactgtacattcgtaagtctactttaacttagtcacacaaatccaatagaaaagcaagtgtaaaattgaatactttctgaaatactattttaaaataatttatgaatttttaaaatattaaatgtgatgctaattagccaaatgtattaccaagctagctccctagatctattgccatgccctgtctcttaggtgaccagattgtgtgccctgacaaagacagcataggatattaggcatatgattatatcaggtaattctggcagtatgctatgtagaaaatcaacctaaaaataagattgaaatttaagaaactcttaagccaatcatcttttcccaattaaagtttcattctttgattcttttatgtcagcttcacctgtttagataatctttcacgaaagttattttgaaaaaggcccaaaagatatagtttagatgtctaaaaagtaatgcctgtctaaacatagatttttatctttatagcttctgtttcatgtttgcagattcttgaataagttgatttttcacttagcaactctccttttaagtctgctgtaaagaccatcccaagttgaatgaactgaagttttaatttgagtctaaaagatcaagaaaatgtctagaatcctttttactgtttctctcccagttcttttactgctgcttttccacaaaggagtaaagaattgtttttcccctttaaagcaatgaaatcagcaaaattaaaacttcctgaaaagaagtaagtgaccaggaccaattgtataattaattagtctctgaaaaagttaacagctgtttaagatgatgctgagttctcatggaaatatgattggtaactttggagacctttcactgttggaggtctttgtttagattgagtatactgcctagtatgtcatttgtggtaacactgtgagggttgggcaagggtggatgctgtcttggctttcttattgttcataaaatagtaataaactttacttaattgatacaccattttcgagcctattgacctgtaaaggcattagttagcttccagaataacatgtaaactgtgcttaattgagtctcccccctaattatccagtattttataaatcagtcttcctaataaccttcagtccaagtgcatgtacctttctgatgggtggtataactcattttattctctcataccttattgatgagccttatataaactaactgaaatgggacaatataagaacagtgtaacaaagttgataaacttaatgacgtttagtaaattcttgaaataaatggtatatacaaaaaaactcgcctttgttagtggagaagaggagcaggagagaaaagaactttgaaagaggagagataggcaggactttggggatagcttgggtcaaggttgggcccaagtgagaagaccgatcctgaactggagtgccaagtaccattagctttttcattatgaataggctgtggaaataaagctagtaatactgctggagaggttataaaaatattctgtgaagttttgaacatgatgacctgaagaattttataatttttaattagtgataatttctcattataaaattacacttttccattttctgkggataggkttaagaaaatctacgaagaaacgcagtgagtctccacctgctgagctccccagtttgaggcggagcacacgccaaaagaccacgggctcctgtgctagtaccaggtaatttgtttttttttttttatagtgagttcatttttattctgttgctcaatttcaactttcatcaaaatacttaactccataggttgttttttgttttgtttgttttgttttgttttttgacggagtcttgctcttgtcacccaggctggagtgcagtggcgcgatcttggctcactgcaacctgcgcctcccgggttcaggtggttctcctgccttagcctccctagtagctgggattacaggtgcctgccaccccacccagctaatttttttatttttagtagagatgcggtttcaccatgttggccaggctggtctccaactcccaacctcaagtgatccaccctcctcagcctctcacagtgctgggattacaggcgtgagccaccgtgcccgatgatttttaaaaaattatttaaatttttttttacttgagtaaagacatattctaacataactggtattatctttgtgaatttctccgcaatatttatttacatgtttctactaagttctaatcattctatttcttgacgatacttttatcttctacttttcctttgttgttaacgctattttcacaatactrttgacagtagcaggacctttgactgtttacagagttctcgtctgccaaatatacttctaatgagcatctttatgcagatttgggttgtttttaaaaggtagttaaatttcccaatagtgtgattaatgaatcaaaaaggatgcctgttttaatggctgtactgttgcccagttggtttctaaaagtgttagaactagttgctaagtttaatgaatggagggggaaatgtacttaatttttataacacctttcgctcaagaaaaggtgtagttattatgtgtgttctctcccatctccaattctagattctagttgctgtagatctcactttcaaaacaactatctttgatgtgatacagttaatatttcatatacttttattaactgattgagaatcttagcctaaaggtaaaaatctcctgcaacttcctctcggcttttcaggcttggtcggttagtcaggtgccattccgctgctaattattcagtagctatatatgagttctccgtctttgtgtaagtcatgccacttttttcttttttttttttttgagatggagtctcactctgtcgcccaggctggagtgcaatggcacaatctcggctcactgcaaactctgcctcccgggttcacgccattctcctgcctcggcctcccgagtagctgggactayaggcgcccgccaccatgcccagctaattttttttgtatttttagtagagatgggttttcaccatgttaaccgggatggtctcggtctcctgacctcgtgatccacctgcctcggcctcccaaagtgctgggattacaagcgtgagccaccgtgcccggccagtcatgccacttttaatgaggaggacacgttctgagatatgtgtcattaggtgattttgccatgcaaacatcatggagaacacttaaaacaaacctagatagtatagcttactacacatctaggccgtgtggtagcctgttgctcctagccacaaacctgtaaaacacgttaccttacagaatactgtagacagttgtaacaccatggcaagcatttatgcatctaaacatatctaaacatagaaaaggtacagtaaaaatagggtattaataatcttgcaggaccacggtcatatacgtggttcgtccttgacagaaacaacattatgcagcacrygactgtagcttgttccctctagtaaatgcatcaacactagtaatgcaggggggaatgattttagcttacgttttcccactcaggttagcagaaaggtctttccacttcttttggttcttatctctactcttggcggtgttacaatagygacataagtaaacagtacaacttggtgcctataagtcataagaaatatagctttgccaccttaaatcttttcaacctgtttttaaattttttagattgtttaaaatatctggatttagtacacctgtttgcttttgaggttgcatagcaacttttctgaggatttctgaagaaacttcttagttttccagagtttttgtcctattttgggccaaattttgaatcttaattactcaaggtttagtctgagatgcaaactggatttattgtgtctgaaaattaattttaagccatatgcgaagtcaggtaatctagtgttgtaattgtcttgcttgccctgctgttctctgcaaccgtctctccttctactcaacgataattagcacgtgcgaaattacccactgaggcatgatcatgctgtgcgcaggccgtctaatctagccacctgcttgaagtgctcttcatggcaaatcttttctgaattagttgagattctgcttatatacagtgccttggtcacctactaagggtgtccttgtttctctttagagtagcactccttgagggcagcagccctatgtatccaaagtggtcagcccagtgtgttggtggagattagatcttaaatgagtgaatttgaatcccactaatttgtacctttgtaaaatgggttgggaatgagctgtttccttgtgaaggaaagattagttaagcaaatttctgtgtagggaagctttttctgtaatgagaataaactcttccagtgctctcaggtaagccagagccttcctttgtaggtcagttgtgcctgcttctctcactttactgtagtgtgactttagtctaaaacatgtctttagtaacaggtttctgcctttcttgagataatttggggagcttttgtttaaatgctatcaagtttgaataattttgggggaagtatttttgcttctccctggtttgcttactgatttcgctgttgaaggagmaaaaaaggtttattatcaataaaatgtaattttctataggagaaataagtggtcattctttttccataatttattctgtgtctctgtcctagatgaatatctttcccaaatgttatctgtatttattaataatattaaatccataatttaaagaatggagttattcattattaggatagttatttttatatgatttaggtaatctggaacacgggctgggaaatttttttccatctcctcctcctcccttcctcgcattctcaatgttaatctgcagttcttttgtataatttttttgttgttgctgccgcccaagatggagtgcagtggcatgatctcggctcactgcaacctccgcctcccgggttcgagcaattttttgtcttggcctcccaagtagctgggattacaggcgcatgccaccacacctggctaatttttgtatttttagtagagacagggtttcatcatgttggtcaggctggtcttgaactcctgagctcaggtgatccacctgcctcagcctcccaaagtgctggggttacaggcatgagctaccgtacccagccagcattaatatattaatccactatttaccctggaagtgatgctctattttaaacgaattgaattttctctgcagaaagagtcacttttctttttagttggaagtgttttaaaaatcgtttctgtttctgaggatgacaacagctcacagtaacaaaagcttgtattgtaaatgcaatataacttggaagaattttaaatatacaaagtcttggttgttatacatggtgattttgtgcacttacttttatttaaaaagaggacgaagaagaaactggctttgtgctccatgaatttgagctttgtgttgtgtatacattgctcctggttcactggtaatgctgcccatgatgacatttttctgttgtagtcggcgaggctctggcctgggcaaaagaggagcagctgaagctcgtcgacaggagaaaatggcagaccctgaaagcaaccaggaggcagtaaattcttcagctgctcggacagatgaagctccccaaggagctgcaggtagattggtacttcttagctttaaaatgcgtttctgtcttttacagatttgatgggcagagkgagggaagtatgctaggtgttactatcgtataaacttcttgttctgttttgttttactttaccagtttgatattttgattagttggatttggttgccattttaaaattctcatccaaatttgctctaattacattcaaaaggcttttaggaagaagcaaactctgtttaagctttttatatattgactagtgtgtataattgcccattgattgaaagaatttaaattcatagtaaaaatgtaaggatatagtttaaattgcttcacacatatataaattttaatttagaatttttgtaagccctaaaatacaagtattcagtttgaaccttasctgtaagaatagtatttatattgttatgggcttctcatttttattcttgatatattagaagcacaaaattaaggcttttctctcagctttaaataatgtacccattacctgtaccaaaacaaggctaatacttcaactattaattctggctgatggatatcaaaatgtagtttctgttgacatttctcaatgacatgaacaactgataaaaaaatgttaaaatcaatcactataggcttatatgtatgagtcccttaaatcagatgatacacacaggtttagatacaggcatatacttccttttgaataaagatatttcagatactattgtttactattaggatacgttgtcattttctttaatgtctgtggttgatcatatgtcatagtttgccaggaaggttgtggtttacccgctattgatgtcttcttgttttttctagcttaggatttttttcttttaagcactacactttcttagttttatatgataaattatatggtgggagaggagttttttcccatatttgttttcctagaatagttttttgaaggtttaaatggtagatatttggaaagtccatttaattgcaactcattaaaactggttgtgactcacagtctgtcccagtgctgtacgctccttcccagtcttctaatgtttatttgaagcctgaatgtggaaatggggcaattcccaaatgggtaacagaaaaggagctgcaggctattaatgtagactcactacagtaattattataactaatatacagtgtacactacattgcagtccagccatagtattaagcactttacatatattcttatttaatattccaaacaacctgctgaggtatgagtgttattattaccattttttaagtgaggaaaaacggagacaaacattgcttatgcttgctcagggttacaagctgtgatgtgtgacttcccaaagccaggcatatttgtaacagcattgttgtctaatgcagttacaagagtttatataatttatacgaatatataattgaaggctggaatgggaacggggttcaaaattttgttcccctatttatttacctaagaggataaaagcatacaggaatcaggctcatccgactgcctttctaaacagttccaggcattacactgtcatttatgtttcaaattacagtgtggtacaggtgtttcccaagctgtgtattgtagctggtgataaaaaatacatgtggcatgtgcacttgtattagaaaactgacttcattacattttggaggatagatctcttatgaattataggaatttctctgctgactcatgaaagtatttatggggaaataagctaattatttagcagctttacgttaagttcttcatgataatgtgctttagtttctgcatgtgtaaaatgggaatgtagaagaaaatacctaaattagtatggtgtataggtttgtggacttagagctctttttgacaagtaaacgttttcggatagtacttgtatagtcgatataagactccattggaaacatttatttggaaataatgttgttattattttaaaaagcccaaccacattagctcttcatgtaagaaatgctagcctttgaagttgaaagtgtagtgtttgccacgctttcccacgagtcagaggcagactcctgtgcattctttttttttttcttctttgaggaaaagtttctctctgttgcccaggttggagtgctgtgttgcaatctcagctcactgcagcctctgcctcctgggttcaagtgattctcttgcctcagcctcctaagtagttgggactacaagtgcctgacaccacagccggctaatttttgtatttttagtacagaaggggtttcaccatgttggccgggctgctgtccaactcctgacctcaagtgatctgcccaccttggcctcccaaagtgctgggattacaggcgtgagcctctgcacctggtctgctatgcattcgtagatttggacataatcagaactgtacagacctttatagtgttgataaagtcttgcaaatgctagtggtactaaagtaaggaatgaactatttttctttatgcttgtaaaataatgtcagcttcattttgcattgggtagctttatagtttcggaagaaatgatcagggttagatcacataaagaaagtggtccaattttgttaactttgcatcaattggttaaagtataaaaatttgtcactccatgtagaatgtttgcattctgatttagacaacatctctccagtattttcacttgtgtgtattggaaactgtcttacacagtactgtgaagataggctaagactaaacgggaaatatctgttgaaaatctggcattggattttatctactgatagtcacatttttatatttgactctgggaacaaatctggcctatgcctaaggaggtttgaagccttgacgaaagaactgtagctgactgctgttgattaattacattttcgtatctgcatgaccttacagaacagctatctctatactactacttaaattagccagaggcttggctggtttaagtcttctaattttgtaaaacatacaaaactagtagtttttttgttttttttttgttttgttttggtaaaaccaaactaattttgtaaaacatatacaaaaatagtttttatatatgttttacaaaattagataactcataactcatatctaaactcccactttagataacctaaactacttcataaaagggaacaaaagcttaatacttgctatcagaggtatggcaaaagaatccttttcttcacaattagtttccaatttctgtcaaaaccagcaccctaccctctactgataatcagacttctggcagtagctcacacctgtaactccaacattcagaggccgaggcaggtggatcacttgagttcaggagtctgagatcagcctgggcaacatggtgaaaccctgtctctacaaaaaaatacaaaacttagccagacttggtggcatgtacctgtggtaccagctactcaggaggcggaggcaggaggatcgcttgagccctggaggcggaagttgcagtgagctgtaaattgcaccattgcacttcagcttgggcaagagagcaagaccctgtctcaaaaaaataaaaataaaaaagattctgtggctccccaaaggttgggaccctgctataatagaaccttagcatctcttttaattatgttcttctataggttttatgttttgattaattgatgtctttgtggcagtgcagtttgagatattcattatgaaagtcgttagaataaaatatttaagaagtaatgttaggtagaaacctttaatggttgtaggtctggagaacattttaaagtaaaatcaagtagattctctgataaataaacttaaaaacccagcagtactctaacaggttagatttctgtgtgtttgttttttaatgtatgggctccagagtgtgttttaaaaaatacccactatttcatttgttaaaactcggtatttgcttcctacatagatggaatagtcttaagataagtttaagagccatttcagttattattgtacctagtaacagtattcgttaacagcatttctgtataatgtgaagaagcaactgtatttgaattaaaaatcactgctaaagaatatatttgagtcatacagtttctaagggtacaacctgtgaagtcagacttcctgagttcagatctctcagccataactagctatctgaccttggccaagtatgctcaaagtcacaaaaccttagtttccttatgtgcatgatgattataataccttttgtacagttatgaggaaacttagacaatgcctgtgttgtatggtaagcgttttcataaatgctgcctacctgtaagtagcattatagtgtgtagttattggttaatttcctttttctttaccagaagtgtgggttttgcccagcctttatacaacttcagtatttctggttaatctgtctctctatggctctaaacttttcagagtggtgggggagttaccaacacttttgtaaaaggccagatagtaaatgttttatgctttatgtagtctctgttgcaagtactcaattctgtaattatagcgtgaaagcggccacagacttgtaaatgaatgagtacagctatgttctaataaaatttttatttacaaaaccatgtggtggactggatttggcctttgggccatattttgctgaccmtgttttaaaccataagcttttctaagaattttttttttaatcccaataatgaagttacatagaaaatacttaatggtgtgtgaagagaatggtaatatgaaaatacagtcagtggctggtattttggcatctttttcttcagacaagctctttaaactcgcatatgttattcacacatgcctctttaacaattatgacaaaaatattcttcctggcttgcattctgtcacaatctgtgcagtatatagggcttaaggtattgtggaagagcttatgtagatcaatcatctgtgttaaaaaaaaaaaaaaaaacccaaaaaacaaamaaaaaaaacctttgacctcagcagacacatagaggcacaattaactgctagttttgcaggaatatggttttacttcctgttcagatttataatagactctacctccattagcttagactgtttttttgtcattgttggtcaggttagtatttcgattaatagtatcctgagtcttaactcttcatttcacactagttttgacactttagttgccctgtctttcatacttcttgtttttgttttgagacagagtctggccctgccgctcaggctggagtgcagtggcacgatcacggcacactgcagcctctacctcctgggcccaagcagtgctctcgactcaggcatgcccaactcagtagctgggactacaagtctcactatattgcccgggttggtcttgaacccctgagcttaaatgatccttctgccatggtccgcaaagtgttggtattacaggagtgagccaccatgcccaacctccttcatgcttcatagcagtcatctgttagttgtaatatctttttgcactcttgaagttaatgaaaacagataaatgattgtatcaagactgtagtccggaaataaagcagacttagaaggcagacgtctacatacaacatttcccccaaatgtctattttgcctttttattatttttgttactaattggccatctgttaaataatcacaattgttacagcagtatgttctttattgactttcagaagagggattcaggacatcttaattaaagaacagtttcaacggcacaagaaatttgtcaaaagccacatataaatgaaaaacaagcataaaaatacaacctttttaatactaaaatagttgagctctcctttcattcctaaaagctacaggataaagtctagaagaacagctgagtgtacagtagcaagacaagtttaattgcctttattcaattgtagtccgcaaaactttggtttttctaaggtaagccagacataatgtgtttaagtgctcctcctaaccctcatctttcccctccaccccaagcctctagttctgttgcaggggctgttggcatgaccacctctggggagagtgaatcagatgattccgagatgggacgtttgcaaggtaaaaacagttattgagcctataagaaaccattaccatgagctacctgttaataccattctttattgaaattaatttagttaaattcatttgaccataatctagcagtgcctgcacctccaagaaaaaaaaatttttagtagcaatttcatgatttggaattggaagatgagctgtccgcctcttcgtgtttactgtttcactagatgaagccttacatatttatttttgtttaaaatttttaaattgtggttgcatgtgtagctggtttcagtaataaataagttaaaaatcttgaaaaatgggtaccttaatatatttttgtctggtatccagtagcattatgaatgcatttaacccacttaggcctagtgttccattattggaacactaagaatgtgggagttatttatatcctactgctcaaggccatcaccaaggtcggacttttcactcatgcaaaaattcaaaaaattgcaacctgcagcataaatgggttttaataaggcgtttggccatggttttttgtcttcttgatcatgtttcaaaatgaatgtatagtgtatacacaaattgtagggtttttttaatgttacaaatgcttttacaaaagcagcctaatactatgtatggatgggtatgtatttttatctcatttgatttataacagatctcagtgtgaggcttacaataaatgtattatttataaatcattttttattgcttttaaattcctgagggaacatacaagtatctctaggactcggactctcaggaacacatagtttttgtttgtttgattgttttgagaccgaatctcactctgttgcccaggctggagtgcaatggcacgatctcagctcactgcaaactccacctcccgtgttcaaatgattctcctgcttcatcctcctgagtagctagaattacaggtgcctgccactgcacctggctaatttttgtatttttagtagaggcgggctttcatcatgttggccaggctggtcttgagctcctgacctcaggtgatcctcccgtctcggcctcccaaagtgctgggattacaggtgtgagccactatgcctggcctgttttgttttgttttcactttttggaactaataaaaatcatactgttttcatatggttttataggttctgatgaccaatatctgattgggaaataatgtcatacagaaaacagagcaagggtgcttaacatattagctcttcaaaatatcaaaatatttaccttagatttttcttgaaatatttacacattcctgctggcactgatttaatatattagggtggtcttgaaagtttgtagcttctcttaaaagtccagaaagcaaagtaacattgactgaatcagttaagcgagatgaatcagttacttgaaatttttagatacatcagttgcatgaagtcatcttagttgttcactctgcccttcttttttctttagctttgttagaggcaaggggtcttccccctcacctatttggtcctcttggtcctcggatgtcacagcttttccatagaacaattggaagtggagctagtaagtaaaaatgttccttccctgaaatccctcaataattagccaactgctattgttacttgtaacctattgatgtaagtattaagaagtttttcatcaactttaacccatttttaaaaataaggctgtgtacaatcacaccttaaatacagctttcattgctgaattatccagattttgtagcgagattgattctgtttgaacaaaataagaataaagaatctcaaacaattacattgataattatggcacctgatggcatgttttgcatagatttgaatcttgagtttgtcataatgatgtatttgtcaaggtgagaggataaaatattaaacagtttgctagctgaattttttataactttaaatatttggacataaggatgttggttttcatgtgtactttttatatatatatatwttttttgagatggagtcttgctctgtcgtccaggcgggagtgcagtggcgtgatctcagcttactgcaacctctgcctctcgggtccagtcctcccacctcagcctcctgagtagctgggattacaggtgtgtgccatcaagcccggctaatttttgtatttttagtagagatggggtttcactatgttggatggctgatctcgatctcctgacctcaggtgatccgcccaccttggcctcccaaagtgctgggattacaggcatgagccactgtgccyggcctgtttccttgaattggatcaaaatatgatctatacattacaatcaggtaatgtttcttacctgatttttgtttgtttgtttgtttttaagagaaatttgattttatttatcactggggagaagcctggaaaggaaaaaaaaaaaaaacaaatcactgttgcagggggtccctaagggtattgattttaaagtatctgaaacctgtatttaccatcaacctttacacatgaacttaatataaaccgtagactagcactagagtcaaaaacaatgccacacctctttgtgcccatgacccagcttcaacagtgcctacttcatatttaatctttatttctagcctcattctaatccttcttcccatattagtttgaaatgaatcccaggcattatatacagtcatgtgctgcatgatgatgtttcattcaacaacagttcacacacactacattagtcccacaagattataatggagctgaaaaatgctcatcatctagctaatatacagtacagatttttaaaccatacttttatcatttagagccaggggagtccagtctttttgcttccctgggccacattggaagaagaagaattgtcttgggccacacataaaatacggtaaccctaactataataacactaatgatagctgttgagcttaaaaaaaaatcttacaatattttaagaaactttacgaatttttgttgggctgcattcaaagccatcctgggccatgcattgaacaagcttgatttagaatgtattccttctatatactaaagaagaacattaactgtaaccctcagtagtaggtattccagaagaargcattgttgtcataggagatgacagcttcatgcctgtcatcacccctgaagaccttccagtgggacataagatgtggaggtagaacgtaatgataccgatgatcttcatcccgtgcaggcctaggttaatgttcgtgtttgtgtctgagtgttttaaaagacagtttaataaccaaaawaataataataataataattttcaaaataggaaaaagcttatactctatggatataaagaaagaaaatgtttttgtacagctgttcattgtgtttgtgttttaagctagttaatactacaaaatagttaacaaaagtttatgaagtaaaaaagttacaggaaactaaagttaatttcttttttctttttcttttttttttttgagacggagttttgctctgtctcccaggctggagtgcagtggcgcagtctcagctcactgcaacctactcctcccaggttcaagcgattctcctgcttcagcctccccagtagctgggactacagkcacgtgccaccacgtctggctaattttttgtatttttagtagagacagggtttcactgtgttagctaggatgttctcgatctcctgaccttgtgatctgcctgcctcagcctcccaaagtgctaggattacaggcatgagccaccatgcctggccagttaatttctttaagaaagatatttcttaaaaatttagtatacataaatatacagtttacaaaattgatagtaatatatagtctaggctttcacactcactcaccattcactcactcacccagagaaacttccattcctggtaaactccattcatggtaagtgccctatacagacgtaccattttttaatcttttatatcatatttttactctacttcttctatttgtagatatattaacatatacaaatacgcattacaactgcctatagtattcagtaaagtaacatgctgtacaggtttctagcctaggagcaatgggctaaactagacagcctaggtgtgtagtaggctgtaccatcttggtttaggtatactctatgatgtttacatgacaaaataggtcaagaaagcatttctcagaacatatcccatttgttaagtgacacctaattttaatctataaaatttcatcatgtagttcaagattatgctcctcaaaacacacagtcactttatcacacttaaaaaataaaacagtaatttcttaataatagatacccaatagatgtcaaagtttcattatctcaatatcataatttatttcttgcaaactggttgttggatctagagacctcttcagattgagtttcgagcctttatcttcttttcttggtaaagaaagcctattgaaaagtcatagtgtgttcttaggaagtacatagtgtctgtattttaacaagctgttgaaactaagtacctatgtaataggggttacaaaatggtagtattttagaactaataatcacttttcatttatgagaagtaaagaaagtattaataatttagtagaaatatataaaggatatcttcttctcaccttctatttgattgcctaggacaatagttgatacaggaaaaattatttttcactctttactggttaataaaaggagtaatttttatgtcctccaaaggtgccattgttatatttttgttttgctttttaacatgtttgtttttaagtataattgtaagcagtgggttgagatgtgtattaaacatttcagtgattttcactgatacttgaattgtcccagcattggatgatgggatctttttgagtttggcttctgaatcttttggccataaccttagtaatttttgatagcctcttattttctggtatgacaagatgtgccaaactcagttgacttatttttttctccctgctatgatttggctatgtacccacccaaatctcatcttgaattgcaatccccataatccccactgggagggacacagtgggaggtaattgaatcatgggggtgttttcccccatgctgttctcctgatagtgagttctcactagatccgatggttttataagcatttggcatttcccctgttggcactcattcttttttctgctgccctgtgaggaagtgccttccactgatggtaagtttcctgaggcctccccagccatgccaaactgtgagtcaattcaacctgttttctttataaattatccagtcttggatatttcttcatagaagtgtgagaatggactaatacactccccatacctgaaattgttcatttccccatagatccttggtttattttgtatttggagaccacagtctggcatattcatttctactgggttgaccattatttctagacttttaaaagttgatgctgataccaccaattcatatttaggtctacagggtttttatttaacttcattgatgttatgtctcctttctccaatggtgagtgtcctaattcccaataattataatatagtgactcatttgctttatcccacagtacgagatttcaagttgctgctgaaagtattattattaaaaaagttaaaaagtgtttttacagttctttctgttcctgggatattttttactttgtgttaaaattaatgtgttttaaagtcatttgaaatccatctctttgtttatgccaccaagttggattgtttcatttacttcattttgcttctgatttttagggactgctttttaaaatttatgttttgcttttataattatgtaatatttacatagttctaaaagtcaaatctacaaacaacatatatttagaaaaatcttatcttcttttgctttccattttccctgcttcttcctctcacataaataatcttttaaattttatgccttgtccttctgttatttactttaaaaaatccataaatatctatattgtccatgggaatgcctttctcagttaagagtagcaaactttatacactttactttgcttttgacactatattttggtgttcactcttcgtgttcactcttcatagctgccacatgcatgttgcatgttcaactgataggcctttgtaaagctgccacgttactccattgtgtgggtatacatagtttatttatatagtcccctgttggacatttgagttttcagtttttttttctattggcaaggcttcagtgaaatgtagctttcgtattttttcaagcattatcttttggatagatttctagaagcaggtttgctgcttaaatgggtgtaaatgcatacgatgtttttgtaggtgttgcaaactcccccccatttggagttgcaccattttgcgtttccaccagtcatgtgtgaatgacagtagtatggtatcaagctttkgaatttttaccaaaattcattgtttctctaatattaactttttttagttatatgtatcttcgtatatttcttttagtggtaccctagagagtataatgcaaattcattggtttattatagcataccttaaattaatactttatcatatctcaaacagtacaagaaccttacaacagtttattaacactttttacctcctgccctcctttatgtttgttgtatttaatttgttttacctatatatacgtgttataaacttgataggacgttacttagaatatctgttttcttttatgtttgccaacatgcttaacctttgcagtgctcttagtttcttcttgcagtttcttttttctttaaaggattgtttccttctagcctaaagaacttttttttttaacatagtgtcagactattaataatgatttctttctgtgtttgagaaatccttgatgtgtctttattaatttatgaatgaattaatgagatgccatctcgccatgttgcgcaggctagtcgcagacccttggcctcaagtgatcctcccgcttcagtttctaagttgctggggttacaggcatgtgctttatttgcacttattttttkttgttgttgttgttttttttttttgagacagagtctcctctgttgcccaggttggagtgcagtggcgcgatctcagctcactgcaagctccgcctcccgggttcacgccattcttctgcgtcaacctcccgagtagctgggactacaggtgcctgccaccacacctggctaattttttttttatttttggtagagatagggtttcaccgtgttagccaggatggtctcgatttcctgacctcctgatccaccccacctcggcctctcaaaatgctgggactacaggcgtgagccaccatgcctggccaagcctaggaagcagaggttgcagttagccgagatcgggctactgcaatccagcatgggaccctgtctcaaaaaaaatgtaaaaaccacttattttttaatagcttgactatatagggtttaagtgatgtttccttgacccttaatgtgcttgcccttcactgaacttttgaatatgtgagttgatatcttcagttttagaaaattcttggtcattatttcttctagtattgtttctcttatctcatcatcagattttctccttcctttccttttggagagtatcaggatcatacacatttaaactttacactgcatccagcatgtctctctggctctgttttatttttggttttgttttcagaattttttctctttgcctagttggaaaacttcctattgatcagtttttaaattcactagttcttttttctgctgtcttcaatcttttgttaaacccgtcaatgagttcttaatttcagatacgtttttcagttctgaatagttttttgattctctttatagatgccaatcatctgttgaaaatgtgtatattcttaatcaattttgtccatctttgcttgtatttttaatactttataaaacatttgtcttttcattctagaagtattggtctgcttttattgtctttttttcccccacttaattctcagtcccatattcctgcctctttataagtctagtaattgtttggttatgtgacagacgttttgtataaaagaactaaagtggcccaaaatgatattttctgctagtgctagctttcttttttctctaccaaaaataaagggtccagagctgatcactctaactttaatcaggacttgagcttgttttaaccagagttgtaattttggtatgactaatttcacctctggtaattttggtatgactcatttcacctcttgctagtcactgttttctttgttgtggccctcctagaattttgattgacaactttgcaaatctatgtctcctcagatttgaatagttgagcagtctcaaaatgtggcaagtatcttgggagttcagatttgaatagttgagcagtctcaaaatgtggcagattatcttgggagttcaggtaccagctgtgtgtctttgacgcctactctctctgttgagatgttggcttctgagcaccatgagactgcagaagattttcttctatcttatcaaaacttcttactctcccctctatcagttttttgtttgtttgtttgtttgttttgagacggagtctcgctcttgtcgctcatgctggagtgcagcgacgtgaacttggttcactgcaacctctgcctcccgagttcaagtgattcttgtgcttcagcctcccacgtatctgggactgcaggtgcacaccaccgcgcccggctaatttttgtatttttagtagaaacagcgtttcaccatgctggccaggctgttctcaaactcctgacctcaggtgatccgcccatcttggcctcccaaagtgctgggattacaggtgtgagccagggtatctggcccctctatcagttttcacagttccagaactcggtacctgtctgtgggccagttgatttcaacacattagcttcttgtgactccctaaagcactataggcttctgtttccattcctatcagaaattagcaaactactgcccaagggccaaatccacgctcctgcttgtttttatactacctgtgtactcttaagaatgggttttatattttacgtggctgaaaacattttaaaagagaatattttgtgatgtgaaaattaaatgcagatcaaatttcagtgtccataatgttttattggtatacagtcatgttcatttgtttgtattagtcttactttctatggatactttccagctacagtgctagagttgagtagttgcagtagagaccatatgcctgtaaagcccaaaataattgctatctctcccttgaaagagaacgttttcctgccaaaccctgatctgtgataacagttctcaaagtgtgatctgtggactcttggtttctgagagagacccttaaatgagttctataaggtcaaaactaataatagttaccaagatttttccttttctacttcattgatgtttgaactgatggtgcaaaagctgtaatgggtaaaactggtgggatcttaagcatcaaagcagtggcactaaacggtactagcaatcattgtgtttttcmctgccacatactcctaataaatataattcagtttttatctaagatgcccttactgaaccaaagttaatttaattaggtctttactcccaagacatgtctttttaatactctttggaacaaaataaggccaatcttttctatatacagttgactcttgaacaatatgagtttgaactgtgctgggtccacttattcatggattttaaaaataaatacagttagctttctgtatccatgagttctacattagcaaccaaattcagattggaaatacagtgtttgggccaggcgcggtggctcatgtctgtaatcccagcactttgggaggccgaggtgggcagatcacctgaggtcaggagttcactaccagcctggccaacatggtgaaacccatctctactaaaaatacagaaaaattagccacgtgtgttggcttgtgcctgtaatcccagctacttgggaggctgaggcaggagaatcgctggaacccagaaggcagaggttgcagtgagctgagaccgcaccacttgttttggaaaataaggtcttttaaaatcaaaattatttatattaatatataatgagttaactggcaaatatttaaaatttttgtatttcaattaacatattttaaaattatcaataaatataacccacataaacaaaagtgctttgtggtacctcagtagtttttaagagtataaaatgattctaaattcaaaatccactgctctaggagttggtttctcctcataratcagaggataaatcaggttttggttatggttttggctttttgttgtcatcttcagtttagtgtaagttatttttaggaacatcccagatgttttattggtattgatgataattttgattatgctgtataagatccatgtccttaagagttgccaaccccartggttataagacctccatctagttgcatacatgttggttctttcttttagggggttgtgctcttaggccatacttgatatgaactgtttaatccttttaaagtcatgttagaatcagtggaggattcatttgttttcactatttttctatcattttgtttttccttccacattatgtcaacacagaagtgataaacctgctgtcactaaaattggtattatttagtttaaaattgttaaattgtatttccctgaacttttcttctggtgtatttttggatggatttttaattatggtaaaggtaggtaggcagcgatagctatggaatgcagtagccacaatcttaaaccataaaacaacttccattgattgctatgtgcccctgtgagaggtgtacgcccccaggaatatcactgaagctcagttgaaattattaggttcagttttttgagaatttcacattcattgacagtttccagacatatatcccatttctacacatttcagtactcaatgatataggactggaaaagtccaatttgcgaagaataacttgaaaaggtgtaagaagtgaaggagctttaaaagtaacatcatataagattggttaagtgttaatttaattaattgtggtttcaagtaggaaagtgtccatgaaaaatgaaacacattcrtagactttattttttaaaattaattaattaattttgagatgaagtctcagtctgtggcccagtctggagtgcagtgacatgatctcggctcactgcaacctctgcctctcaggttcaagcagttctcctgcctcagcctcctgcgtatctgggactacaggtgcacaccactgcgctcggctaatttttgtrtttttagtggagatgcggtttcgccatgttggccaggttggtctcaaactcctgacctcaagtgatccacttgccttggcctcccaaagtgcttggattacaggcatgagccactgcacccagcctctstagactttattttggagtgtattgtttagcttaatgacaacgtacttctctgtggttgttgagtattcacatttttcaattgttggagtagtggaattaagtcttaaaagtaggaacattctaatagccatcatctgtgcaggaaatgaaagaggatgcaagggtttataattgtgtgtgtgtgtgtgtgtgtgtgtgtgtgtgtgtgtgtgtgtggtttttatttttacagaatattctttccattctcttttttgttagatacgttgttgtgttttttatttccttgccctttcattgttaattggattctatttattctggaacagatatttagaggtgtataacatttcctttgaagtatgggcatcattgtttaacaggtttttattattgtagcaagcctttgctcacaattgatatttccttaaaacagataatgttaaagctatcagttcatactggtcttagggatattattttttgtttttgctgtaaaaccagtcaagttttcaattaagaagacagaagtatataactgtgaaagcatgttaaggcagagtagatccaactaatttaattcttccttcaatgtattagcagtgagccttaaccctggtatagacctagtctttcattaggatgcaaagaagataagcaaccaattacatttcgagtcacaccttatacctagtaataattttcttaaatgtttaaagataataattatttttttctctaaaggttctaaggcccagcagctactacaaggwttgcaagccagtgatgaaagtcaacagcttcaggcagttattgagatgtgtcagttactggtcatgggaaatgaggagacactgggagggtttcctgtcaagagtgttgttccagctttggtaagcataatgtttttccctcgtttttacctcatttgtcctctgaaatctgccgattttgtactgaatgtatgattattgtcattattaatttttaaaacatgatagagttaagagaggagtatatgacttggtgcttgtatttcatgcttacagatactgtgagcaattgctaatgagttagcaaattttctaaatcatttttttgatgaatagtcacccacttcttgatacttaaatgactggttttaagttgttcacctcatcagtaaccttgactcctgccatgtaaaatgcacatgctttttcttttagcctggtgatccacggagcaataggccagggaagctcactctgggttgtgtcggggggccagaaaggtttcatatttagtacgtgtctacatgggaatactactcaagccatatggtatatatgtggatcctttcagtttaaaagcttttatgttggccagtggcaatgtctgacgcctgtaatcccaatactttgggagaccgaggtaggtggatcttctgaggtcaggagttggagaccaggctggccaacatggtgaaaccccatctctactaaaaatacaaaaattagccgggcatggttgcaggtgcctgtagatctcagctactcaggaggctgaggcaggacagtcacttgaacctggaaggcagagaatcgctctaatctcttgcagtgagccaagatcgcgccactgcactccagcctgggcaacaggagcaaaactcttgtctcagaaaaagaaataaaagactttaaaaaatctttttaatgccttttcaacacagttgtgagttgatattttgatatgatagatttattaacagcttgattccttaaacttttaaatatgaaaacaataggaagaaaaattgccattatcaaatgtaggcaccttagcacaatacagcatttaaatagtggattgataattttctttgtccaaaattaaagaaattaggtataatttaagattaaaatttgagtctaaatcaaacactaccaaaagacaaacataaacatttacatttgtggtatgttttattttggaaattacagttaaatgccatgtaaatcttttttgtatatccagtaaagctgacagaaaatgaagttatgatttatacatcatattgtcccayttgatgagattatcaaattatggagatagcttgagttttggtgagagagctgagtaaagaaaagcctgtgaaatacaaggtgacaatccttattctgcttgttcttatttggatggctcagctctggcagagtttgataaaggatagaacaatttcttcacctgccacccagatgcagataataaaagccagttatcaaattttatcatttccattctagtcaaagttgtacatgttgctttctgagtgtttcataatagcaatattattaacctttcaactttcagattttgcctgtgttaatgtccattctcagtttgctgatttgttcaatagctggcttctgtgacctgaatcaaactttcatttgttttattgttattgttgtttgttcactaagaactagcaacaaataactaggcttaccttatactatctacagttaaaatttagtttttattagttaaataaagaagccattaagtctaggcagaaatgttgacacataattcactttacttaatgtgctggttgttaattagatttaagtacctaattgacttgcacaagtatgctctcgctattaataatggctgttattaatgagttcttcagatatatcttttatcacagttgaatattatttatatctcttcatcmcaatacagtcatgtgacataaatagccatttttggtgaaagggtatctgtttatatcagtcattcccaaacacagtataacaaggttatttaataattggggaacttagtactttttcttttaacatgacagcccctttcaaattagactaagtgttttaagtgactgacattaagtgatttgatagttttttttttttttttaagtcctgaaatggagtgtgtgtatgtgttatgctgtttgtgtgtgtgcttttaaacaaaaatagtccttaggacttctggtatgtaggtatactttacccagcacaattcacagctgagaagacattcatattgagtgagtatggtgttagaatatctgatgtttgttgttgtcattataaatttaattgaagggtacttaacaagcttcaattcagtgcatttaaaaatttccattgaaccagaagacagtgaatgactgtcttatccccaaggaggaaatttctttggtgactcagctgcttcgagaggacagagtgtgtatcctcagcagttttgcattccttcattagaaaaacatacctgaaatctgcttaagatcttttccacaagaaaaactaaaatgaaatcagatatttaaacttattcatgcatatatggagtaattatattaatttggctttaattagtgcataattagtttctgatgtgatctatcttatgtttaaattctatattactgtacattttaaagctgagtcaaatggtgcttatctgttttagagaagcttgttcacaagagtttaagttatggtcctgaatctgtgctgacatttgttaacaaatgtcagtgcattgctgatcctgtttatttatgtatctagtatttattagcactagtaagtcctcagggatatattaataggcttctgaaaggggttagagctaccaaaaggataggttgtaagtaacaagaaggctttgtttgtgacctgtatcacgaggtgatggttatctagcagcatactcaagtcggagtcaccgtgtgtgatgaaccatcctgagtgtaatcatttctgtgaacgcctactaggttttatcttaaagttatttttgtgtggtaaaagttaggaataatacttccatttcagttgaagttcaaatagaagaggaagaaatacctctaggattttcccaaggaatatagcttctaatattttgttatctttttaacagattacgttacttcagatggagcacaattttgatattgtaagtatatattgtatttttttaatggtgtatatttaagttttgagtttttactcattaaaatctcttcttttctagatgaaccatgcttgtcgagccttaacatacatgatggaagcacttcctcgatcttctgctgttgtagtagatgctattcctgtctttttagaaaaggtgatcctacttttaccccgtttgttcaaaagcaggcatagggagtcaagtttcaaactcttgaattttagctttcattttctaaataaagtatattttttagcccgagaaatgttttatgtccagcagatcaatagtttgaaggtgaagataaatcattgatagaatcagcctagttttgtaatttttagtaataattagcacattaatataataactttcagagaagaactttaaagtacttgattaaaaataatctaatttctagaaaacatgccagtgaggttgatagctatttataccctcattatgtagctgagaaagttgaatcagtggggaatagaaattttcatatggtttctagtaaattgtgtttttggtctgtcttacggacctttttgtttgtttaacgcacaacaaaatttgctttatctgataaacttgcagtatggtgtaaagttaaaatctgattttaaaattttgttgtgtaaaacaactcatctattttaaatctgaagatttaaaagttatgtaattgggtttggtttattatgtaaaacatatttttcagtatcttagaactgcaaactggttagaaggaaactgttttggctatactttgtagcttaagctgctaagtgacttgcatcctatggtgggttacatgttagagatagtatacatggatgtaaattagagaaaatatgtagaagataagttattgggaaagaacttaaatgataaccttakggtaactatatatatgttcccagctgcaagttattcagtgtattgatgtggcagagcaggccttgactgccttggagatgttgtcacggagacatagtaaagccattctacaggcggtaagtgttgttactgaaggggactacatttcactttatgtagaatttttaaaatycacatttgtacaggctacttgattgcagtttttgtaagatacaaatgttgtttccagagtaatgtgctagactttttatgagttaaattattttttattgctgataaaggatttttctttaccttaacagttttctatattttagggtggtttggcagactgcttgctgtacctagaattcttcagcataaatgcccaaagaaatgcattagcaattgcagctaattgctgccagagtatcacgccagatgaatttcattttgtggcagattcactcccattgctaacccaaaggctaacacatcaggtaaaatatgcatctattttatgtgccataaagtgttttattactaatttttttaattttatattttattttattttatttttttgagatgggagtctcgctctgttacccaggctagagtgcagtggtgtgatctcagctcactgccacctccgcctcctgggttcaagcgattctcctgcctcagcttcccgagtagctgggattacaggcgtgtgccaccacacccagctcatttttgtatttttagtagagatggggttttgctatgttggccaggctggtcttgaactcctgacctcaggtgatccacccacctcagccccccatagtgctgggattacaggcgtgagctaccgcgcccagccacttttttaaatgacaatttcaattagtattttaaatctttaactgcatatataatcgaaaatgttctgatattttttatttttatccagttatgtgccatattaggttattttataaaattttggtagatttattcaaatgaatagtaattcatatgtttgatgactttaacaattttgacttttaagggatggctttgttatttcagcaaacattgagtgtttactctgtgatatgatcagaagttccttctgaaaagattactctttcttgagaggcattggaggaggcagatgggagcaggagaatatgggttaagaccagaagagagactagactatgtcccaaacagaaatgaaaaatgtagtttgtggctatctggggttggagaagagcaaaagtgattatctaggtggcagaatcaatggacctgatgataacagtgtgaaaagcagggtttatgggccggggatggtgaggacaaattgtgagtacagcttcaaggctatggagaaattgaatttttttttagctacagagaaatattttaaagcgttgtttgttattgctaaagatatttctagaaacctggctttaaaattgccattacaaagtgtggctaacccagggaaaataggttcataaaaatatttttaaacaatttaggaatttttttttgttctgttttgtttttgtttttgagactgagtcttactctgttgcccaggctgaagtgcagtggcgtgatctcactgcagcctctgcctccctggttcaagcgattcttctgcctcagcctcctgaatagctgggattacagttgcgtgccaccacgcccagctaatttttgtgtttttagtagagacagggtttcgccatgttggccaggctggtctcaaactcctgcactcaagtgatccacctgtctcagcctcccaaagtgctgggattacaggcctaagccatggcacccgaccaaataagggatttatgtaagataaaatagtagtgatcattgaatcactctagagccttttgcttctaaaatgatcaagacaaagtagtactattcattttttaaaaatctgtttatgtgtttatttttaaaaaacatagttggctgggggcacagtgactcgcacctgtaatcccagcactttgggaggccaaggcaggtggatcacctgaggtcaagagttagagaccagcctgaccaacatgctgaaaccccatctgtactaaaaataaaaaattagccgggtgtggtggtccatcccagctactcaggaggctgaggcaggaggatcgcttgatctcgggaggcagaggtttgcagtgagctgagatcgtgccattgcactccagcctgggtaacaagagcgaaactctgtctcaaaaataataataataaataaataaaaacatagttgagataatcttttctgtagtctaaaagcgtgttctctgttatgtgataatcagttccatatgatattctttagaaataagataaaagaattagagaacttaaatagtcacaatttgtagcactctttcttgatttatgtagtgtcagtgaaggtttaggctataggcttttataatatctgaattattctcatttttgtagaaacaagtctaatttttacatatgaaaattccactttcaagttaggaaaaatcaagatctatcaaaacattagccagtaaaacattctttcccttctttttatgacacttatttcaaatgttttgtcagtgatgccactctgtttttatgacaaatatggcaaattgttttcatagtgtaactttttcatagtgaattatttgtttttatagtgaatattgcaagtctatgccctatttttaacattgtcaagaaacctctggttctcgcaactttcctttttctaactttttagtgtgyacccacttaaacatttctacttgtaatggttttaaaggaaagtaggatatttatatatttctttagtataacatttgtttaggtattgagattgtgtaagcataatagttcttccttttctgtgtatttgcttttatctagtaggggcctttatacaagagagaggttggtttgtttcctgtttgttttgaaattgtgatgttactgactgtaccttgcttaggcccatttgcattttcaaagctgtcatttactaattgagcttgccttgaagaatctggggttaggaggaagataaagtagtgatacatgacagtgaaaatgctttatgctaataaattttattttcctttattaaaaaaataggataaaaagtcagtagaaagcacttgcctttgttttgcacgcctagtggacaacttccagcatgaggaggtaagtgtttagtctttggtagtatttttatgaggttgttgaattgctgaatcttgatgtaataattcctttattcttgtgtttgtgaagaatttactccagcaggttgcttccaaagatctgcttacaaatgttcaacagctgttggtagtgactccacccattttaagttctgggatgtttataatggtggttcgcatgttttctctgatgtgttccaactgtccaactttagctgttcaacttatgaaacaaagtaagtgcaaatttactgttctactttaagcaggaaaagttggttcttcattaatatgtaaagtcaacataagccgagcaaatggaagagattactaatattataggcattggatagtaaagaaaagtgttaatatgtaataaatttgtgttgggacagtatgttaatgtttctaacatactccttttaaagtataaattaaatgtttgcccttggtgtttctggggctaacaatacaaagtcattaatatctatgccatgttagtcatgtaaccatccttgattaggagaattctgagttttatgttaaccaataaccagctgtcttcagcttatataggttgctttttctgcccatgttagattttctagcaatttttctgattccagaatgctgtcttccctcaaaaagtaggaatgtatttatactgatgaatgtctctgatgtttgctaatttggtatttctaaaccttttcaaatttagacctttcaaattaaacctttcaaatttagaaaggtatttctaaacctttacacagtgtgtgggaaataaaattttattgcaatgctcttgcagttgaccattcctctctcaatccttagacttaagttgatgtcagagaatggtggggcatcagacaacatctatacgttataatttttttcttctttttaactttttgcagagacaaggtctcactgtattgcctaggctgttcttgaagtcctggcctcaggccttcctcccgccttggcctcccatagtactaggattataggcatgagccatcacacctggctgttatgattagttctagtagagtattgatcacttttgtatagaatacctttaattgtttgtaatttcatagccataattctaatctctatggatgttaccttgggagtcagtgatgatattaactgataaaatggtctttggtcccactctgtctgagtggtctcgtactgtctgagacagtatatttagcagtatagtattttcattttaggggaactcagttttatatttagttgcttttcttgtgaattaacacattggcacagaactttgtagaaaaataatgttgaggtggctacttggaaagattctccgtaaagcattgagtcttttccaaacttggtattccagacaaccctattttgagtggtcctgaagaaagtgctctttccctaaataagattgggaaaggttcaactctttcttgagtatccgcaattcattttacttactaaagtctctaggagttctttgaaccttgcttatcccaacatttcctgaatcatgtaagagagattatttcttgttaatgtatgttttgttacagcacatccctaaatactagtttgggaaattgctgcctgccttttgttttaacattttttttcttwtagtatatgttcacctcttttgcatgctccaggcagtttaccacatgtttatcatatggaggtcaccatagttgtttactgtaataaccctataaaaggaaatgtaggcctcttctatctgtctctattttgttgtcatcccttgacttctaaaaaaaataaaatccttataatgcagcataccatgtattcaracttctctataaagttgcaaaactgtaattaaaaaaaaaatcttaatcactaattgtgaaattctgtgtggcaggcagttcactatccacatctctgcccaaatcattaatgaatatttttcttgataacagaacttactgattattggcaaaacattctaataaaatgtttatgtatattttgcatatgtataatatttacaggaacacacacacaatcagcaaagacccagctgtgtctttaggtttcagctttccttaggtttagactgactaaacggtagagactgagagttccctccactcacagtgtcagcacatctgcgtggttatcacgcagagtcctccagaaaatgatgtcttctgggaatggaaacttacagtagagaatgcctgcctgatccttgtatcaagtttgcatgtaatcagtgttgcttaggtagtgattttcctgatcacaatacaataagattcagttacatttaattgttaacgttttatactatgggccacatattttcagtatatttgaattgaagacaagtacataaatatatttgatttgtggtatgttgaatgcatttttgtgcaaagtacgatgcttctcaaggaaagaaataaagggttcctgaagtctcaggggtgagaaggaattgtgattaggcacccagctaggtttggactaaagaaygaagtctccagaaagagattgttaaaatctacacaaattttttttaggcctttattacagcacttttgcattttttacattaatttctgcaytatgttgctttgtaagaaaatgattctgattattttccccccttgggcaatgtttgcctttgaatgaggtagtataactagtttaatagccttttgttttttgttgttggtttttacagacattgcagaaacgcttcactttctcctgtgtggtgcctccaatggaagttgtcaggaacagattgatcttgttccacgaagccctcaagagttgtatgaactgacatctctgatttggtaaagattgggctaaatatcactttgggaggccaaggcgggtgaatcacgaggtcaggagttcgagaccagcctggccaacatgatgaaaacccgtctctactaaaaatacaaaaaattacctgggcgtagtggcgggcgcctgtaatcccagctgcttgggaggccaagacaggagaaattgcttgaacctgggaggcggaggttgcagtgagctgagatcgtgccactgccatccagcctgggcgacagagtgagactctgtctccaaaaaaaaaattggtctaaatacaacttttggtttgtgtgagattatttttctttagagacctaacgtttactaatatttcataaagttactaaaattattgtactttttgttttcagtgaacttatgccatgtttaccaaaagaaggcatttttgcagttgataccatgttgaagaagggaaatgcacagaacacagatggtgcgatatggcagtggcgtgatgatcggggcctctggcatccatataacaggattgacagccggatcattgaggtagtagtttcatcgtaccgtttaaatgtgtctattttgttggagagtgggtgtagggatggaatggggaggtggatatgtggatttgaatgtgcttgattttgaattaactcaagattctctcattttgtctcctgagaacaaggtcctcatttctgttcaggtcagaaaacttcatgttctagtcctgcttctgctgctaactacctgattgacttggagcaagtaatttaagtttgttgttccatagtttcctcatttctgaaaggaaacattggaagacttaggccgtaggtttctaaaatttatctatcttctatcagaaagcaatgtcccatgagcaaagatttacatacaaatagtttcctctcaatatttttccagagcagaaacgtggaaacaaatgaaatagccagttctgggtaaatagttaagtaaattgtgatacacgtaggcttgtatgttatccagatattattgggacaaattttaatgatataaaatcaaatatgaatgaaaaacactatacaatattaagtgaatctttttggaattcagcaaaataagtgaacatatgaataatacaaaggggaggaatgtaccaaaatgttgacagtgattttctgtgacagttttatgtgatttttatttttacttccttatatattgtttgcactgaaatatttttaaaactaaatgagcataatatttgctctagcttaggaggtgttgatcactgtgttatttgtgatgccatgcataatttactattttcaatacatgagacacctgtaagaatttatctattttctaatttcaatctttgatgtttgaattctttttagaacatcacacattttgaatagacagtcttctttaaaggtgccttctagttcgtttctaaaaatgaattttagaaaaaattttaaaccaatgacttacctcataaaatcaagagttttaaaaataaatccagtttcagagcaagcttttatgagaaaattgactttgactggtcttctgtgcagcattatatataagcagtgtataagcaggccaatcctgctaatagtggtcctggkctctaactctaagtcgtcttctttttagcattttcctgatcattgcaccttcactattagcttactctctcatatgtgctgagagtcttgtcttccattcagcctaggagttccatagattggattctgtaatgagaatattttgtcacttctgtagtctgtttaaagtcaaactgkgctaattgaactgtgtcaatttaaatatgttctgtataccacacacaaccttggcgattaatctgtttcagttgtgtccctttcagtcttaaagttatctttgtttaatgaggacaattttataggatcattttgtttaagggaggattttggtaggtcgctaagaattcatcatgtaaataatatttttaatctaagaatactaagatatatggataactgattttttataagcaatgtcttaaaagcattctcaatacaaatggtgtcttctttgtgtcagtgatgctacacaggtggatctttcatcaagattttacctgcatttatgtctaagggtccctgataaggcttgaggcatgtaacctatgtctaattaaaaatgatttgttgaatgaatgagttttgtcatatctacactattattccatcttctgttaacttcaccatctaaaacctgttgaaataaatatgtaagatagcatatttggagggtccccactgtgtcttaaggtaatagatttctcaatgtttatattcaaagtttctctctctttgctctcaggcagcccatcaggtcggtgaggatgagataagcttgtccactctgggacgagtttatactattgattttaattctatgcagcaaatcaatgaggacacgggaacagcacgtgccattcagagaaaacctaacccgttagccaatagtaacactagtaagtacattctgagttaaaatagcactatactattgtgcaatattttgtgtttgcataataaataataattggcttattaagtatctttttaagcttaagacaattgcataacaataatttggttttcgattttttaaatcatgtccattaatggatgagtgagccagtattaactggtatcttttccacaatttgtctgcttacctgatgtcctgagattcgagtcagaatttgctcatacagatttttatctgatcctgtcattactattatacctttagatccattgactagttctttccaaccttgtattttataccttcctgccaaaattatctgaactaattaaggacagataattgtgattaaaaaaacaaaacaaaacaaaaccaggtttctgacatttatctgtcccctcagggatttagttcattgctttttcagccctagtttagagaacagtggtctgcaaatatttttgttgttgttgttgttgttgttgttgttgttgttgttttgaaaagggccaggtagtgctgggcatggtgtctcacgcctgtaatcccagcactttgggaggctgaggcaggcagatcacgaggtcaggagatggagaccatcctggctaacacggtgaaaccctatctctactaaaaatacaaaaaactagccgagcgtggtggtgggcgcctgtagtcccagctactcaggaggctgaggcagaggaatggcgtgaacccgggaagcggagcttgcagtgagctgagatcctgccaccacactccagcctgggtgacagagtgagactctgtctgaataaataaataaattaattaaataaaataaagggccagatagtaaataatataagtgttgcaggttatatatagtctatactcaccaccattgccattgtagccctcaattagccatatacaatatgtgaacaaatgtacatggctgcgttctaataaaattatatttacaaaaaccggtggtggactggattcggcttacagaccgtactttgtcaaccccttgtatataacttactgcttatcagttatcttttccttacactttatgtcactaagcaaagtggtagaattaccttctttatccattttacaaagcttttagtgaaatatsgtgcatttctagaactcagtttcttaccactggtttggttggttaggattggatttccctattgtttcattgartgtatatcagtaaaataaagaggtacagtgcggtgatgaattgttactttcagctggccccaatgggtcactagttttctagacagctgaattttgtctgtcttaatgttgcctttagcatctttgtaaatcctagttgatcatatcatagaagttcatgtgttctataatgaaaaagttttcatagcatttcaagaattacactggcttgagtattttatattgtttattgtgtttctgaagtctgtcmcttcaggattgcayatatatttttttttaatgtaataggtggatattcagagtcaaagaaggatgatgctcgagcacagcttatgaaagaggatccggaactggctaagtcttttattaagacrttatttggtgttctttatgaagtgtatagttcctcagcaggacctgcggtcagacataagtgccttagagcaattcttaggataatttattttgcggatgctgaacttctgaaggatgttctgaaaaatcatgctgtttcaaggtgtgttaatgaaaatagtagaaacattttacaaatacaaatctctgcaagtaatttcagaaacctctaaagtaataatagaaaaaatatgcacaaaaatttgttaggagtatcttgagctcttttttgtctatttatattcacataatagcttttataaaatataaaacttgagcatttaagaaaaatgtttatgttaatagaatggtttcacaatgaaaatgctttgctctcaatttaaagtagtatggccaaaaataatcatcaaattcaggcagagttttatatacaaatgctttctttttttagtcacattgcttccatgctgtcaagccaagacctgaagatagtagtgggagcacttcagatggcagaaattttaatgcagaagttacctgatatttttagtgtttacttcagaagagaaggtaatgtcatataaattaatagtcatttagtctagatagtacttcaacagaaataaagttttaatctgtcgagcaaaaactgatagcttttcaatttaaaaatgacatttaaagctctgttagcttatagctctgtgtacgtagaatrtgtcttttaggctgggcgtggtggctcacgcctgtaaccccagcactttgggaggccaaggcaggtggatcacttgaggtcaggagttggagaccagcctggccaacatggtgaaacccagtctttaagaaaaatacaaaaattagcggggtgtggtggtgcacacctgggctgatgtcaaactccttgcctcaagcaatcctactgcctcagcgtgggattacagtttgtcttttaataagagtctgatagaatgatagaagccgtggactcttccccagaaaaatgtgaacgtgtgctcattcactcacgttaaatatatccacatatttgcatatagtttatactasctgataatcagacatgcatattggtatacaatttgatagttcttagtcacactccttcatacatactctcctatgattccgggacagataggaacccctgcctcacaagttaatgtttagctctctttacacaccttaaaggatgtgatagttcccacccttcaatagctggttttttttttggtggcagtgttaatgtgatcttgtctttttgtagcrcttgaagttaactgattcttggtcttttccrtcccttctggctgtcacaccacagggtgtgcactgtatttctgtagttgattattgtttttataatgagtattttgaactctgaataggactttgtgacyctattaagttttatataatctggttttgaagattagaagacattcaatatcagtatttttctttaacctttagtttttatatttttttctgattgaagtcaagttgaaaactctggctcctaatttcttttacctatttgccagttatgttttagtctttttgtgtattatgtcagtgttggtatttagggattttgtaatggtggggagaaggttctactcctgattaaaactgacyccctttcatctctgttattataaaggtgtaatgcatcaagtaaaacacttagcagaatcagagtctttgttgacaagtccaccaaaggcatgtacgaatggatcgggatccatgggatccacaacttcagtcagcagtgggacagccacagctgccactcatgctgcagctgacttgggatcacccagcttgcagcacagcagggatgattctttagatctcagccctcaagggtaagtaagaattgtgttgtgatttttatttctttgctgttagcgctgctttggtacctaagaatcatayagggagtaaaatggtaacatattagcatatatatattatatttttccttttgtattttgttaatgagaatgggaagaaaacatttattggaaacctactgtattgggctgtgtttaggaactgtaagagattagttttattcccactgacatacaaggaaactaaagttcagagacatttgtgacttgcacggtgttacacacttatgttacttgtaggctctaacattgtgggatttgaattctggtttctgatttcataatcttgtgactattttttgtgctgctgcatacatacgacctcagagacatccagatattaatacagttaaaaatactgaaaattagaagtcttagaataaaggccaaaaaatactgattccccatttatctttaattggcaactgggagttaaatactttgcttttaataagggaaaatgagagttcttaaattctctactcccatttatttatcagcttttaatctttgttataccatgctactaagaatgtttccaaaacttccattggtttccattttgttgtgttagaaacaaatcacactctaaaagtgtttttatttccttgctattagaagcttaatattactagatgagtggtacctgatgaaccaaattcagttctgaaattcagtatgtattcacttcagtactctttctggctccttttaaactgaaaagtagatcatgctaaaatatagtaataataagtggggtccaaaaatttaatcttataatctgcagggtagcattgtcttgtgcaggcagccaactcaggtaggagaggggatgaggggaatttggtgccacctggtggcagttttctagtccagcttaaatatgaattttggcagtttcaagacttctggcagactgaacttctggcacagtgggtattattttaggaaactgctgagtttaactggcacccatgttgtttgaccagtctgaggagattgggcttggagagttctggggactcttccacatccctgattctgcagttgcttttgtctgccattttcctttccagccttgctctctcctttacttccttcccagccccattcctacccactagctgctgcagtaacataagttattgcagggttttactgtaatgtaggcatggtgcctgagacatcatagatactcagtaaattacagagagtgatacagttcagacaattgcagtatttctttccctttaaaaatgttttcctttctcccttttttctttttctttttttcaaaaagagacacagcatggggtcttgctctgtttctcaggctaacctcgaactcccgggctcaagtgaccctccctaccttggcctccgaagtagctgggactacaggcatgtgctagcatgcccagctcaaatgcagtatttctgagccattttaatttaaggagttggaattgattatagagtctaacagttgattatgccaaagaaagagaaaataacttttttcttaaaatatttttacatggttttaaatagttttaagtggttccatattacagcatggttgcaaatgaaaaattcatgttaattttttttaaatgraaattgtttaattacatttttcatcctttgaaagttcatttttcctgattgtcaagcacatttgagcacattattaagtatattccatagaaatgtcaggtgttggaaaytttccaattttttttcagatttttccagttttatttgggccacagaccaactaaaccacaacatttttcagccttttcatcttatttagttttgttattctaaaaatttattgctgttacaaactatttctactgtcgttagaacaggctacaggtgtttaattttgcaaatgattctaattcagaataaattactcatactactcactagatttgtatataggtttaaaaaaaccaactaaaatgttcataaatgcatttatttagtatgttattgccattgtcacactatgaaattactttgggtagtatgttagaggcagatgagtattttgacaacatgaacactaagggtcatgtatattttactcacggccattttggttatggaaaaagtgtgttatgtggatttaacattctttttcaggttggtgattacccgtttatttttattttgctcctttgtgttgcatatttgctttatgtacttatatactactatttaaagtggaacacatagaaaattgatcagtcatcttatctggctttatgtttcatagttcagtatagttaaacagctagttattttctgaataatcatttgctgtgtctgcacacctctagaacatgactggcacagaattggcattaaataatcactaaacaagaacataccttgttatgacagtattttttttttttttgagatggagtctcactatctcccaggctggagtgcagtggcgctatctcggctcactgcaagctccgcctcccgggttcacgccattctcctgcctcagcctcctcagtagctgagactacaggcgcccgccaccacgcccggctaatttttgtatttttagtagagatggggtttcaccatgttagccaggatggtcttgatctcctgacctcgtgatctgcccgcctcggcctcccaaagtgctgggattacaggcgtgagccaccgcgcccggcctgacagtattttattactccctgtttctgccattttagtttgctttttcagtgagtgaagatataaaacagtggtaattgctaaacttatctcatattttcccatggacagtcgattaagtgatgttctaaagagaaaacgactgccaaaacgagggccaagaaggccaaagtactcacctccaagagatgatgacaaagtagacaatcaaggtaacccctttgatgaaactatggggaggtaaaggggagggtggtagcaggtgcagaaatgtactttattaaaactgccagtagctcttgaagtatgcctaagtttcctgaggactaagtgttcttagttctttcagttaattaatctgttaagactgtgaatcttaaaaatcagttgtttttcatcacttaaactaaaatgacttaactgtagttcttttttcttttcatagctaaaagccccaccactactcagtcacctaaatcttctttcctggcaagcttgaatccaaaaacatggggaaggttaagtacacagtccaacagcaacaacattgagccagcacggactgcgggaggtagtggccttgccagggctgcctcaaaggataccatctccaataataggtgaagtggggggarttttatgtttcttcyattcccatatcagaaaaacttaaacattatttcagccagtacgtttattgtgtggagacgatacatagacacagcactttaatttgttcttaaaagcatagttcaagaattaggtagkttctcagtttatgaaccctgcatctggctttgtcctaagttccagtcatgtgctttgaaactccttccagcatacctagctgaaagtcttatacgttcaaaaccacattgtattccttggggaacctcttcctcagttttgttccagacaaggaaaagctgacattttctgtccacattcttcacatcttttatgataaaatttctctacccattacaatggaacttcaggattttaggggagagcctttttttttttttttaagtccttgggacttgttttatttttgggttctgcatgtagcataccaacatgattacttccctctgcagataagaaattttaaaagaccaaatgtcattgagaaaataaacatgctctctttggttttgttggttgtttttcttaatttcagtgtataaaaataattaagtgaatggatttctgaagccatcagcatttgtaatttaagcagccgggtcttatttgccatagcttattacatccttaataggcgcatgtttctggtctgtaaatctttacttcagctctccaggaaacacaagttaaggataatgcagatatgtatgtactttaggaagtaaagggaacacttaggaaagtgttatattgcagggttccaaaaaattaytacactttgtttacaattcatgtaatgacctgcagtgtattttaagtttttaaacagttctccaggtggtacatcgtagcccattttcaaagtgaaagttaatttggttatggaatctggagtttttaaactgtaagcatagaccaggatgaattttaaatgtagcagctatttgccttgatcagaagttatatcctttctacatacactgggactttaatatctcctttttgtttcttgtagagaaaaaattaaaggttggattaaggagcaggcacataaatttgtagaacgttatttcagttctgagaatatggatggaagcaaccctgcattgaatgtccttcagagactttgtgctgcaaccgaacaactcaacctccaggtgctgtgtccagtgcattttgctggtctttttcagtctcttcccagcatctcctgctactcttttccttcatgactctctagcttcctatggatttagctatcctacatcgacttttaccttatatacacccttggtgctggcatttcttttacttatcccttgactatcaggattcatcagtctgtattaaatgtactagaaacctcatctttgactttctttccttcacatctcatcattcttgacaaatgaagaaacttcagaaatgtcctcacaagcacatctgttttctaagtcatcctcaactataggtatagatgataggccttccttagcccctctcttcacatggggtctcagagtggcaggagaggctagaggtttactaataagtgttttacgtttcatctggttctcagtttttgttcttatttttatttttatttatttatttattttgatgtttttgatgtaccttgagcagttttggtagtatgttttccaagaaattgttcattttgctgagaccttaaatgtattaatttaaagccacaccttgtattcttgattcatctttccattctggtgttatagccccttattcttcagttttctgttctcatcttttaaaatactcttttttaaagaaaactacattggttgaatatgaagattttcttcttatgttattatggattcctggttttcctcatgaaatatttagtgtgtgtgtgtgtgtgtttaaaatcataatttccaaggatttactaagactgtaccactcccctgccctstttttyaagggcgttgagaatatattcatttccttttgaggatatgtgagttgtgtattttttaagtgctgcttaaatcaatatagaaatacttttcctaactctttcaggtggatggtggagctgagtgccttgtagaaatccgtagcatagtctcagagtcagatgtttcatcatttgaaatccaacatagtggatttgtgaagcagctgttgctttatttgacatctaaaagtgaaaaggatgctgtgagcagagagatcagattaaagcgatttcttcatgtatttttttcttctccagtaagttatctaataatgcctgtgtatcttttaagaatcagtgctcactaatgcatatattttcatctcagtaataatttccagcaggtcttggtcaagacattgagggaaaacttctaggttttcacatagttggaatccttcaacttctgtatatcaaagtaaatagtaaaacaatgaaatggggatttaacaaagcccatgtcactatttctatgattgaagtatcttgagtcttttttgcttgcaggatgagccattaatagtagtctctcacctgtgaatgtattttacttgcaatatttgtttttaaatgtattgaagtttgtattagttccttttagtgaaacagacatctataataagatagaggagttatattttcttgttttgtacataaaatacagttgtaacagttccaatcaagggcgcttaatgaccatttatgtcaccgtttataatgtggattacaaagccacagagtggctccccttccttcactcttaagtgggccagagcaagagggtaatccttggatgctgttgacagcattctccttgttttacagtggcttaaagagaaggcatcacttggaaacgttccctattatctgtgtaatagggcttagcatagctctcctatgtattaacactatttcaccatgcgcttgcagtcctcagaggcatttgagcattgcttgtattttaacttgtgagtcaacctaaagcaaagttagtatttattggagattcattagaagcgtgacagtattatgtatagttttacagcatacttaagattatgtgcaatctcttttctgaaacccctggagtttggtcggtttcaaaggtcctacagtgtgtagtacattaaaattcccagcagtttctgaatagcactgtatattatatgcattaaatatttttatagcataacatgaatattcttactaaaatcagataaataaagactgtaaatagccttatgtctgtttggatcagattttgccaccaagtgacttgtgttttcagagcctttggatgtagagattgtgaatacaggattgtgggctgtacaaaacagttgtctttattgaaataattgacgtggtaacatcgttcaaaccaaatctgccataaaagataaagatgaatagacaaattattctyttttataaagctgcttattaaatcttctctttgargagacttttgttttgaaaaggctttgtttaacctgtttgtttatttataactttagcttcctggagaagagcccattggaagagtggaaccagtgggtaatgcacctttgttggcattagttcacaagatgaacaactgcctcagccagatggaacaatttccagtcaaagtacatgatttccctagtggaaatgggacaggaggcaggtaaggaccattgcctggctatacccttgccactggaatttggtacttaatttcactgaagtaagatggcaagaggtctggtaaagtcttgattggcccagaaaacattcagctgtaatgatgaaagaaattaagcactctaaagaatgaatcaaatgctttcttatctttaaaattataccatatgccttaaacaggatgctttataaatatataatccagtgattgtatttgtaacttgtaataggcttagttttccttaaattgatacacttcagcatacaaaacttccttaagaactttatgtttaacttcagtagggataaaaaattttttgtggctgtgagtaatgtttacattttgagcgatatgatttatatgtaatattagtggctataactttgtattttgatggggtcaaatgtttgaagttttactagtttaataaatatatatatttttaatgtagttttaaggactcttgaggtgctacaggaaagaattgttctatgttgtggaatgttacaagtttcatggaatattttgaccggaggcctagaaaataggaaatttgtttggtttttatttatttatttatttatttatttattttgggacagagtcttactttgttgcccaagccaaattacactagtgtgaacatggctcactgcagccttgacctcctggctgaagagatctttctgcctcagcctgccacgtagctggggccacaggcatgtgccaccatgttccattaatttttttattttttgtagagacggggtctcactttgttgcccaggctggtctcaaactcttgggcccaagtgatcctcctgccttggcctcccaaagtgctgggatttctgagccaccacactcagcctagtttggtttttaaatccacattttgacgttttaaaaacatttaaaaaactttgtttgaattaaaaaccatatgcatttttgagtgataaagcaatcacatcatggactagggtttcttttctgctttgaaatttaatgtagtgtgtggtattcagttttgatcgttatgatttcctggaggagttcatgaaataagggggcattttgacctgtgcttgagaaaatcatgaagctttttgtgtccaaatttatataaaatatgtttgcatatgtatatattcataaaatggaatattctccacatccctatttgtgtgctttatgtgcaggagggtccaatcttttggcttccctgggctatattggaagatgaattgtcttgggccacataaaatacaccaacactaatgttagttgatgagcttaaaaaaaaaaaacactcattgtattttaagaaagtttacgaatttatgttggcctatatacaaagccatctgggctgcatgtggcctgtgggccgcaggttggacaagcttgctttgtggaatcatacagataatcacagtttaagtttstatctgactcctgccagagcttttctgaaatgagcaattaaacatcatgaccaggtttcaactgcagtagctattaaaccgcttcgttcaaaactattatagcaaggtaaattttaaaggttagtttttaatgtaatattgtagctgaaatctttgaaataaagagttttttttttctttttaaaaaatataattcaataggaatgggcaaaatattgcagaagtgagtgtgcttaaatagttcaggaatttttgttccagaaaaataattaaatattcatgggtgaagtatttctgctcccatggatttatgatgggacagagatcaaatattgacttaaggttttcatatgcatgcatacacatccgtcttttatttcttacgtataaaaattttttctaaataacttgaattattggctttaccattcacagaactggtaagtaaatgcttagtactagtgtgtcttatgaaaatgcagtttgtattaacttgcctttatttgaattaatgtatattaaatgtgaaaataatagactaacttttttttcacaaattatcttgagcttttctctcaacagaggatcacaggctttaaaatttttcaacacacatcaattaaaatgccagttacaaaggcatccagactgtgcaaatgtgaagcagtggaagggtggacctgtcaagattgaccctctggctttggtacaagccatcgagagataccttgtagttagaggtactttccatatatttgtttcgtgtgttatatatgtatatttgggagaaatttacattaagagttacatacattatttctctgtttaatgttgtttctgttaaaaaatagatggcaggaacttatattcctgtcttttattttctacttagtatatagtcatacattgaacttactaggggttgactgcttmcttgaatgttgagttaatttatcttggtgaaatgtagtagaaatgacattttgtgtttggcaattttcttagacctttctgcttcatagatcagagtgtaatatatacaggttgaacatccctaacctgaaaatctaaaatgcaaaacgctccagaatctgaaactttgattgytgccgtgaacatcgcaagtggaagactccacacctgacaactttgctttctgatggttcaatgtacatacactttgtttcatgcacaaaattattgaaaatactgtatatcattaccttcacgccatgtatatgagatataaatgaattgcatatttagatttgtatcccatccccaaggtatctcattatgtacatgcaaatattccaaatctgaaaaaatttgaaatctaaaacacttctgggctcaagcatttcagataagggatactcaacctatatgtgttttctaagaatatgtttaaccagtgtgtatacaggatttttttttttttacacctaaaatcgctaagagtttaaaagtctacttgggtcttcagggtatggaagagtaagagaagatgatgaagacagcgatgacgatggatcagatgaggaaatagatgagtctctggtaaggtactatattcccaccatgtataatgtactatataaagttcagggcctttggcttaaatggcttttgctttgctttattcaggctgctcagttcctaaattcaggaaatgtaagacacaggctgcagttttatattggagaacatttgctkccgtataacatgactgtgtatcaggcagtacggcagtttagtatacaggctgaagatgaaagagaatccacagatgatgagagcaatcctctaggcagagctggtatttggacaaagactcatacaatatggcaagtctgaaaattctttcttttgttttttcataaactttgaaactgttcttgtgttttagaattcacattaacttaatggctggctttcataaggatagggggccctaaatcacacattttagttctgaaagacgatttcaaatatttgataaggtgcatatgtatatgtagcctcctcattcattctaccggaaaatgtatatccatggacagtaatcatggtttacatctgcttttctagatttatttcaggtctttaattaagacaaaaatgttgccataagatattaggtaatctgaagttgggcatctctgagtccttaagagggatttggatgcagcttcctgcattgtctgtgagtgtctgctacatatgcttgaagagagccattcttcccagaaccacccttggagtttctgaggcagcccctcctgggaaggtggtctctaggtgatctcttctaagaagttctccagattcacactagggagagagaggagaatagatctcagaacagtcttctggtaactgtggtgtctgtggcttagattttggctttgtatcagtttcaaaatctacatttggtttatatactgtcttgtcattttaggtataaacctgtgagagaggatgaagaaagtaataaagattgtgttggtggtaaaagaggaagagcccaaacagctccaacgaaaacttcccctagaaatgcaaaaaagcatgatgagttatggcacggtaagatggtagataaaggggaaaatggattgccaactgggcaatcttcccattttcatgattttcaaagagtgatttggatttagtagtaaaatttttgaatatarttgagaaataaatgacattacaaacagtttgatcacatttaatcctcaactttaatatctagaaaatgaaaaattaagtacctacaaaattaaattgggaaggaaaattgggaaaaaaacttattcccagttcatataagagttcaggtttttatgaaggttgaaacaaatttcattggtagaacatgttcactaaacaagagactgaaggtagtgataattggccaattggcccctaattttttatttgtcacccatgacagtagtacaattatagtaattataaaaagtgatgccaggtaatgtaatgaccatcgaatataaccgtcactttctaatagacttattttcctctgtaatacttccttcctgtctatagttttcctctcttcccccacgtcttccctttaaaaatacgatactaacagtgccttagagttagacaatattattgttccatggaggacacccccccctccccctgctccctgccccctgccgccaccacagtaattttcacactggtttccctggtccacagaaaagggccctgtagcacttttttttcacaaaactaagtttgttcgatataaaaggctcttagttttgagattgttatgtttttggtgttaaacatgctgttttctattatgaaatgatggtggtatgattttttattattttgcttgctataagtaaatggcaactgtttcaatccctcagatttatttttttgatgcctttacttaatgcagtctaataacaaaggatttgcagacccttacttgaaaaccctcacaatctgttcagtcctaagccttgcattaaataaccaagtctcttttaccagatttttaattttgaggtattcatctagttataaactggatatgaaagatctgggaaatttctgtaacagtgaacttaaatttaaacagtttgtttttattcctccagccattttactgtttgccattgtttctggtataaaggagaaatgtggaggagtcagctttcctgcattataatgtttatttgtgtatgggagggraaagtgaaatttttataagccaaggcactttatatataagataaaatgggaagattgtcaaacttatcaataccctactaataagattccaagcgttgactrtaacaacttctgttactcttttagcgatgataggaccttggctgcactggcttagcctttctaactttgatcaaaacttactttgatcttttgtcctttagatggagtgtgcccatcagtatcaaatcctttagaagtttacctcattcccacaccacctgaaaatataacatttgaagacccgtcattagatgtgatccttcttttaagagttttacatgctatcagtcgatactggtattacttgtatgatgtgagtaatgttgcctatttatgaagttttcatggtctgtgattgataaatttcctattgcactagaaatggaaacagtgattcagctaaatgcagggctcctagcccagtaaagtacaatgtactcatcagtggaaacttctcccccacttttttttctcctggcccacagtcttagattaattctcttggcagatttgtaaaattctctctaggaataaatttatgaaattaagctacaatatgaaacttgaacatggatttattatagttaaaattctttaggtacatgtaaccagaagtttatatatcaagtaaaagttgggtgaaagttgcatgctgcctttgatatttatatagcatagagaagagtaaaggaattggccctgcatgaaacattagctgcaacatcactgaatgactgagccagcagcagtggctgggcggggtgcgcagcagtggcaaggggtatgtgtgagggcttaacagtgtattgtgggaattgttgttttagttgggacacagtaatgagaggctgtgtgttgtatgttggaaaccaacacgtgaattcagggtactttgcatggacttggggataatggaagagattgtgaatataatcctaatattttactacatgtagacttttttttttttaaacattttacagaatgcaatgtgcaaggaaattattccaactagtgaatttattaacagtaagttaacagcaaaagcaaataggcaacttcaagatcctttagtaatcatgacaggaaacatcccaacatggcttactgagctaggaaaaacctggtaagacaatcacttctgtaatggtggccttggaaatgttactgggttggtcttgatgtattttgttacagaaacattgtctttactggacctagtcaaatgtttattaatactgttgatcacaacttgcttaattgtgtggctttagcatgtaaacagactaggcaagtttgggggctggatcttcttggtagtatgtgtctatgtatgaaacaggaaagtacacatagcagtttggctgaggatagtcaaaattatctgctgtcatggaattggattccaaaggtgtagttgcttgattctctgagcctgcttgggtcagggactctagaactgcagtgataaatgtaagccactggccatatacatttaaatcggcagtccccaactctttttggcaccagggaccagtttcatggaagacagttttttccacagacatggactgggagatagggctggtttcaggatgattcaagtgcctcatgaaggtggtggtcatattttaaaaatgagctttcattagttatgttatacttccttcaggtagattaaagatgatctatcgacttaagtgtaggattttaaaaattaaatatcagattctgcattgaaaggctacttaatgcactattacttgatcacttagaaatttcatataagaagtatgaaaattcttaaaaattaattgacctggctggacgtggtggctcacatctataatcccagcactttgggaggccaagacaagtggatcacctgaggtcaggagttaaagaccagcctggccaacatggtgaaaccccgtctctactaaaaatacaaaaattagccagttgtggtgtcaggagcctgtaatcccagctacttgggaggctgaggcaggagaattgcaagagcccgggaggtggcggttgcagtgtgcctagatcacaccactgcactccagcctgggcgacaggagcaagactccatctcaaaataaataaataaattgacctaaacaatttttactgattttatttacaattttctatatcatatcaaaagttgtttctaatataagtttggattttttttttagtagtttctgattctcatccagataataaacttacattgcatctttttacagcccatttttctttccttttgatacccggcaaatgcttttttatgtaactgcatttgatcgggaccgagcaatgcaaagattacttgataccaacccagaaatcaaccagtctgattctcaagatagcagagttgcacctagattggatagaaaaaaagtaagtttctccccaaaatctttaaataatctgagcttttcaaaataatgggaaaaactagaaatgtagtatatctaaatatgcatgttggtcttggaggccttggtcatattcagctagccctattttcctttcagtctcttggaactgggctgtgattcttccttattcttcattaagagtttctctcctccccaccccccagtttctgaaataatttctacaattctcttttctcttttagttgccgtaactcttagaccaagaaagaatcttgtcttctctcactgaaacttttttcattctaaattaggagttcaaactatctcctgcctttaaaaattgatcccttatgtaatagttggaattaatcagatccatttcattcccttaacaagtcactccaattagaagagcctgaaacaaaatcctttatatgttttgagtctcttataccagttagctccagtattgctaacttaatctgtgtttctaatcttggctccacatttgtggctctgaaccacggggccctgagccatttccagtggagaccgattctacagttctcaccagcactgtttttacttaggtcttttctgttcatttacctgtttttttccgctagggatttaagtttcttttcctaaagcctttatctccaaaagtttcataagagacattagtaataaaataaaggagttagatggatggcagggagtgaagtgtatactgaaaagcaaaacaaaacataaagcaaacattgtagttaaaaaaatcttcttgggcccggtgtgtggtggctcctgcctgtaatcccagcactttgggaggccgaggcgggcggatcatgaggtcaggagatcgagaccatcctggccaacatggtgaaaccccatctctactaaaaatacaaaaaaaaaaaaaaaaaaaaaaaaaattatctgggcgtggtggcgcatgcctgtaatcccagctacttgggaggctgaggcaagagaatcacttaaaccagggagttggaggttgcggtgagctgagattgcgccactgcattccagcctggcaacagagcgagacgccacctaaaaaaaaaaaaaaaaaaaaagtcatcctattcgtatctttattaggattccataagcactgatattggcataaattagaaatctagcaggaccttttaaaatctcatttgcaggtgtttgtagtagtgcttgtaggatcttggcagatcagagccagtaggtttccagctcacctgtttgacctgtcacctccatatctatttctctatctaaatataaatgtacccagggaaatttcatgaaactgcagccctgagaattgcactgatatttggcaaagacgatttttttcttccccaacttgaattttctgaacttgccatggccacaagataaattagtaattactcttgcatctgatttccttaatgtatgccagggtgctgttgatatttgtagcaatacagctacctcttaaccttttctgagttacctgtttaaggaaataagtgttaacaattgagttgatcttgttcttttgcatttcaagaaatgccacctgtttattaaagtgtaatatgggtagagcatagtttcctgacagttgtactttctttgtagcgtactgtgaaccgagaggagctgctgaaacaggcggagtctgtgatgcaggacctcggcagctcacgggccatgttagaaatccagtatgaaaatgaggtgagcttggagtctggtgatggttatttagcttgacttgtgctcttaattaaatgttatttgagtttcttggtactatgaaattctgaaagacagttgggagactttgctctcttttctcttgaatgatttgttctaagttctccatttttcaaaggttcaactaaataataaaaggcagtttttttcctggcgtaagaacacatttgtgttgttagtctttaagttgataaattgaaaggatattttaaacagctgataactttcaaaatgtttgaattgccttttttaaaaaatcaggtttactgagatataaataataactgcatacttcaaaaatgtagttttgtagttttaagggttgacagatgcaatttgttaccactttcacgtcaagataaagaatactctgatcaccacaaaaagtgcccccatttcactttgcaaaatcagtcattctatcccctaccccatcctcagcccttgataaacattgatgtgttttctgtccctgtaattttgtcttttttacaatatcataaatggagtcatgcagtatgtagcctttgtcattcttctttcacttagcataatgcttttgagattcatccatgttgcatgtgtcaatttgtttcctattatggagtagttccattatatgaactatatattgagtattccattatatgggtgcaccaaagtatgtttaacaatcaccagttgattcacatttgggttgtttccagtttttgactattttgagtaacattgctgtgaacatttgtattcatttccttgtggagacacatgtttttacttctttgggtaaatgcctcagaactaaattgctaagtcatttggtaagatagagatatgtttttattttgttagagatacaaaacttttccaaagtggctgtcacattttacattcccaccagtaacgtatatatgcgagttcaattgcttctcatactcacaacacttggtattgttttagttattctagtggatgtatagcggcatattatggtggttttaatttttatttccctcatgattgataatgtgaccttttcattgcttattggtcattcatgtattttctttggagaagtattcaagaattttggccattattttcttccagtttgtggcttatcttttcatttatttataaaatgtctttggaagagcagaaattttcagttttgatgaaatccagtttatcttttttttttttttcttgtttgtgctttttgcatcctaagaaatctttctctaaaccatggtctcagatttttcttatatttgtttttctagaagttttatagttttggcttttcatctgtgattcattttaagttaatttatatatatatatattaattacagtttgaagttctttcagacataggctattcagatttttttgcactatctgctgaaaagaccgttctttttcctatttaattaccttgacccctttgtgggaaactggttgattgtgatgtctggatctctttctagattttttttctgttattattctatactgtgttgatcaccatagctttatagtaagtcataatcaggtagtataagtcctcctttttttttttttcttttctctctcttttttttttttgagacggagttttgctcttgttgcccaggctggagtgcaatggcacaatctcagctcactgcaacctctgcctcctgggttcaagtgattctcctgcctcagcctccagagtagctgggattacaggcatgcgccaccacgcccagctaattttgtatttttagtagagacagggtttctgcatgttggtcaggctggtctcgaactcctgacctcaggtgatccacccacctcagccccccaaagtgctgggattacaggcatgagccaccgtgcctggccttttttttttttttttttaaaagatggtttggttattttcaacttttatttcatgtgaattttagaatcagcctgccagtgtctacaaaaagtttgacaggattttgattcggatttctttcaatttagatcagtttggagagaattgacatgtttacagcattgtgtcttctgatccatgaatgtggtgtacacttatctgaatctttaatttttcattatttacatctagaggtctttcttgcacatattttgtttcgctccaaatgttttgtggttttttgatgaagctgaaaatgatactgttctttcattttcagttgtttgttggtttctagaaatacagttcgtttttgtatcataaccttgttttctgtgaccttcataaacttaaaacttgttaataaatcacttacgattattgtagacccatggcttgggaaaactttctgtgaaggaccagatagtaaatatttcaggttttgtgggtcacatggtctccatcacaactactcacttctacctttgtagtgtgaaagtggcaatagacactgaatgagcatggctgtgttccagtgaacctttatagtcacagaaatgtaaagttcatgtgattttcacatgttgtgaaatactattcaaattatttttaatcgcttaaaattgatacaagttattcctagcttgcagaaagtacaaaaacagaccctggggctggagctgtagtttggcccgccagttgtatagcttgctgccttgtgtcatagacatttatatcatccgtgaataaaatgaaacttctcttctagtctttgtcttttctttcttttcagatacttttaaacaagcaaagtctcttgggatacttcccccctcttctttcacctaatttttttgttttaagacaaaacttagagttttggggcttccctgaacctcttaatggaggttctgcccctcagctttcttatctgtaaaatgtaggtaataatagtataacctcaaagttgtgactgagttcatgaactgagtacatgaactggctcatggtaagtatcatagatttagcagtttagtgtgtgatactacctgtgcctatttaagtaattttaatcatgactttgatttttcattcattttattaagcattttctccttcttgatgacttttaaaaagctaagagtattcagtcaccaaaggtaaaattataagttgttgtgtactggaaagtatactgcatgctagggttccaggttatggcagagtctctgcactcaaaagattacagtgtagttagggagacacaggacaaaggtaccaaagagtgtggcaaggtagtggtacaggtgccaactgaatgacgcattcagacaaggagtgctgtcctcaagatgtcttgagttagaccttagtgaaagagaacaggaagattgaggaaccattttctagtaggagatggggcctgagcaaagggtcaggcttggtggtgagtggcagaagttagtactgctgtagaagtgttgggagaagggggatagaaaggaggaggccagatggagtggaggccctggactgctggcataagagatacggattttttgaatctagcttgatcatggctgttgctcagaggatgcgattcttatatgttggtgcatccaaatttgttacttatgagactgcaggacctttgctctaaccatttggtatgtttttagtctctttaaacgtacattccactttcttcagcatatttttctcttgccaggaaatatctttcctctctcatccctcatggttctgttaaaattgcatcttgcgtgaaacctaaacaagctcaaaatgkcttcacacaggttgttctaaggagcaggattggattgctaatgtaaggtcaagattttatgcccttccttcatgggtcttacctgttgacctcggaaaagattccaggagctgcttcactggggaaggggaaagtacctccacccctacctcacaagcactgactttgtgagatgcatagggcttcaggttatgattcaaattcagctgtacatgtcagctggtggcctttaggaagaatttctaactagctctagaagaatcccagtgaaaatgtcaggtcacagtgtgggctcctatttgaattgggatgattggtaagccagggaaggattataccagtctttgggctcacaagccacccaaacccccaggattagggttacaaatgacccagtgacccagtatccttttgggaatgtggaagatcaggagcagggaatgtggagcctggcctgcccacttactggctatgtgattttgggcaagttaacataaactcatcagtgtcctctcagccctttacataattagtgcagctgcctcctcatgttgttagaatgataaaatgagctgcaatgtgtgaaacactcagaccattgtcacataataagtgccagtatgtgttagttttgagagaaaaagattccattttaagtcaagttgtcaaacttttgtttttctgtttctggggttttatgctttcctttcctttaaaaagaaaaatgaagctcaaccaagtacctacrcttttagtggtgtagttgggtagaatgataatccctgaagagatcaggttactctgtgggggtgctggccacccccaggttgtatcagcaaagcaaacatgacctgggccttccaccttctgcagaggctcacagaggaagtgcttttagtgatttaatattttaagaatccttttagaaacaacagcattggatgaaggaaatagactaatttgatctgtgacttctgttgaacctgggataatgttatgccaaaaggagaattgactagcaccatctagtggataccatgtgttactgcaggtttttctttgcttctcttttgttcctcaggcctctagtgcttgggattcagtgcagaacagaatatacaaagtactcccacccccatgatggagcttatcttttagtttggggaggccaatacatacacacacattcatgtacacatatatgttaggccatgtggaagaaaagtaaaaataagaggatgaagcattatggggatgcgtagggcagtctgaggacatttgagtggaggcaagtcattgcgtctgggggaagagtatctctagcacaagaacagagaagcagtgttcctagcctgttggaggatgagtgtggctcgagcatagagagcaagggcagagtagtaggagtcagagagactgagcagggtgggcagaggggtcatgtaggccgtggtaagaactggagctgtgctttgaatgagatggaaaacctttggaaagtagcaaagggatgccgcgaacttgtgttttgtaaggattacgcttgctcctgtgagaatgggatacaagatgtcgggaatgctagtgcagagaccatctaggaggctttagcagtggaccagatgacagagaatggcagctgggtaaagttggtaattagtttagaatgcattttgaaggcagcgcttattgtatttactctgatggattggattatgcgagtttaaagaatggccaaggacggctctaaggatttggtgggattattcattttgggtttaatggtgataccatttactggtgtggaattctaataggattggggttaatcaggaaagcaccactaggcccaagcagatctctgttttgagagagttaaacgtttagtggactacctctaaacttttaagctagtgtgggtaatttttaagagtaactgtaataatgctaaaatagtaccctttgtttacaagtaatctataaatgttgccttcttgacagggttacagttagacttagagtataacctgtgatatgaacttgtcactacctgcatatctttgtttatggtctgatctggcgggaccttgacagatcgtgaaggaaggagcaagctatgaacactgcttcaggcatgtccacatcaggtgtctcatggaggagtagtttcactttaggctgcacagtcaccttcagaacttgtttaataataccagtgcccaggctctaagctgtacctgccagatcagaatcttcaggacgtggcacccctatatgtgcatgttgataaagctctggggattccagtgcaccctgggagttgagaagcattggtgtcctgtatgaggccgttagtcctttctgtgctggtgtggaatcagaccttccattatttgtattttattcgacatatctctattaaatggctactgtgtgtcaggtactatcagagataacaggatgaccaaaatagttatcatcctgtgaaatatgcaagcatatactgaaattgtggtaaagtcatgtagtaagtatttaagtagctgaaaaataagccccaagaaaaaaggaacagactaactgttgggagcagatgctggggggagccttccccttgagagggtgacatttgagctggttttggggtaacagttcactaaagagaaaaaggggaaagacatccatatgcagacaatgccatattgttcctgaaggaaagatatgtagccacagtggcacttctgtgagtacaacctgaaattgttcaactgacatgttggggccttagcggctaggaaataataaagagttgctagtttttgtttcaggtgaccaggactgaaagaataaatccagccaggacattttggaaaataatctctaatgcatcctggtaaacagttgctgttagtgtgcacatttccaagaggttggcagtaaaaaaacacaattcttaaaatttgaaatcgttctacttgtgttcttctgtaggttggtacaggtcttgggcctacactggagttttatgcgcttgtatctcaggaactacagagagctgacttgggtctttggagaggtgaagaagtaactcttagcaatccaaaaggtaatgcctatctgtaagttagttggtttgtgttactcagatcaggtaatggactctgacagtttattagacatatttaatttctaatggacagctgtacttgctttcttttagcctctgttttctcatttatcaaatagggaaggcctgtccagttctagaggacttcattcagtgatctgcactccaattttgagaatgcttaatttcttaaatgttcttagttaccaggttttgttttgtttttggaaacatcatctgaagtttgctgcattgcttgtttttcagggagccaagaagggaccaagtatattcaaaacctccagggcctgtttgcgcttccctttggtaggacagcaaagccagctcatatcgcaaaggttaagatgaagtttcgcttcttaggaaaattaatggccaaggctatcatggatttcagattggtaagtttaggatggtttgctttttgcagttttggtgtagaatgttctgtgcaagtacctcagtcccctgtagtttactgctatagtttagagcaatgcttctcaaacttcaatacacatatgaattacttggggattttgttaaaaatgccggttctgattcagtagggcaggggtaagactgtcctactgtccaagattctaaattttcctgtcagctcccagggcatgcccgattgccaggttgtggacccctccttggatagcaagggttcagataatcaggcaagttaaggtggtattaattatttattttttaaagtctgacattacctttttaattcagtaggaaagtttgtgcatgtaactaaacttcattaaatttacattagagtgctgttgtgaaaataacccgagtgatcagtattcatagaggttggaatgtttctggacatttcttcatttctttttctcttgaacttctggcctcaagcagkcctctcacattggcctcccacagcactggaattacaggcatgagccaccgtgctcttctcatgttttcggaggcactttatcagtatgtttaagacattttcacctgtggccaaattgacaagtttacaatttcactttaactgaagagtgggcagtttatcagttattttagaagttccatttagttttctattttaaatatagtaagttttttcccttaacattttttgcattgggatattcagtaatacagactacagtggaaatgcatttagagccccaaatcaagagaatcaattttgtgtagtgggagaaatagtttgtaactacagaattttctttcttggggattacttgacctattaatatttaaatgatctcctgaagtgccttagatggaggtaatgctggaagttcagtgtgacagtgaaaatattatgcatattccatttcaggtggaccttccccttggcttacccttttataaatggatgctacggcaagaaacttcactgacatcacacgatttgtttgacatcgacccagttgtagccagatcagtttatcacctagaagacattgtcagacagaagaaaagacttgaacaagataaatcccaggtaggcttagaagaaacagtccagtagatcaagtctttattttagaaaaatgaggcttttgttaaatagtttgtatttgactcagttgttatattaatgttttattttagaagattttaattcttttattgtactaactaagacatatgatttcacagtgrgtcacatgacctatactcacagcaggctataaacatcttgattagcaaatacaattctaaatcaaaccataaataaggactcctttcaattaaattttagatggacatattatgtatctgggcagacattatatcatcttttagcatttgagtcagtaaaactattctcagaacagatttattttcaaaaaaggtagcttaatttaggaacagtcttgtttctagagatctcaggaagatattttttaaaggtcaccatgagtgccaacaactattccttggtaatacattttgaggtttctctgtgacatctcatagataaccttgaacttcatatcattactgtataattttaatgtatataattaacaatagataaattatttaactcaatctgagattaataatggttctgtatctgctattagaagaaaacaagattctatttttttgtggcacagacccaaaaagcttgtttgggctggtaacatggaccaatattaatcaactctcattttataaattaagtaagaatagcaagttaagattctgtagtgagggagagtgtcacctctcctgatgagttggagaggatcttatggtagagggataggattttagagtgtctttttattagaagatttgtaagattcactttatctcccatactaatttgtaattatttggtgctgtttgaaaaagtaagtctgttaagagaaattggtattcaaagaggctaagtccaccttttctgtacagaatttgtcattttagaatttttagaaccattttgattttcccttcacaacttggtaagttttaaactattacagtgttgtttaggattatctcttaggtaaataatggaaaaacaaaaaaaggagaaacaaaaaagcaagtaaaacaggaggctctgttttagatagcatatatatgttaatttatttaatcccaacaactaccatatgagattggggtattgttgttacctctattttactggtgagcaaaccagggcagacagattgagcaacctgcctaaggtcacacacctagagaacacagagtaggaactcaaacccaggctgtctgcatgcttccacaccatgcaagctctgtgatatatgcttgtctcaaatgcagtatgccgccacagttctcttgtcagtagtttttttgtttgtttgtttttttgagatttgttctatcctttattgttcctgatgctgtcagtttaaaaatataaaatgagtggcacagaatccacactccagaaattgacttattataataaccaactgtgaacaagagcatgagaaatggtgacattctgaaaaaccacatcctgtttctttaataaagtatatatacagatgggggcaagttgtcctggctcagattctactgggtagcttaaattctctaaagaaatatggaaaatgtgctagaatttacaatgtcctagagatgtttagagggaatttacgttattttctcgacttaatatataaaatctagagaaactaatgtaaattccttttaaacatctctaggacattgtaaattctagattcctatctaataacaacactttgtaatgcacatctttagaaataagatatttccttggtagctatgagagaagactttccagtggtgtaatagtaatcaccttgatctgtgacagggagtcacagaggatagttttgagagcttaccagtggggggaacatgaaaatggagaactttctttttttttttttttttaaatctttgtgctgaagaatacttcaaatgtaaaataaaatgcctccctttggaggtcttcaaatgacacctaaaatggagagaggcttaaaagtgggtttttgcagagaagtaaaaatggacataattctgtgaccatttactttcagtaatctgccacctcattgatattctgaattatttagaatcctaaacagcatttagtttgctctttaaaaaatgactaattaattaatcagaacattctaactgtttctagtttaaatgactaattttctgtaccttaattgttaccctataggaatttcatacacggaggcatttccagtttggaaagccatttgtcttctttctcctaacttgttgtcttcagttttagatggaatttgcatttttgcatgttggtttttgatccttaagtttaaaaaaatttacatgggcctttcataatcttagacattttttaaaaagtgagtaataaagacttcttaacgtttgtcttataaagtattgcttgccttttcttagggatttcttggaactttttttttttttttagatcacagtgttgctgcatagatacaaacttgttatgcatcagaggcctgaagtagttgaatgaagtctctccaggcttcattctgtagacttgagctttgcaggggtagaaagttaatcactatcactagatagtatgttttttatatttacgatttcccaactgtattattagtattggctgtatacttatacagtattggattcaaaattagcctagaatttatgaaaagtttgtctagttctagggtccacattcttaaaattaactaatatgcaacctattatgcacttactgtgaaatttgatttgcatatgcttaaactgagcagcagcatctcataatgaagaagcacttcagctctcttttcttatgcttacttcctttgtaatctcagtgactctttcatatgtagattatgaccaggaaaaaaataaagaggctaagagttgaacccatcagctttattaggatagcttatattttattaggatatcttttatttttttaaacaaccgtaagttaattttgcttgacaccatttctcccccatttgtgttttttagaccaaagagagtctacagtatgcattagaaaccttgactatgaatggctgctcagttgaagatctaggactggatttcactctgccagggtttcccaatatcgaactgaagaaaggagggaaggatataccagtcactatccacaatttagaggagtatctaagagtatgtaactgtgtctttggggggtaggccagttgtgaagacggaggactttgcctgattgtaccttgcttctggctgcacacgctatggcttgagaccttccacatccccaggaccactgcatgaaggctgctttacaaggcactagcttctctttgctcttgagtgcacatatcagatatttcctgtcttatataaccttgaattatttctcctcaggcttgaatgctatctaattacaccacgttttcttagtttaaaaaacaagtgaaaagagacattatttgtgttctcactaaattgcatttttgcatttccatcaaggcagctagcttgacagaatttactccaggcaccgtgcagtgcacacttttatgtttggtgacacctttcaaattactaacttatgggcgaggtgcagtggctcacgcctgtaatcctcccagcactttgtgaggcagaagcaggaggattacttgaggccagtagttcaagaccagcctgggcaacaaagtaggggccttgtctctacaaaaaaatgcaaaaattagctgggtgtggtgtcatgagtctgtagtcccagccacttgggaggctagggtgggagggcgcttgagccctggagttcaaagttacagtgagtcaaggttgcaccactgcactcgatcctgggcgacagagcaagatcgtttctcttaaaaatacatacatatatatatattaggctgggcacggtggctcatgcccgtaatcccagcactttggttggccgtggtaggcagatcacaagatcaggagttcaagaccagcctggccaacatagtgaaaccccatctctactaaaaatacaaaaattagccaggtgtggtggcacacacctgtagtcccagttactgaggaggctgaggcaggagaaccgcttgaaccagggaggtggaggttccagtgagccgataccgtgcccctgcactctggcttgggcaacagaatgagacttcatttcaaaaaaaaaaaaagcatgtatatattaatttgtgatgcttgactatatttgctaaattcaggaaaataattttatattgaacacaaattgtattttaaattaccactatatagatccttattaccaatgtttgaaaaatttgttttggtttattcctgacattgggtggaaggggcattggatttaggtcagaatggctatctaccccttgaactgacctttccactaacttgctttgtgactttagatggagcctctgaagaacttcatcaccattttcttcatcagctttaaaagagagagagagagagaatataggttaaataataactggctaggcgtggtggctcacacttgtaatcccaacacttttggaggccaaggcgggcggatcacgaggtcaggagttcaagaccagcctgacaaacatcgtgaaaccccgtctctactaaaaatacaaaaattagccaggcgtggtggtgcacgcctgtagtcccagctactcgggaggctgaggcaagagaattgcttgaacccrggaggcggaggttgcagtgagtcaggatcatgccactgcactccagcctaggcgacagagcgagactctgtctcaaaaataataataataaccagagtcccctgttacttaacagttctgtgattcataagtaattccttttagtattcagtaggactgtcttcttatcctgtttcttctactgactttgtgaaagctattcttccatcttactagcaaataatgagttaacatttagattaaggttatctcaaaataatttatactaatgcttataattttctatcaagaaaatcctaatgttttcatttttatctgaaaatgttgtttctctacccattgggctacccaaagtcagtgatgactagataatgttggaccaataagagttgctttttcttacccttcaattgcatgtgacttcatttccaggctttgcctacttttagtaggaagcacacactgcagacaggttgggttctaagaacttcacaggatttagaactaaacattttacgttaaaaattaaaaacccttaatagtggctaattgtgattcttcaaacattacctttaattctcaataacattttatcctcttgggaaattctcatttgattcccatccagtgaggtaatataactgtatggcatgggtttcacataaatagatttttaaaacacactaaatgtaaatgcacatggcattttttttttacattttgttattggtaggggccccacattagatgttgacctgatgttttactcatgtagttttctagcagattattttaaagtcttaataacttgtttgttctttataaagtgatccagaagggtgtttcactgtactttgccacatattaaatagtaaagagatttgaaatcttgtcacagttttttgaaaactttctttttgcagctggttatattctgggcactaaatgaaggcgtttctaggcaatttgattcgttcagagatggatttgaatcagtcttcccactcagtcatcttcagtacttctacccggaggaagtgagtagcttatatctaaaagaaatggtcatacctataattttagtggagtgtttctgtgctgcctagtcaaagaccgtattgttgcacaaaaacaaaaaaatgggtgttagatagcaggggatggatgtttgggaaagacaaggaaattgcctgagcaaggaagaatgttaaataggtgtcccctcttagattggggagcgggttccacgcgtgacagtaagcatagcatctttgtcagccaagaccctcaatgccattcagtggagaatggggacttgtgctgtgtgtggcatgttctacatgtttctgtactgctgtggaagcaaagagagacatggagggggcttgactttattccttaactaaacttcgtttcgatgagacattgtttcacaatcaaagttagtccttgaagttttaagaaagtattataaattatctaattgccaaatacagagaatacttctgagaatggaagaaatggatttatgtgcttggttttctctagccgcctgtattagtctgttttcatgctgctgataaagacataaccgagactgggcaatttacaaaagaaagaggtttattagacttagagttccacgtggctggggaggcctcacaatcatggtggaaggtgaaaggcacatctcacatggcagcagacaagacgagagcttgtgcggggaaactcccctttttgaaaccatcagatctcgtgagacatattcactattatgagaatagcctgggaaagacctgcccccatgattcagttacctcccaccaggtcattcccacagcaggtgggaattgtgggagttacagttcaagatgagatttggggtaggggcacagccaaaccatattaccgtctttaatttcaagtgccaaatctcaaaagaactactcactggtagtgagatacagaaagcctctagaatgtgtccagtttccctcagttttgaaacctttttatttattgtttgaatactagttttagagtgtatgttcactactgattaaatctataaatttttgattaacttaacgtcttaatctcagttatatttgtgtctacttaagcatgtagtgtgcctgatacttgtaggcactgcttgtcacctggaatagaatcatggtcctcaccacttgctgtataaccttatccaagttactgtatctgataggactgtttcatctgtaaaattggaataacccctatcacagagtaatggaaattaaataggctgggcacagtgacttagcctataatcccagcactttgggagatggaggtgggaagatcacttgagctcggaaatttaagattaggctgggcaacatagtgagaccttgtctaaaataaaaaaaataattagctgggcgtggtggtatgcacctgtagtctcagctacttggaaggctgaggttggaggatcacttgagcccaggagatcatgacgggagtgagctgtgattaggccactacactccagcctgggcaacagagcaaagctttgtctttaaatatataggaccagacagtgagcattatataatagatattaaatttcattggcctcaaattggattttctcaaagtataaggacatgaaagcatttattgctttctaatattcattctataatatctgggttggtccccatacaaccaaccatgtagcgtagacatgcctctctacaaagtgtaaagacctacccatttgctgtgtcctagttcagcttgcttctcccacttctttctccagctcaatgttctctcccttggcatctgttactgtatacctttgtgtttctgaaagccaggatttataaaatctccctgactagaagcagattatccatttaaagcacctaaagtaatgagaagaaaggaaaactgaaatcaagggtcatcaggtgtttttggtttgagaggaagggtttctcaggaaccaagtccctgcagatgggcagggtacttaatagcgtacagctaaaaaggaaatggaatctctaaattttattttattttattattwtttttttttttttggaaagaggtcccaagcagaaggttttagtactgagactgatactcttttatggtacacrtagacctttattttcactcacgtaaacaaatgtttccttagtaattctttttacccttatttaaactcacagctggatcagctcctttgtggcagtaaagcagacacttgggatgcaaagacactgatggaatgctgtaggcctgatcatggttatactcatgacaggtaagtactggggtctgccagtttttctgttgattctgaagaatgtggagaggggtgtgtgtgtacacacacatgcgcacatgtgtaaacaacaaaagttggagtggttcattttaaaatgtgtctacctgttaatggatgcttacttctgttttggccttatttctctgaagatgggaaattaagacccaagggtttctttctcaagtatttctgtgaaaatactaggggttggggaagacagatttaatcttgttccccattattacatatagtaaagcagaaatatctgtacagtaccagatcaagtcttacttattacaactgtaatcattccatttgaattctagtctagtcataacagaaacgaattdaagtacattgtaatggaaaatgtatgtgtaatttaaaagtgctaatctaatttttatgtcatgtgatgcgatgcagtgtgattaaaactctattttaacctgatgaaataattttggtatatttatttctgttatagtcgggctgtgaagtttttgtttgagattctcagtagttttgataatgagyagcagaggttatttctccagtttgtgactggtagcccaagattgcctgttggaggtgggtacgatgttgatgtttagcatttattctacctatgggtgggtttgtgagtgtgaawcttcagtaccatcagcaggagattctttatctcacttgcagtgcctcwtagttattccagtatcattatagtacattgagaccactagcagggaaatccatggggattgtcttaaacatattgaagtaggattactaatgcacatgtaatgctggttagataaaattccaggccatttgtacattctaaactcttagttgacttagatgagaatggattctaaaatctggtttttcagattgaatcctaatgtaagttaaattggtattctgttgtttttgttttgttttttgagacaggatctcactcttgtcacccaggctgaagtgcagtggcgtgatcttggctcactgcaacctctgcctcctgggctcaggcgagatcctcctgcttcagcctcctgtgtagctgggactacaggcacaacacagcaccatgtctggctaatttttgtatttttgtagagatagggtttctccatgtttcccaggctggtctgaaactctcaagcgactggctcacctcggcctcccagagtgctgggattacgggcgtgraccactgtgggtattccattttaaaaatcagaagacataaagaactgttgcctccatgttatacagcgagtttttaaatgataaattaaagcaggttccttgcacttaatgtatattgaatgtgcaattgccaagcaagaaagaatatcttgtgtgtaatattgtacggcaaagcagtggaatgttttctgatagctgatgttttttaaaaacttaagttccttgtctttctttttctcttaatcaggattccggagtttgaatccacctttgacaattgtccgaaagacgtttgaatcaacagaaaacccagatgacttcttgccctctgtaatgacttgtgtgaactatcttaagttgccggactattcaagcattgagataatgcgtgaaaaactgttgatagcagcaagagaagggcagcagtcgttccatctttcctgatyatagcaagaaatrcagtgtctgcctgttacagcaaaagamacaaatcatgatttcttttctaatgttatcacctgagtcaaggaaacatgttacgccttcttgttgtaggaaaaacggcttgcagattataaagagacatttggttgatattcattaatggccccatggacttaaagtgatcaggccctaaaacgttgttgtgatgaggtttctttagcaagttcttgtttaaattatcatttatttgatgagtgaagtttttaacatgctttgctgtgtgaaatttaaaaaagggatgtttttccaggctggaacaataaatgtggctgtgcagtttaattctgggctgtgtgtatccatctagctaagtctgcagttttctttcctccaaagacaactcttgtacataagtacagaaatttaagctcacatgtatttgacaaatatagtttagtagactagctctatgtgcttttcactttcctctgattttctctccctgattcattattatctgtgcagctcacagttttttttttgtatacaactcacagttctcaaattttcgttacccatgggcttctgttgtcccatgttctctccagttaagatctaatttaaaattcattggattgaaatttattgaatataattcagcttttgtaactaggtagacttttcttatagtttagttttaatatagtttagggtattactggctttttcccaggtgacacactaaggactgtttacmtggcaattccagcagcaacagcctctggaatgagacaaggaaagctcatttgtttcttttatgaaggttaagaagtctacagcttgggctggccggtatttattattctgtggccagaggattttaaattaatgtaaattttttaaacaaaataagcagttttccttccctgttggagtaaaaaaatttttttccctttgttgttttacgtttttgttcatagtcttctttattccacgctcctcttccccttctcccagtgctgacttgggacaaaacagttcagcctttgtctcgacgcagataaaagcacctgtaagcaatgctgtccagtcattttatgtgctgatttctcaaatctgcaataatccatcaggttaatgtttttacctgaaaataaagaaagtttgcttcacctttttgtttatagttttgtgctgtatgcataactttcaattgtatagatgtatttcaatgcaaggaaatccacatatctccatgattcgggtcatggctgattttgctattcaaacaatttataatagcaacttgaagaaactaaaatgtgaagagaaaatgggaggagattccttcctaaggtccaaaactaggcctgtggcataaatttgaaggaattttccataattcatctccttgaaaataagagatgagctagtttttttttttaattgaactttgagaaatcaatttttttgactgttctgtaagttttaattaattgacacaaaagcccttttccctatcccaccacccaaaagaaactcagtggcttgtttgacatagattgctgtgtcaatttacacttaaatggccttatatggaaatgtcccctcctgagagttcacttgggcagtgaccccattaagtggaagggaactgtcagaggagttgggggcagagaattctctccctgtctctgcagagactgacaagtgaatggcttttccctgaaatccaagaagggaattgtgtttctgcagttttcaccactaacagcacagttgctgagcagcttcatcaagtgaagttaaagactgaaacaatttgttttcaactgttctgatatcttcctgcaaattaagcacaaggatttttgtgtgaacatagcattttgttcctgatttttaaagggttctgttaaaatttagacatgtataaacaaaataatgtttcatctgtacttgacattttatccatgttgcagccctggcaaatttggcctcattgattccagcatctaataagtatatatgatgattttgactcaaactctaaagtcttgagtgtttcaaagtcagtcgttacctgtttaaaagcctcagcctttagcttattcctccttcaatacacgggacctttggttaatttggggcaggaaaactcttaaagtaatctctcttggcagaggccttattgcaccagagggaaaaagtatatacttcatttgctgttactccagttatgccttaaattcatttgcttggtaatcctatcaacgagcactaacttcttagtatactttaaacacttagttgggtaacaactgagattttgttgtcctttatattatgctgagatggagtcagtcagatgttagtcatagctaacaccgaatttgtgttgtcatttagacagttactgattcgatctgctttatatatgagaacgtatttttaactattccaagaaggaagaggtagctaaatgtaatcccctcttcctatccccccagaaaactgaactgtaagttctaggtagactaattgggagcagacacggagttttagatgccttagccaaacccagcagaaacctttcacacagccactcatcgtaagaaacgcagatttttctcttctcatgcttgtctctggttccctgcatttgtagtgacagaactttcactagcaggatataaagaaagtaattatgcttggagtccctctttactgggtttgagttaggtgcataacatggaaaggagtggtgccttcaaatgaatgtgaccactccgtattgtggagtgacttccctagggcatcctatacatcctaccacagaaggccaagggacagagcaccaacttcagtatccaagaaattagatccacaactcttgattttccacactgaggactgtcgcgagtaagttgtaagtttgccgtcttccttctggcttagcaggtgctgcagctgtactctcgactcctgtctgtgagcgtgagctcaggaaatgagagtggagtctattccaaaaaaaaaatgtgatgaagtttttcataaaagtgcattcatatgccaaatcctttttggaggattctggatgctattgttcatttctctactagtaaaatgatcaagccttcatttattttaggctttgttttttgatccattttgttttccctgctgtaatgagaytaattgtttggaaatgtcatattctgtatttatgattctctgagaaatgcttttgtataagtcttaggtttgacattgcagtagttgacatacacggtaaaggataacctagtgacaaatcactgaagatgcttcctttgttacctcaaaaaaaaaaatccagacaaaatagcatttataaatatagaaaacaggattggctgttttccaagaacttcaagttaacaattcttatgcaaggaaaagttcttaatgctaaagacttgttctgcatgaaggagacattctttaataatggaagaggtggttttatttttactacaagccgactcatatttccaaacctataaccaattgctgatctcctgtgtaaagcatttttttccttttatctgaaacagtgatttatatgaactgttggaataatggaacctcaaactacagatgtgtatgtaaaattgcataaatgcactgacttccttctccctgactatatttttaataaacagcattatcctacatggtcagttttattaaattatacacaactagagggttcttctaagaagtgctatgtgcttgcgtgggtgacttttggaaagcttcctattttggtaagtaatgcagtgagtgaacttagctttttttggaggcagatagtggagaacgctgtagaaaacaaatacacttaaaaaggtggccctgctacctgcttgttggtggagcatttgtgtaaggtatccctatgcgccggcaaaatagtgccattggcgttgaaaatgtgcacagacaatagggcctactggttggaacactatgaagtcatcgtgcttgactttcaagactggctcttctgcccttagcaaatgtccagtctatttcactgaaacagaaaaagcaaagtagaattgatttacaaaagtgaaagatggatttttgttagaagagtgatgactgaatttaattttatttttaaaggtctgtgtacagttacacaactcacatacgtatatgcacatatacacgcacacatacattgtcttgatacaactgcctgagggaaaaacacacgtttcctttgataaatctcttggtctgtaaaatttctaaatcagagatgaaaggcactactaaataaaagctcaccacaagacaggcatggaagtttataaccaatctgatgttgtctagataaccaattctgtgtttggagctgggtagcattgcacttctggttgatgtgattgtatgaattagtgttcgcatgttaatgggtatatggatgaagttttccatcttaatgacagttgttggggcactgttctggtagaaagcacaatgtctctgcaaactcttgaggccaatgcatacaaaagcaggaggcattttgggaggggagagattcagccattgcagaacaattctaactcatgcttacagaaggctgtgtcattccttcctctttttttttgagccaggttagtaacctcaacattagctggggccggacgcggtggctcacgcctgtaatcccagcactttgggaggccgaggcgggtggatcacgaggtcaggagatcgagaccatcctggctggcacagtgaaaccccgtctctactaaaaatacaaaaaattagccgggcgaggtggcggtcgcctgtagtcccagctacgcgggaggctgaggcaggagaatggcgtgaaccccgggggccggagcctgcagtgagtcgagatcgcgccactgcactccagcctgggcgacagcgagactccgtctcaaaaaaaaaaaaaaaaagattagctggtctcctatgttgctcctcctctcacttgatgtgagaagggcaggaagaagggtcgtgctgatgcctggaataacgctgtccttcctatgcaagaaattgcaaggaagcaggtcccagaactgccccatagccagctcaaatgtcccattgtggctttgaggcccaggcacacatgctggattcttgcactctcattgggaattgaggtttcaggaatcgattttggtatcttctatgtggctatgatacatcaaaatgttaattagggacactattaacaatttattatcaagaagattgtactaagggatattagggcagaaaacacaagtccagattgcaaggggtctaaacactggttaatgttaacgtgggcaattgtagagttatacggggcagctgctgttagttgaaatgatcatctgtaaagttaacagtaatgtaaagaaaacccgatgggctcagcttgcagtttcttgatggaatttggacatttgttaaaactcattcatcctagtcagtcctattcccaaagtgtgttccaaaacttagaatagaacatgcagcccttggcatccaggcagagtccctggcatcatgataactcacacagacctgtgtaaagggctttgtgaaaataaacttggtggagcagaaagagccccagacagagtcagaaggcctgatgtagtcctggctccagtcttcccagctaggggaagctaaccccactgaaccttactctctgtgtttttgtgaagccagttcagtgatctccagctttatgttttaatggtaacattcttcaaatcttgtatgattctttaaaacgtctcccaggatttcttaacaggtataggcattttgcttgatgcagttcttcctggtagagggttacagcaaagccctttgcttctaaatgtcaatagcaccttccagtcattatgacaactcaaaatgccccttactacttccagatagttcaaatatcaacgcgttatctactgagtgaaaacagtaattgtgtgttgcagcttttggaaagcatttagattttatattcagccaataattatagttagtgacaaatcaaacctttgcagaatttataagtaggcacaagagagggataagaagaggaatgtaaaagtgacgatttttagtcagaaaaagccacaatcctgtcctcccctactcctcacacacacaacatccctctcacccagcttccttcgattaggaggacgttgtcttaccactctggcctcctacataaatgagaaccgcttgtttaaaatgtaactaattttaaaaggactttaaattcagaaaatgtcattgtagttgcccctgtgatcaataaaaacaggcttaataactaaattcattgagaaaaagcttaatagttctaatgagaatgttaagtattcaagccaggtttttcaactttctagaactaaataaaaaaaaagttggtctttaattattataggctaatagactaggcaaagtaagttttctttcctccaaggacaatttagtgttgtaata

SEQ ID NO: 94090 - DNA, 305589 bp, Homo sapiens
  misc_feature (1)...(305589): n = A,T,C or G
gaaagtaacaattttaaaaaactttagaaaaagaaggcagactgctgatgctattaaatcctgggtggatactgcatcctaccagtggaggtctgctctccttgtttaagagagaatttagcaagcgtcagggaggtgttaaacatacaatacgcgcactaaactcagactttctccttggagaggtgtcccagagtgtgcctcccatccttgggtggcaatgggagggggtccctgctgaagggtccctgagtgtgggggcaccactcccaccacagaggggtagccctggctgcatcctggccactctcctccaagccttctgaatacactctgggcccggcccctcttgaaaactcaacacctccccctcctccacaaaccgcccaagaagccaagggtcaggaagccatgatccggattctgtaactcaaaccggggagtatctgcgtcaaatcctggcggagtaggaaaccaataggggaatctgaagccatcccattcagtagttcagcgggagccaggggcagcccatcactcagagaaggccctgacccgttcttatctcccctgcagctgcaagactcctccccctggctccaccacccctcaccttctcactcttgacccaggcccccgaagcccatgacagcatagggtcccaaggtatggcatttttgaatgtccctggggcactatcaagtataatcaggaaaaagaaaatgtgtctcttagctaggccaatgccttaagtacccacagaccgttcattcccctgcaaggcaggtggcctcgtgcagccagagaccttgtgtagccagaataccacgtcctcacctctgagtttctggggcctgctgaacctcctgcagcaacactgacatcaatggtattatttactcgaaaaattgttccattttggattcagatttcagaaggacatttgaaataccaaagctgccgccagctctgttaaggacacagaaaggcccgctttcccatctggccttggctccagcctggtgccatggtgggggtcgggtatctttgcaccaccaagcccccacccccacatctgaacagccaagccagaaaagtccagaaaaaggaaaacatttaaaaaacacaacattgggctttgccttagaaagtgcttttcctcagaaagtgcttttcctctttagttaatagttacaacctcttatatgggtcttacaactcattcattcatgcattcattcatgcattcgtactcattcattcatgcattcattcattccaccagggctgatgtttgactgacaagcagggtcaggaaagccctgttggttatttatagctagtgtcccccttggcacatgacaaagccgtgctgcttgctaaatacttaaaacctcacccctgtgttcaaaaacattgattgagcacacagtgacatttcaggcgctgagattgtcaacccctgggacacaccagtgtccaggcacaatccctccttcaagagcgtatggccaccacaggcagagacacacccaccaatgcaacacagggattcttgtgatggagacccagacatarcacctgtcctgagagctggaagaggcagaggggcctcatatctcggccagaaataaaggaaagacattttggaaaagttactgagggggtgaaattccacacgttagacttactaaatctctgaatgacagagcaggaaggtacctgagagatctttgaggccaccattccccaaagtatattctaaggaatgctagtttattccaaaaaaagttttcaaggtcaagttaatatgggaaatactgggtcaaaccaaactaagctggtttctatgatgcaggacttatcagagccttagtcattgccttgtgaaatctacaagggggatgggagctacaggaagcttcttgaaagactagtgctccccagagatcactctgagtgaccctaagctagtccaaccctttttccacagacaaggaaactcgggccccaagagcagctggcatttgcctaacatctcacagggagtagagggtggagttggaattagaacccaaggcttctcccttggaagcaggctgtttagggcatgttgtttgggccttgggtgctactggcacatgagaagaatgaggttcacgtgggctgaagcaatcctgggaggcttcctggaggaggcagaacttgtggaaatcctggggctcctggagccaatgactcatgactttattgactgaacagtggtatcacagagaaccaggtacatactggaacctcattgtcacccagttttcctagagagaccttcaggatgcaggcaggccttccgcccaaggagattagtccctgaactttcgaaggataaaagtgcttggaggtgtattttcatcttcaatgaagcctccctgattgccaccccaagttaaaatgatcccttacctccacccctgatttcttcccttccattcttcctttcaagttttgtttttgggctgtgtgagatcctcactagtttataaaccatttgaaagtagaatgggtggtttattcttccttgtttggttgttgatcaagaactcagtcaccaattaggcacggtggctcaggcctatattcccagcacttcaggaggccaaggtgggagtattgcttgagccaggagtttgagaccagcatagcaagatcccatttccacaaaaaacatttttaaaaaattagctgggtgtggtggtatgtgcctgtactcccagctactcaggaggctgaggcaggaggatcacttgaggccaggaatttgaggttacagtgagctatggttgcaccactgcactccagccagggcaacagagagagccccttcctcagggaaaaaaaaaaaaaaaaaaaaaagagctgaccaaggccaggcagagtgctcagtgttttccatacatcctttccttttaccttcaccacagccctctgcaggggttgtttctacccccattttatggaagataaaactgaacctcaggaggctgaagtgacttgctcaagaacatgggccaggaagctatggagccgagattcaagcccaggcaatggtttccctttgctgaccgacctgtgaaattaggcccacctgagtcatggataatcccacgggcatcctgctcttctggggcagtggctcacctgagccctgatcctgattaaagcctctgcaaggcccccaggccatgctctgagctcagccccatctcagctggttgactgtaagaggatccagggtgagaagtgcggtcacctgcaatttagaagggcaagaatcatagattccaacagctgggatggcttcagcctcccgcatccactgcctgctctgcttggacttgcccctggccttctggggtcccaagctcagttactcacatatcattccagaaccatctatgttagaagtcaggggatttttccaatttcaccaattactttccatcccaggccttcacctttatttatggacagaaaaacctggatgcagagttcatggctgctgtcaatgcagatgaaattttaacagtggtgacatccaagaaccatcctcctcacagtcctggtttaggccaggggctggggtctcctttcttccataattaaaaattcactagtgaggacagattgctcatcaatctttcatcccaaaagtccccgtggagaagatgggggcacggctgataaagacaggcctggccgcccacagctctaggatgacactacagtctacaggagttcagggccttgggtagggagcaggtgggcccaggggagcctaggggggcccctggagcacggctggaaggtgctgggcgtgacaggtggccagttttcagctttctgcctcatatgggcatcagggagacatcaggaagaggcccacagagggtcagcagacaaatgtgtggagcaaaacagtcagagggtgtctcaatgaccgtgcagctagtgctgctccagataaagcttaatggggcgctgcgtgtgtgggcttctgcacagggccagcccgggagcacagcctggtcagcgatgctagttgttcttatcgtcatgttgacgtggttacttctgtgctgtgagtgccatgtaacttctctgggactcaacttcctcatctgtaatgtgggagtaatagcagtgcccgcctcatggagttggaatgaggagtaaatgctcaggtgtttcagattttagctttgtgcctgctcaaaggaacccctccaggttggccttattagtaagattgctattgtcaaagggagctaactccccgtctcctgacatggccgcagcctcatggatcccaggccagaaggaagggacagcctggtaagcaaacaaaacactggcactgccactccctggctgtgtggccgctgcaagctccacccttctcctgacctcagtttccccatctatacaaagcagttgctggagctgacgatcacttctagctccaggttccaagaaaccctgcatttggctgcctcttgtcgggctcgtgtttttcccagaaaagatttggggcggggagctctggggctcccaagctggccccgtgactgctctgtgttggcctcgtggctgtgggttccctgcaactctgctcctggatctctgtgaactctgggatgggctgtttttctgggaaggggacaggctggctcaacagtgggaggaatttgaagggtgtgcagtagaagagaacaggatggagggagggggaagggaggatcagggcccagcaagctccaggtgctaaggtgagggtagcaagggtggggtgccagaggacagagcaaaagctcaggctcaggccagctgagcagcacagcagggctcaggagagctcagcaccaagtgcccggtgtcatctcatggtcagtgaggtagaatggagccttcagacacttctcaggacctggttagccctggattgggggctgagggtgtgaaccctgtgagtgaggaggacacagggaggcagggctactgtgccggatacctgccatttgcccctcaggatctgctcagcactggtatcctgcctgctgtgtgtccagggaggtggctggtaggggctgcaccaatgggctccctctccctctggcttcatgttaggtttggccaatgagaagctctggtgagatatagagtgaccgggagagaagttagagtatgtgtagcctcccagctccctccctcagggtcagggtaccttgggctggctggatgctttgatcacaggtgacagctcccatcaagcatctgctctgcacagccctctctggaagccaccccgtcctcccatctccttcgggactaggggtgcgggaaaggaatcccccctgctttcacttstcccgggagctgcaccgtccttccaggtttccctactcctgccacacctttgtagagttcctcccttaaaccctcctcaaatgacagggatacccccaagtccctgactgattcagtccccagagccacaggccaggaatattgcaaagggccccaaccccagactttgtccagagcctgactttaccttctcacccttgatttctctaagggacaagcccagccgtcttcctccagagttcccagtttgtatgtctggatccagcaaagaggggaggatgcccagccaagcctgggagatttgtctccaggaaggaggcgcaactgagctgtgcaggtcacagcatcagacaccagagcagaggggagcccatcctgctggcacctggcccagagatgcagccctccccagcggagccagaaagcctgactttgcatgaaatcctctggtttctatactgggattggctcaaacagtacgtttaaaactgtttcagtcagatctgaatccctggcccccagtttgtgacttggaaaatacaagcccccttaacgtgcttttctgctctcgttttctcttaggtttccctgtacttagagcgtggactgtgaacccccaagcagacggtgagtgtgagagccatgagccctggttcacctgggggcacccatagaagcccactagcatctgtgtgcacccagagcttctggcagccttgatttagaaacgcccagtttgcaaaccgcctctctgtgaaatcatccaccccaactacccaacactcagcctccctagcccacttcccaaaactgaagccctcagcagtggctttcaaaaactccttctattagtagaggaggagtaaaggcagaagcaggtctgaaagctgcagttcgggcttatttccagccggtgaccgcctcccctgtcctcgcagagcctacgcattgccactttaccttggtgtgatattccaccaaaagagaagtgcacttggcttactaaatgtccttttgggataaagagcaatattcctgtgtgggctctgtggctgtcatatctgttatttacacgtcagtatcttttaacgccatcagatggtttttcaattactatctccctgaggtcagtccactgaggggcattttcggtttgaagccttgagaaggggaagcctggatggggcctgggagcctgcagaggtccttggagctcagtggccttttgaattgagctggctctgggaccacagtctttggcccctgtcttgggttgatggrgccactgtgggctagcctgaaaccctcaccatcatggtgtccccgagaaaacaagcttgaggctctgagccatctgtttacaaacaagtcttaggagacacagccactttaccctgggggactatctggcagttctctggaatgggccacagaggatcccctgccagtggctcctgggtggcacttccctgacagccttgggggtgggtgtgtgtgcaactggcttccttcctaggctgaattagccactgctccaaggtttgacaagagagagcctgccccacccaacaccccctccctgcaaacctgtcacagtgcccaaatcaccaccatgcttgtcactccttggaagaggatggggaagaaaccttgaaagcttccatcaaaatatcatctataggttagctgtggttacttctaagtttagagattatgggcaatttgggttttctgtgttttctaagttttatgtaataagcacatgtttctttcatggtttcttcccaagtgctctctggggaggtctagaaacccatgggcatacatgtgtgttgtagtagtgatctgaccagattggccccagaagacagcaggcctctgggagctggggcgtgggtaccttttggtggaaaagcaaaaggtgatgctggggagagactaaagagctggcaggggcgaagcatgcttcctcctccgattttgctgctgccgtgagctaaagacccaaagcatgataattttctgaaaataatgtggacttgatctgtcacttctgttccactgctcatcacctcgatagccttgtctcttcctctccacactcagctcctcccaaggcagggccttgtctccttgttcatgcctggggctcagtgaggtgctaatttgcgtgggaactggtatttsccgtgccctaccatgtgccaggcacagtactaaggttcacctcttacataggttcatcctgagaacaagacgcaatgattatccccgttctgcaggcgaggagactgaggctcagagaagtgaagtgacttgcccaaagtcacttgaccattaagatgcaggactggaacccagtccatctgacttcaaataccttgttttgccaccatatccctgcagaaataacattaygtttgtaaaagactggacaatggataaaacaatgtattcatartttcacttccctgccacggcatgtttggggtatttttgctctccttcctgcttttatctatatatgtattttcttagacacagtctcattagtgcatccttgtctgggctgttacacagctgtggctattctagtggggtcaacacagcgataagggtttgtgtcccagatgagcaaatggccaggtgggcatgttggccatcacctggtgggggccaggtgggccacaccagctcgtgctcccttggggcacacaccagctttgcgtcttcctggtcctgcacactcatgttgctggcaagatgggaaggcagaacaggacaccagggctggatctgggagccgtcctgctgctgccctgctcagcagctcgtccctgtgtgaagaccagcactctcagaccctytggaatawcggctaagcccttggtctttggagacaggcaaaactgaattttaatcctgactgcttccttctcaagctatgcatggccttgggcatgtgggtgactccacccctttgtgccttcgtttcttcacctgtaagatgggtgtccactccacagaatgctgagcaaacagcgaggccacctcctttcsttcccttcctaagtaaccaggctctcacctgaagggcaacttcattttagccggggatggctgtcactttcttgtattgactataggcgggtagattgggttttattttgtttgtttctttttattttatctaaaattataacagaaaccctgggaatcttttaatatgtgtgatgagacattgttatacccctgagagtggcataacctactagaaagttttaaaggcttttaaaaagtttcctctttcaaaatataaggaactagtaatttcacttctaggacatttgccctgaggaaataacccaaaatgtatacaaagattgatctacaacgatgtgtatcacagcagtatttatattagttaacaayaggaaacaatgccaatggccagcagcagggaactgggagtcagttgtggcaatatagatcacagaaggaagattctgggcagccatcgaaactgtttgagatgaatttttaataatggaggagaaaatgttcacatttcagtattaagtgaaaaggcaatttgccaaaattaaactgtatttttttaaataggtagacaaaaacagaagtaagcaagagagaaagaagtggggagagagagaaagagaagatagaagaaacagatacaaaagtgtgggaggataacaggtgacttgtttttttctttgtgcttttctgcactttctaaatttcccctagtggaatgttcactgtttatataatcacaaagaggagttagagttaagaaaaaatcctctgcccccaccaatgagtgtgtgtgtgtgtgtkcattttgctagtcagctgtataagaaaaatggttatgttggcacttttcattctaaagtgctctttttctcaaaaacaaatttttttattcaaagccaaggtcaatgtcacatagtcttccttctgtccctggagctgcagttctgagggagctggctttgagcctgtattcatgtattcatgttagggctgccataacaaagtgccacagactggagggcttaaacgacagattcatttctcacagttctagaggatagaagtttaagaccaaggtgttggcagggctggtttcctctaagtcctctctctttggctcctagacagctgacttctcctatatcctcaccttctgaatatgtctgtgctcaaattttttcttataaagacaccagtcagattgaataagggcccaccctaacgacttcattttaacttaatcacatctttaaaaaccctatatccaaatatagtcccattctgaagtggcrggtgttaggatttcaccatatgaatttgggggacacaattcaggctgtaacagggacagcttgttcctggcaactgagaccatttattttgcagagcactgaacttggaactgtagtgggatcgggggagggaggtaagtgtggaaggaaaactcatgtctccatccttaataaatctctggagaggtgtgatgcagacacctaagtaggtggtgcacttggttaccaccttaccttcccagcgagacccagaagcaacagtacaaccatcccagctgagcccatctatcacagagtggctgctcaaggccatagcaaaatagttcatcctgaaaacattaattttactaagaaactctcatgaagtgagaagaagtgagttagagataaacaatttgatagttgaratgggcttctggacattaaaatctgaatataaaaaataatttttcttagcatcaactccaaagtgattttgatttataaaatcagtggtggagagaaggactaggatgagcaagttggatgtggatggtgatggttgctgastttagcagaaacaaagcttcacctctgtggaccttgacactggcttcaaggtccttctgtcccttgtcagctgaccttcttagatcactgtgggtcaaaaccactctgaggggctggccgttggactgttggagctcagtgtaaggtgagagtgtggcaaagataccctcaaatatctctgcaaatgtcttgcttcctgtctttgcctaaatccaaaacttggagtcatccttgaccctcccttcgtttctgctcatgtcttgactgtcattgtcttctatctactcctggggacatcacaaaatccaggtcaccaccatgtcttgcctagaccactgggtcagcctcctggttgctcccgctcctacacctgtccctgatcacccaccccatggcagcagccagacaggtcctttgaaaacacagatctgctcgcatcactccctgactgtaaccctccagcagcttcctgatgtcctgargctaaaatccaagctctcctgayaatagtggtttagggtgcttcctgccttcacctctggcctctgatcccaccagccccctgttctctgtgtccaagtgatgctcagcttccatgtctccaatgcttctcactctactcacagggtagaatccaggaccgtgcatgagatcctggaattgaggggacasttgattgagaaaacagccccatgacatatgacaacttggtttcagcatttttctcttattctcttatagcaaagtctcttctctcagcagcttttctgggagactgaaaattggtcactattcctagaggtctacttggtactgactctttatttcttgcctaaatgtctkgggactccrtgctgtggtagatgttagcaagggagtcaaccaaataaagtcctgtgggcctgcttccatcctgcctctcatagaaccctcacagccactctgggacataggtcagtggtattaccattatccccactctacagacaacaaaactgaggcacagggaggggaggccacttgccaaagctcacccaactacgatgcgggagaaaagattaaaacccaagtcacgagactgcaattcaatgtatttttctcatttgtgtttctrtgtttaatcttgtgatttttgaaggaaatgacctggcgcattgtgctttcagagcatctgtttgttacctactaacaaagcactttttctcttgagctcaagctgttgaaactgtacagccctacagcgattcctgccacatctgtgtaaataaatccttataacaaccagctggaaagcaaaacgttccaggaggtaccagatcatttatatgatacctcttccagctggccagttttcttggtggcacgtaatttattcattcattcagcaaatacatacggagccaaacactaggaatacggcagtgaacaaagtagacgtggttcctgccttcagggagctgacattctcctaagggagatggacaataatcaaataaacaaatgcatatgtaatatgccgtaaaggctgtcaaggagaatacagctgggtgagaggagagagggggaggggctactttatataaggtgctcagggaaggcttcttggaggaggtgacctttcaggctggaatgagggaatgaaaaccaagaacaacattccagggaaagggacaagcaaaagcctgaggcaggctgaagcttgggatgtttggggaacatcaaggaagccaggaagacaaaggacagcacaggggagggagaagtgagaggtgaggtcagagagctaggtgaggggctgtgccttaattccaggggaggtggggmactcgagggtcttgagtgggctgggtgggggatacaggctccccaagctgctgtttggagagtctgctgcagggggcaagggcggaagcagggagaatgttaccattatccgggtaagagatgatggcagccgggccaggacagtggcagtggaggagagaagtagctgtgttccaaacagctgtgacagttgagctgacctgacctagtctcacactgggggtgagattagaaggaaaaagaagaatcaaaggtgatggggtgtgttttgacaccaatggtgttttataagtcatcaagggcactaatcacccagagctaatgcagaccccacaagttaaagggcacagtctgcaataagactgcccccacttagatgccaactaccaggagggtccccaagctgcccgcagttctgaccagctggcaacaaactcaggggttcccacaaccccctctggtttgataattcactagaatgactcaccaaactcagagaagtgccgcttttatgattaccactttgctgtgaaggatacaaatcaggaccagccacacacagggtgaggtctggaagggccctgaacacagagctcccacacatttttcagggcatgaaatcaaggcacatcacctcccaggaacatcattgtgttcaccaactggaaactccactgagctttggtgtccagagtttttattagagcctcatcacatagacatgattgactgaatcatcagccatgagactgaactcaatcttcagccccctcccctcggtggaggccaggctggctcaaagccccaactctgtaatggcatggttgttccttctggtgcccagcccccatcctgactcatctcatctcttagcataaactctaaggggttcatgaataacaaagatactcctaccatgtgggaatttccaaggagttagagtttgccttccaggaaccagggatgaaagcctgtcaaagttttattatacaaccatataaccagttggaggctggtgctatttactaagaccagcagaagaccagagagggggcaataggtttggtacaggaaaacagagggtaatggtgtggatgtgttaactttaaaatgttcattagatatcaaagtggaaatgtggcacaggcagttggagttatgactctgcagctcagggagatatcagtatatagatcgtatttaaagccatggggctggataactgaggaagccagtgtctttagggagaaaaaaaagagctcacagctatgccttgaagtgtcccacacttagtagtggggagaggaagggccagcaaagcaaatagaggaggaggggccagagaggtaggaggagaaccaagggagtacgcaggggtccccaggcaagtgctttgcaaggaagggtgagcagcagtgtcaaatgcttctacaggccaaggaaggggaggaccaagaaatggcctctggactyggcaagatgagggccacagtaatcttgagctgagttgcttctggaaaggrgaggtgacaaaagctaattgaagaggaccaaggtgggaacggttagtgaggaagcagagatagggagygaagagcccagaggggctggggacctggggaggggttaaagtgggagctttcatagcacaggtgtcatagcacacctggtggccagagagcatatgcagcacctgccgtgtgcccagtgctgagccaggagttgtaggtgtcttctggaagctcagagtgtggttggagaggagagatgggagtcaccatccatactctagaacagagagtgtaaaatgcgatgctggctggcagaaatgtagacaggagaaaccatttctaactggggtaatcaggataggcgtaacaaccatagctatttctgttgagcatcttctgtgtacctgggaatatgctgggcccctgaaatgcattctcctatctaacacttatgacactggtggtgtctccattttacaggtgagaaaactaaggcttagagagatggagtcactggtccaacgttacactcttaggaattgccagagttagaagtgaatgacgatgggaaaggatgtctataggcaaagttcggtagggcgaggagacgggcagaaatgaggactcaaacacaagagaagcctatgtgagtttgggagatcctgggtgaggacccagtcagagaagaagtggaacacgtgagtcccatgtgagtcgctcaaaagagggacccagtgccccccaagcacatgtcactgatggtgtaggctcagggagctccttgaccccttgggctgccttcctctggccaggggagagtgcagatgtcggtggacaggactgaagcaagagagagctcaaggggagaggagtggaggctggacgacaccgatgtatccctgacctttgccaatactttcccacacccctctgcccaagctctccgcagccacaccccaacgccaaacatgcccaggccagggaggtgcccctgctcatagccctcacagttccttgtctttaaacagggtcagagggccttgcccacccctgccagggagcgtaattatgacctaaaacaacatgtggggagacagcattacgaagaaatgtccccccaaaaccaggagtcacaccctcattcaggagtggtgggaaccacccgttctaacaggcagacggtgcctcctgagggtggatttggagctgtttgatttggaaatgtctctgatctatggagacacccctgcgagccctcaggttctggtttctcatctgtgaaaagggtgcatcctggttgagtcaggctgcaggttgcctgctgagagggactgtcagcgagcccagccgggcaggatgcactgttataacctcgtgtggtcaccaagtgaagctctccagcctctgctgggcttgacacagtckcwtggcatgccagggctgcagggstcttccatgcctcccagttctcagaggggtagaccgagacccagagagaccagcctaaggttccctccagcatgtgttgatatttccttcccaaatctttatagcatgaaagcagaggagagagatatgaagggaggggaaaaggaaaagagatggggagagggatgagacccaggaagatatgtggatttgggaggatggaggctcacttttgcttgcgagaaggaaacttgaagattgaacarggccaagaacattcttaatttggaacctatcattccatcactttacccggaagtccataaccccactactccattcacctcatgcagtgaatacgtttaggggtttagttgcagattcttggggtgagtgggctggggaggagaagcagctagaagcagaaaaatgcttagtgatgccgcctcgaaggcatgacatcctgctgtgcctgggcacacgtgtatttgaaaggggctcaaaaattgggggtggggaactgggatggatagtatctgtgatctagaggccagccgtgagtgagctgcactttcttccaacccatttagggttggaagaaaggctcatgcccttcggcttcaaggaatgtgatcatcagacctccagtgccagagcttggaatagtgggccagataaaaaaaaattttacacacacacacacgatatatattttttcctgtcatatatatatatatatacatgtatatatatatttatgcatatatgtgtatatatgtgtgtgtgtgtgtgtgtgtgtgtgkatgtgtgtatatgtatatgtgtatgagaagcacaagaagacaaaaagagaaacaggaaggagcaaaggaaccaggaatggtcagactgagtcaggatttttccagggctgcgatgagcccattggcggaaatggagatggtgaggtgacatcagaagccccattgtggccgaggatgggagagagggagctgcagtccttgaagggtcactcagtgccaggccaaacagcccactcccccgtgaattgatcagagacactgcagtgccccagccccttaggatgacagtgatgtccacctcatcagccctgagccatctaaagatgctgagagtaccagtgagggctgctgcaccttgtgattttgtatgcattcccattaaaacaaaacaagacccaaaacctagttggcagaggagctggctcttaaagggttaaccctcagttacctggacctccaggtaggcctccccttgcacacacctgtcagaggatctcccgctgcccaaccagtggcatttctatactggcaagtgctttaccatccaacccccaccgatggcctctgttggctgactttctttcattttctttctttttacacacacttggaaagctcccggcttcagccaggcgcgccgaggaggcttggagtagcagggctgatcgatgccgggaggctccttgcggctgccagagccgtagtcatgggtgggggcggctgtgggctctgcagcagcggctctctgtgtctctgccctgctgctggcagccagagttccagacagctccctgccctccagaccctcagcccagagtcccagagcccagggcacaggagaggcctgctcctgggttacagcttgcctggtacacacccaggagggtaagtgagggacgtgggtgcagtagagccacggggtcctgagacagagctgatagagctgttggtgccagggctatggctgtttcgattggaggaggaaacagctcagagtccgttcctgctcattccatgaagcagcggcaggacttggctctgccaaaactcaaggtggcccggaattccggggaaggaaggttgctgttggcttgcagtcaaggcaagggggttataggacttccccaaaggacctgagctcyttccctcattttttaccagatgtttattgagggccttgtgcacgccagctccctgctaggcaccaggggatttagtaggactgaaataggcctctccccagcagcgcccctagtcttgccaagagaatggtttcttagataactgtagtaccatgtgaggtgtgataagagagggtctggccaggggaggaagaggccagtggggcctcagggtgctggagaagattttacagatgaagggccatttcaaccaggtcttggcagatgagtaagagttcttcagggaacaaagggcagccaaaatcttatgagtgactgcaaagagatttgaacatacaaaatgtgatcgtatgtggtgacgggctcggcaggtctgagcagaggctgcagagagccagcagaggaaactgacagggcctcatcaccaaaggcctccaaggccagttgagggagtcaggacttggtcttacagacaggtgagagacactgaagattttaatttttttgttaagaggtaaggtctcactatgtggcccaggctggagtgcagtggcacaatcattgctcactgcagcttcaaactcctgggctcaagtgatcctcccacctcagcctccccagtagctgggactacaggcacaagccaccatgcccagtggcactgcagactttataatgggggcttgatgtggtcagctttgcatcttagaaaactacagtgtggatggagtgaggagggagacagggaccttccagagaagaaagctatgacttaaaaatcctagaggccagtgcttagaccaaggcagtggagtcaggaggtagacagcaggggacagctctgctcttttccgagtttgagtgacaagggtcaatcgtgaaggaaaaggaagtgtcagggatgatttcaaagtggacagtgaggcctgggtgggtgatgctgcctcttgatgagagaggggacaaggggagaaggagcaggtggaagagagagggagggaggtcataaggtcaaatctggtcacactgggacctgacttcgatatagtatcacccccctagacccctgccctagcaagcttcatggtaaaccctggtgatgctgagtcaatgccagatttatcatccacacaccctccaaatctacatgtggtcactgaacttgtgatagctgccacactcaaacagaaagatctcaccctgcacctacagcaggcttagcttggccctcgctgcttggggttgcaccccctttccatctaagtgcaagtgtggaaagtggatgccatgtccctagtgtggatagatttttcaggtattgaatggcaatgccactgagcaggttggttgtgcagagcctaccctagaaatggatcatttagaaaggttctgtgtcctggccagggtgccaggtgtgcaggggtcagggatacctgggggatggctaatggggcactgccttggctcaccactgacccctctccagggagtccagggactctgcctggctttggaaaagaccttggcttaggagaaatggaaatgtcagggagcaatggtttctaaggtccagggctggaggtctgggagtgcccagctttgtgggggattcctggttggaagtactgcaactaaacaacttcctttgcagcttcctccactgtttcaggctctgttctgggctttccactgcctgggcttattcaaccctcacacaagtggatcagagaggagaagcaactggccagtgtcacacagccagtacgtggtcaaccagcttcctgccgaccgccaagccagtgccacatcttgtctctgtgtgaagttggaaaagatagaacatttttaaaaagtatgagattcatacctgagttgccaaattaaatgtttttaagacaaaggttgatgggaacagtctctctctctctctctctgtctctctctctctctttctttctctctctctctctctccccccctccccctctccctctccctctctctctctctctctctctctcgtgtgtgtgtgtgtgtgtgtgtgtgtgtgtgtgtttagactccgtcattacacttacgtttactgtgcacctactatgtgccaggccctggggatacagcagtgactgagggagacttagggaggaatggataggagtatggggaaaggtcttatacataagcaggtgtgtaaaacacacatacacacagacacacacattagtgctccaaaccgttgtaaaagtagacacatttacctggcacagacacacagatacacatctccaaaactcccctgcatgcacatgtgtacctccgctgcacacacgtccacccacaggattcagactgacttccagagttaactaagtaagggaactggacctccaacccaatatacaagccaggaggattggaagtcttgcactccctacttcaccaaagactagcaaaggaccttaatcctggcttttaactccacccccctggtcaggggctgagatcttggggttagatggtgcggactacagctttgcccaaggactctgctaagagtcattgccaccatctattaaacacaagccaggctcttgacatgcattgcctcctctcacatacactctggccgtggagtatatgggtacagtactaccctcattttatagatgagaaaactgaggctcagagagctgcgttatctcaccgggggtctcatgcagatcacaagcggcagagcccagattgaacactgaactcctccactggaaacagcaacccgagtccttaggttgtttttttgtttttgtttttgtttttagagattaaagtcttgctctgcacccaggctggagtgcggtggtacaatcgtagctcgctgcagccttgaacttctggactcaagcaaacctcccatctcagcctccagagtagctgagaccacaggtgcataccaccacagccaactgattttaaaaaaaaatgtagagggctgggcayggtggctcacgcctgtaatcacagcactttgggaggctgaggcaggcagatcacttgaggtcaggagttcaagaccagcctggccaacatggcgaaacctcatctctactaaaaatacaaaaattagctaggcatggtgatgcatgcctgtagtcccagctactcaggaggctgaggcaggagaatcacttgaacccgggaggcggaggttgcagtgagccgatattgcaccactgcactcccacctgggtggcagagtgagactctgtctcaaaaaaaaaaaaactgtaaagatagggtcccagtgtgttggccaggctagtctcgaaatgctggcctcaagcaatcctccagctccagcctcacaaactgttcttaggtctttatttcctgacaagctaaggagccccagctctggttcccagaactgttccccagtttccccccagcctgccctctctggtccatgacttgtcaggcrgggaaaaagaaagactttgagcctaacagaggcaaggaggctattgcccagggatggtgaacaggccagctttggaatcagaccctgggctccagcctcagtctttccatatgtagaatagagatgatactagcatcccacattgacctctgttgagcattaaatgagaggacgtatggaaatgcttagcctggagcccagcacataggctagtattgttgtcgctattttcttgttactgtcagcatctgcccatcacccatgaacaatttcctgaagacccattttgtgaagtagttagtgtgttattccctagagatgtggagtgggctcatactctagtggcagagatggaagtattaataaacgaggatgctttggtgcaatagatgcttggaaggatgtctgtacagtggggacacagaaggctgtggcatattctattaaaagcagcaggagcacttttaatagacagggtaaaaagggcattccaggaggagggatcagcaggggctaaagctcagaacaagaacagttgaatgcactgggaaagctgtacatggaggagggggagcaggttttaatatccacaggccccacacccacgagctgtgaaaaaagtagkctgggtagaagacaatatggagtggtggagactgtggccaattggaaagggcttgatggctctaaagggaagtaggactctgctccatgcaattattaatatgaagagaagctggcctagtgttacctggtcttccaagttttccagagatgtcagggacccaggtttttatgtggaatctcttgacttcaaaacactgagccaacactgggaaaaccaaacagaatagaagggggctgccagtttgcagtcctagtttagacccaacagtggggcatgtggtggtaggtgatatgagaagctatggattccagactctgtgcagacaggcttgtgtctgatagctgggggccaagacctggcccacaagaagcacccaatcaatacttggtctgcagaggagttagggagtttggacttcatccggaaggttaggggagactgtgaggtttggggcagagaagtgaaacaatgggaagtgtgttgtatgactttagcccacctgccatgtggaggctggcttggagagaagagatggcagctagggaggtgggtggatgtcttaacagggctccaggcagaaggtgatggtgacctgggccatggctayggggtgagaggggaggagagatcctagaagggtcaaatttatgcagagattgacttggagagtgtgagggaggtgaggccaaggtgcctgccagctccctgacccacctgggtaactcagtggtgtttctcaccaagttggggcatctgggaggagaaaagtatggaggcagagggaggaggggtgataactctagcttggaccrtgttaagtttagatgcctgtgggactcccaagggaagacctgccacccagtcaaacatatatctctcaggggagggagggctgaagacagaatgatacctccaccctgactgggtcttaccctcctccagggacccaaaagaccttcatttcctttgtggttgctctgtcgtctgagagttaagtctatttattgggcttagatttgtttttttttcctggaaagactgaaggagaaggtggattgatatgtaatgccagaacgaagatctgtgaacacctcagctctgattcatttttcttagccctacccccgtgatctgggcagctgggggaggaggaacagagggtagagaacagctgggttaccggggccccacagtaaccacatcagtaaaatctcatttccaggagctaagtctgaactctgttatcatgaacgcttgcaagagggctcttacctgcacttgacagaagcaaaggctttgctaagcagattgacggtgtcacaagcccacttaggagagcaggcttttagcagcagcatttgcattccaacaatgagtgtgcaaattataaatgactacttctctatttttaaagcgattttaagactcctcatctgctgtcaagaatgtcactgaacataccaaggacactcacagcaatgctgtgatccttttgaaaagaaacgattctattagagaactgacgtgtatcgagcatctgccaaacacaccgggcaccgtgctaggcattttagaggcatcggctcatttaggcctctaccccagggggatgaagtcattattttcttaccaaggaaatgaagccaggcccagagaaggtgaactgctgctgtaggcttgctcagctcaagagggccggggtcaccagggctggatgcggggtctgagttcttcctgacacacctcatcatcgtttctcaccagttcaggtttctgcctcttggccagtggaaggatggccttaaatagggcttcacagccttgagagaacagaggggatgtgggagaaagtgaaagagagggtgctgagaagttaagaaaagaaggaggctcagttcagagagaagagaaatgaaacagccccaaaagtggaggaggagggaggctctgaggtgtggtaccaggtgtggcccagttcaaagcccagtttgccaggagctcaccttgggcaaatgctttatccacctgtgaagggtggagtttggcctccatgtcagtttccctccaacttcagtcatttgtttttatctgtaaacaacccacgcgattacccatttagtcttgttttcatcagttcaccattttacctgattatgttctctttaaaagaaactttttaatgcaattaagtggtttataatatcgcttgtcatcaacaggagctaagcattaaaataaatacaaagaaataaaaatcatcctatgattaaattccacctcgctgccgctgcctgagttctgctctgtgtctctctgttaggagggagaaggtcagaggtgttcaaggcacattaaccctgagccagttcttttctccctgagacaacctcccaagaatgaaaggatgcaggcaccatgtcctgactgtgtggcctgaaatcccttctctgagcatcatggtctaaggacacactctgtggaaagcgagggccagccgtcatcttagaaacttccacaacggcagagtctgggaaagtcccgggatgtgagcagcctgacaaggagaaaaaagggggtgaagagtgggtgggattccagaacagacccccacattctgtgaccaaaggagtgagaatttttcagtgctttctccattttgatgagggcagggagggggcagaggccagggcaggaagtggggagggggctccgagggggcttcaacccagcactgcctctggctgccaggagagccgctggagcctcagctcttcctctgcaggcgcggggaggacatcctgggccttcttcaccactgggcctcaggttgtccagggtcacgttcagggttaggcagcctggatccctttaatcccatattaatgaattatgtgcccaagagcaggcttagctggggggaaatgaagacaaataagaaagagggtagggaggagggccatggctggaagggacttgggggatggctcctagtggggctcccctcagccctgaactccaggggcctccatttgggccctgcccaagttctaaggtgtgggtctcccccatagctcttgctgatgtcaggtgtgagctgctgtgtgtacatgcaggctcctgggcgttcccctccccggggtccttccctgccaggctctggtgagccaccagtcttaatgaggaggtgcctgggggaagactgggagccagatatgtactaaatgactgagacagacagagaatgctaggttgaacaggtcttagagaccttctgactcactgttcctccacaatcaggggttcaaattatgacctccatttataaatgaggtaaccgaggcccagcaaggggagactctcacagccagcctggggcacagccaggccagatccaaggcctctgactcaggcaaggcctccctccccgtgttattcctccactcagggggttgaggctgaataagccacaattggagcctgtcccagggaccagccagtggctgccccccttattatgggcccaggactcagggtatgaccgaactggactcctctgtgccaattctgagtgttcctggagtgtcctggctcacgctgggcaccaatcatggcctctggggactccttcttcttttttgcctagagagtggccactctcctgccctttaccacacttggcacactatcccctctgtcctcagagattcttgagagatctcagcagggcaagcccgcaaggccggacctggtgcacagtaggctcacagacccacaggggtctcctggctggcaccctgtgcttcctggttttgtaggctccgagaatgtccaggtattggaagctggggtgttgctgggtggtgagtcacaaccatacacccgacctctttcccagggacttcttagtcttgccctgccccaaacacttcatctgggcttttgcctgaccgccatgtgttttctatggtcaaccccctcattccagctcatctccctccccatgccctcactcagccctctgcagggagggaaaaggttggttttctgggaagcaaggtgagtgatccccaggtgccctcaggacagttgcaggcaggctctcaactgggcagagggcccctgtgcaagccagagtcagcactgcygggccaggggcagggagggggcggcagatcccactgattaggaaccagagcaccagccccgtctggagtttgaaaccagaggcttgtgagtaaatccacggccaatgcctgtaagcagagccagttctcgccgtgaaagggccttttgttttaccccatggttcctgggtgaactgtgattccattttaattaaatatgcagctgctagggctgagcaagctgccctcaccctcagctccaggctggtagggggagatgacatagggtagatggaagtccgatgtctggactctgtccagccagaaaatggtgagcaaggggcgggcacagagcctgggggcaggtgactggctgccagtcagcaatgggttactactcagtgtggaggaatccactctgtaaggtgccagctctccttgggcatccagttaacggcacttctggggacacacttgggaaatgaaacccctaggccaagagaaagatattttctgattttacacaggcccagcaggggctcagggcagagctagtagagggcagtgcaggggtgtggcccccatggccccccaccagccccagcccctctgctctccaatactgtgctcctaccacctggtggtttcttgcacagaaatggtgcactgttcagcaaggcggtacagatgaaactctgaattgaaaggcctgtgggaaagcctagcacaagctacctctcccaccttccccttggttctgtgttatctcaaatgtcttcttctcaaagaagccctccagaatccaggtaatcgccttccaccccacgtactacgttcctcctccatcaaaaatgatcttgtttatccatttgaattcttgcctgccgccccaccccccacccccttatagaacacgagctccattccatgagcacagggctttatttttctcatgcagttctggcacagatcacgtactcagtcacggttgaatgaatacacttaggtaatacgtgggggcaaagactccacctaaaaatgtgacctaatttcatggtgtcaaagtccactgtgaactccacgttgctggagcttgtccagttgggagaggttcccygagcccctgtcagattcggtggcgggcccatgctggacastgctgagggtacagaaatgaagctggcgccatgcctgccctccaggggctctcaatccaggtgaaagacattaaattagagtgcactgggagaacaaggtgatgtgggggctggagggagcccctgcagggaggggaaagcttcctagtgaagaggagggtccgggagcatgagcaggagtctacctgggacagaagagccaaaggtggagtgctcaggagggcgaggccaattctgggaaccaatggcgagaagcagtggaaacaggtgaagcccaggggtgtggggtaggcggagacctgtcaaacccacacccagcctccagattttgttctgaaggccgtgggtagctactgaaggttattcagcaggggcagggagctgcctgagctacatgtttgagtctcctctgctagcctcacagagtgtggactaaggccccagggattcagggcttgcttccgctccccctgggaaaatggaatatgatcctgggcactgggtccctctctgaagccaattgttactgcaggcctgggcagagggccggggcagtaacacagggcaggtgggatcacttacctgttatcagatatgcttttccctgaaggggataaaataaacgtcttattagatccatggctgagagaacaggtgccacatctgtgtcctcttggtgtgtgctccaggccggggactgcatgcaggtcatcaaccctgctcagttgtttctaggattgagaagctaccttggaaatgccctcctcttggttaaatgcatttatgcagtcaatcagcaaacatttattccgtgcagactcaggtttccatgtgtttgctcgcttccttgtttactttgatctactcaaccagagatactcctagagcttaagtaggtgtggggagtgcagggatgaaagctcaaaggtaagaagccgtctagagtaagttgtggaggaagttgagggtcattcattttaaatccctgtagcctcagggtggcattctctttttctcaggagcgtgcatggttgggaggcgtagaagccacacttctttgtattccctccaaattttgtcacttaagaacacaaagcttgtgacattaggctacatgtataacttgtgtcatccttcttaatcttggtaacaaccaatgaaagtactgtaattacctccacttcacaggtgagtaaactgaggcacagttgacgttaagccatttgctcaagggcacacagtttggaagcagagaaactggaatttgaacccagggactctggcccttacatcctgtttttaatcactacggagttaccacgttcttcacatacccctgcagcaagcttcatttacctcaaattatgctcagttcacttctttgtgaggcctttctggaatacctctcagagaatcctgtcccttccctgaattcccatgagacttttgtgttctgaggggtcttttccygtttgtctcatcacttaccttcccctgatatctgcctttgagcagaaactgtgttgtccatgttcctgccccccagtagcccaacttggagtttaatccagcatcctgttcaaatcggctcccgaaatgtgatgtttacccaatagatgatgtcatcttccaatttaatccttgtcatgtccttttgaggggtggtagcttgagggccatttaacagaggaggtgaccaaggctcaaaggcttcaggacgatggcaacaataaaaaacaaactgcagcagctgaaatgtatgtagagtttacttatatgcaatagatactattattgttgttttctttcagcaaatgtggaaactgaggcacagagctttgccataagttatcagaggtcacagctagcaagaggtagaaccgagattcaaacccactaagtctggctccagacctgacattctgaaccatttcactcagctgccacacagctggctataggggtgagggggcacttggcaaatatttggggatggcttgatggccagttactcgtccctcctttagctctgctcgtggtttcctccttctttccttcttaacctaggggctcctcctaacttccctgccatgcctgcaactccctgtagaaggggccgatggaagtcctgasacactgtgcctgtgtgtgtgcctctgtgcctgtgtgtatgtgcctctgtgtgtgtgtgcctaggtgcctgtgcctgtgtgtgtgcctgtgtgtgtgcctatgtgtctgtgtgtctgtgcctgtgtgtgtgtacctgtgtgtgtgcctgtgcctgtgtctgtgtgtgtgcctgtgggtatgtgcctctgtgtgtgtgtgcctaggttcctgtgcctgtgtgtgtatgtctgtgtgcctgtgcctgtgtgcgtgcctgtgtgtatgtgcctgtgtgtacctgtttgcctgtgcatgtgtgtgtgcgtgtatgtgtgactgtgcctgtgtgcctgtgtgtgtgtgtgtgtgtgtggccctgtgtgtgtgcgcacctgtgtgtgtctgggtgtgtgcctgtgtgcgtgtgtgcctgtgtgcgtgtgcacctgcgtgtgcgtgtgcctgtgtgtgtgcacgcgtactcgcctgtggtgtgccacgtgccctggtttgctaagaattcctcatagagagtgtgcctgggggaagccacacacatcagagctctctctggctccctgcagcctccttcgtttgggaaagattttcttgactgtgtgtttctcccatccctgagctgctgctggcagctggctgtagagttttcatcttaaaggacagagagaagtggcccttcagaataatttgagcccctcttcaggaaaccctggttctcttttgaaactaagccagggaggagcaaacgccaaggaattcacaatcctgtctgggactttytgttttcctctttgaagaaatatgagcttttttgattgctactaaagtgatgcttaaccgttctacagtgacagcttctccctctgcatctgttatatggggcatgctactaaaaatgttctaagaactttgatttcaaagccttggcatctcccttgaagaaatcagagacacattgaagacatgcaaaattaaatttgtggtcactgcatgagaccggttacgaagttcattccttcagcaaacatttattaagtgtctacactgcacatgatgctggaaagacagtgatgttcatacccacagagtccctgccctcatagaactttggttctaaataggagagaaagaaaatgcactactaaatcaactcagttgtttcagtttgccatgaacagatccctcccacctcgacctggaagccattgaagggctggggtcttctgctttaaatgggtctttaaggtgctggcaggcgtctgtgctgggaaggataaagagcaaggttgatgtggtttagtgaacagaggctacttagcttgggtagtcagggagggcctctctgcagaggggacctttgagctgagagctgagtgrcaagcrggcagcttacaaagatctgagaggagagaattccaggcagaggacccagtcagtgaaaagtgccaagttgggaatgaacgtggtgggttcgaggagcagcagggagcttgatgtggctagagtatggtgctcaaaggggacagcaataagagacgaggtcagattgctgggcaggggtcagttcacatagagccttgtaggctayggaaaggagtttggattttattccattaagcaatcttcatttgtgtcgattaacaaatgatgtttgaatcctgaaaatgtgatggagtatggtcatatttacaggtggctctcaaaacaaaatttccaagcatcaagtaaacataattaagataaatgtaatatgcttaatggaaggcaatgtggtctgtttatatgagatgtggcaacttggtataatgatcaccagggtttaagtttcagctctgagatttcttagctgtgtgactttggacaggtcatctactatttttgagcctctgtttccttatctgcaccgtgagggtaatagtttatttacagggctgttgtgaagatggaaaatgataatgccacaaataattattttataaactggtgggatgsagctggaaacgtgtattattccactgagaactcttcactaaggtacaccttactaattaggaccttagattgcacctagaagaggagatgcccactggaatatctaagaagactaacaccccgcttcatgacctgagaacctccagcacgcctccttccccaaaaggcccccagacatctgacagtgtcctgtaactaaaggcccacttacagcagcagatgctagcccttcaacggcttccgggttggagtgggagggatctgtccagtgtgggcctatgagaatctaggaatgcactgcggtcagcatcytggagccaatcaactcagaggcacctggagctatccaaggtcctgatcagctgggggctcccgaaatattgcagttaactttgaattggtctgtctccgattgcattggtcttcgaattgatggtggttgctgcatctggactgagtgtgagtatctgggaaaataactgcatttgatatcaggcagacctaagttaaaayctctaaccagctggtgaccttaaccgcttacgcctccatttcctcatctataaaatgggggtgatgatacctctttctttttgcctgtgtggattaatgagctaaaaaattgaagtaatctaataaaatgccagacaaatatagatgctaattaaatagacgtgtttcttttattattattattattattatattattatactttaagttctagggtacatgtgcacaacgtgcaggtttgttacatatgtatacatgtgccatgttggtgtgctgcacccattaactcgtcatttacattaggtatatcgcctaatgctatccctcccccctccccmcaccccacaacaggccccggtgtgtgatgtcccccttcctgtgtccaagtgttctcattgttcaattcccacctgtgagtgagaacatgcaatgtttggttttttgtccttgcgatagtttgctgggaatgatggtttccagcttcatccatgtccctacaaaggacatgaactcatcattttttatggctgcatagtattccatggtgtatatgtgccacgttttcttaatccagcctatcatttttgggcatttgggttggttccaagtctttgctattgtgaatagtgccacaataaatgtaagtgtgcatgtgtctttagagcagcatgatttataatcttttgggtatatacccagtaatgggatggctgggtcaaatggtatttctagttctagatccctgaggaatcaccacactgtcttccacaatggttgaaccagtttacactcccaccaacagtgtaaaagtgttcctatttctccacatcctctccagcatctgttgtttcctgactttttaatgaacgccattctaactggtgtgagatggtatctcattgtggttttgatttgcatttctctgatggccagtgatgatgagcattttttcatgtgtctgttggctgcataaatgtcttcttttgagaagtgtctgttcatatcctccgcccacttgttgatggagttgtttgkttttttttcttgtaaatttgtttgagttctttgtagattctgggtattagccctttgtcagatgagtagattgcaaaaattttctcccattctgtaggttgcctgttcactctgacggtagtttcttttgctgtgcagaagttctttagtttaattagatcccatttgtcaattttggcttttgttgccattgcttttggagttttagacatgaagtccttgcccatgcctatgtcctgaatggtattgcctaggttttcttctagggtttttatggttttaggtctaacatttaagtctttaatccatcktgaattaatttttgtataaggtgtaaggaagggatccagtttcagctttctacatatggctagccagttttcccagcaccatttgttaagtagggaatcaaatagacatgtttctgcacagacagtcaactctcagagacagcctgttctaggccggggtattggtaatgagagcatggactctggagtccctcaaacctagttcaaattccagctctgttttctcatggctgtgaatgacttaaccaccctaagactcagtttttcatctgtgaaattgggctaatactgcagacttagtagggtttaagaactagaatttagtaagtgcccaatggagacttatggattttgatttatttttcaggtgaccttccctttcattttcttttaaaaatagaattgaatttgaaatccatctctaacctgatagcaggtttatgatgcttccctgagacccattagaagagatagcaaatgggctgggcgtggtggttcacgcctgtattcccagcactttgggaggtcaaggcaggtggattgcttgagcccagaagtttgggacaagtctgggcaacatggaaaaacctcatctctacaaaaattacaaaaattagccaggcgtggtggtggtgcatacctgtagtcccagctactcaggaggctgaggtgggaggattgattgagcccaggaggtcgaggctgcagtgagccatgattgtgccactgcactccagcctgggcaacagagctagatcctgtcccaaaaaaagttgggagaggggacagtaaatggaagcaaacagtcatattccagggtggcagtgggaaatgaaatgaaaactaacttgtgtttgggttgagcagacagggccactgtgggagcaccatcactctcaggagaggtggaagtggtgtggccgtgggtgtttcatgttcatgattacaagacaaagatccattcttagaagggacaaggccctggagatatgggaggaaaaaaaatgtctgcaaggtttattactcaagtttccattttcaaggggaaataagaaggacattctgggcctttgcatgcctggaacttttccaacagaaaagcacaaacctgggatgggcagagtctctgtggggcagagaggaagggccatgggtgtgggagtcccccaggcttggcctctgatccctgctccaccacataggtgagtgactttatttatgtttgacttataattatacataatttcaaacatattgaaaaaatcttgtcaaatctctctgccatccacttcccttctttttgtattatttgcctctattgagtattcactcaatactattaagtattcacctctcttagtcctggcctcctaagctgaaaatcagggatgatagagatactgaaagcactaggaagatgcaggaagagaaggatcaagtccttaccatggctgttctccatatctgtgagttccttcttcttcccaaccttccacatggttgagccctggaccagtgcaggcctcagatctccttctccaccttgaggtcctctgatctgcttcctgctcaaatttggcctctgcatgcacacccaccttctagaacttgacccctattaattctagatgccccttacctttgggtatcttgtctcagtccctgtggtctgccctgatccctggctgatgaagatgccctggaattgaaggtcaggaattgaaggtcaggaaacatggatttctatggcactacttaaatggccttcagcagtgcaagcctaagctccctcrtctgggatcggaccaatttggtgttataaagtgctttccaaacttgaaccatcgaggctgttagaattcttggcattatagttattcatcccttttgaagcaagcattataggagaggattayagccattgaggaaaacagaaattgagcaataagagaagctgagatcaaggaaaggcgtgtttttaagacaggtgagcacatgccatgcttggaagtggtggatccatggatccactgagtgatccagtggagaggagcatgagggrtgatttgagggggagagagmagggcgccacagtggtgagctctgtgcaaggctttgctctcagtgacctctggcctcagaggccatgggggtcagcwagtgtgtttgaacctgatcattaaatcagcaggaccattggagagttttgagcatggggttggtgcctgctgtatggaggacagattgatgagggcaagtccacttgaggaggcccacagagtgcgttgtggaacatgcaagtgaagggggctgtgtgtgcactgcactgaatccccagtgcctgcatggactaatgagtcaattacacattcacagaagacctgtttacagtgcctcagggacgtctactggggagggycattcatggtggaaaatccaagacatcttcctctcagaagggtgagttgacttaggggtcaccagcactgtagttattccagttgtaggcaagcaggggattgctgagataaagcgcatgtagaccaggagttataagctcacatacctacarggacagggcacggggacaagaaggtgctttggagccttcagtaggaagtcctcacctggtgtcaccactccccagcttgtaaagtgtggggactaggaggtcagggagcccaggagctgagccttgtgtcagtggacatgaacagctggcctttgaaacttggtcctcagttcccaagtcttgaaggcacatgcacgggtgcacatgcttcaggctcttcctccacgctgatgttgtgagcacaactggcctccttcctcttcaagggttttattaggcagggagagtgccttggggcaggagaacccacagaaatccattgctcccatggccctgggtggccactgagagcagtcttccactaagaacgacgcagagtgaatccaagagcagctgtgcctctttcttcacattggaggggaaaggctgggctgtcatgcaggggaggcaggcacctgccagccctaggcaacccacaggaggaagaaatggcccaggaggtggccctggagccttcagcgaggctgaaggacactctagaaggcttttgttctattttttaaaattaagaaataattttcatacagtaaaacatacttttagcgtacaggtctgtgaattctgacaaatgcatacagttgtataactaccaccctaatcaaggcacagagcagttccattaccccccaaatttacccctcgtcactttgtggtcaacccttttccctcctccaaatccctggcaaccactgatttacagatttgccttttccataataccattgaaaaattgaatcatatcaaaaatcatatcatatcartgtaagctttgggccttccttctgtcaacacagtggctggagatccaattgcatgtatcatagtcccttgctttttcttgctgagtagcgtccatgggagggatgcaccagaggtagtttatccattcatctcatcgtccattgagagacattaggattgttttcagtttggggaaatgatgaatagagacactttatttttttgtttgaaataagtttttgtttcttttgggtaaatgcctaggggtggggttgctgaattatgtggtaggtttatgtcacaccttataagaaactgcacaaactctttttcagagtaggcattgcrattttactttcccaccagcagcagatgagagctccagtggttccacatcctcacccacacttgggattgttggcagtgtttattcrttctcattattactttagccattctgacaggtgttaggaactttactaagtacctcacaagtgctgggcactgaactaagtgctctttgcacatgatttcatcaagggctgggtctatgatcccatttggaaaactgaggcccacaagagtttctgagatcctgtgggacaagggctggtcctgtgtttggaaacttgattgcctgatccaaagcagaccctgtcccacagcgccattcttcagggacagcattaacatatacttgcatcgcagcggaactgcgtttggcaacaggctcatctcttccagtgttctaacacgcttctcagcacaaccatttctaccctgtctcctctggtggtctgtaagccctctttggggctgtaccttagtcatctctatatctccaggcctgggaaacactcaacaaaagtttactaatgaacttactaatgagcaagcctgtagagagaccaaatcctatagtgggtctctagccttctaggactctgacagcctctctgggccactccatttatcccctagagtggggatgggcaaatgggagtggctggagttcaggaggaccaggccatgtgttgctctgccagcaagatctcaaaggaggcccaccctgacccatccccacctacaggtccaggtcctcccagtgactggagtcccagagtcagatgcatccctacccaggtgtgtgaactttgtccccttcttgccgcccgcccagtttatgcccttaaaagatgtcgggatctgggaaccttgataccagccccagattcctcctaatatctaacacacaggctcacgcagcactgccagccgcagacaactctctttgaatccagatggacttaaatataaaagggaggctatttccagttggatctatttctagttcttttcttcttgaatttccagtcacttaacctctctgagccacactttcttcgtctgtaaaaatgggcataaaaagcatctctacctcttaagattgtggtagagactccgtgaaatagtgcccgtcaatcactcagcaagggagccccagaggaagtgctgagtgggtgctgggtgagagatacgtgggttgagatcctttcctccagagatccatgcttccstccattmtggtggatactggtggagtcaggctggatgatgcyggcccagagataggcagaggaggtgatgtgctcttgtttttgcctttgaagcagagtcaggtgtatggcctcagtgcccggccgtggaactgctgctgtgaattgtggaccaggttgccatcagaaggcatctagggatgtggaaggggttcacaaatattggtgagtgcccactgctgggcactcaagacagcatacagtatgactgatcctttacaaatattccctctcctcctctagaccagcaagtctcaataaggtgacttttgcccacccttacccctagggacatttggcaatgtctagagacatttgaccatcatgactagagaggtgctgctggcatccagcgagtaaaggccaacgcacagggcagccccatatcaagaattttctagccctaaatgtcaactgcacagtaagatcccagtgctgagcacagcacctgaaatacggtgaacatgtgataactaatatytgaatgaatgaatttgcaaaaatacattctatccatgaataagtaaaatccacgagagaatactcctcagtgtactagtggcacggggaaattgctgaaggttcttattttcctctttttwaaaaattctcactatggatttgtattgcttatataataaaacttttatttaaaggaggaaaactcagaataacattaggaagacataaaatgtgaactgagtatatacagcaaccaaattcattcacttaaccaatattattgatctctggctatttgccagccttgtttctacgcactaagagcatgacagtgagaaacaaacaaacaaacaaacaaacaaaaaaaccagaaacacttgctttcttggagcttatgttctagcaaaagaagacaatgaagaattaaactaggcccagcgcggtggctcatgcctgtaatccctgcactttggaaggccaaggcaggtagatcacttgaggtcaagtgttcgagatcagcctggccaacatggtgagaccctctctctactaaaaatacaaaaattagctgggtgtggtggcatgcacctgtaatcccagctactcaggaggctgaggcaggagattcacttgaaccagggaggcaaaggttcaagatcgaaccactgcactccagcctgggtgacagtgtgagattctgtttcaaaaaataaataaataaaaataaattaattaaataaaacaactaaacaaccctgtctctttatatatatacatatatattgagacatatatacatatatattgagacagggtctcattttgtcacccaggctggagtgcaggggtatgatcacggctcactgcactctggacctcctgggctcagctggttctcccacctcaggctccttagtagctgggactacagatatgtgccaccacacacagctaattttttgttttgtttttgtttttttgtagctatggggttttgccgtgttgcccaggttgatctctaactcctggactcaagcaacctacctgccttggcatcccaaagtactgggattacaggctatgatatttataacacaatagattatctggtggtgctaagtgtgtgaggtaaactcactcaaggtcagggcgagatgtgaggcagagatggggaggactgtgtagctggccaggggagagcccactgaggaggtgccatgtgagcagggaccggagcagagctgggcagtggggtgtgacaaagggactcagtctggatgccacatgtgtttaagcaaaatgtgcaccaccttctctggaaggtctccatcaagctttgaggaatggcaggagttcttgctttggaaatgcaatccatccagatgctccctctcacccctctgaggagaggctggtggcatgtttctaagctgtgcctccttctgagaaggggccagaaggatgcacatccatttaaagatgagatcctcaggggtaaaagcaaagattctctcgaggaacctcagaggttctccccctggggagacagactagtgccaaatcccatcacttctcctctgcctcacatccctagtcactctctctactggccttctttctgtctctaccacttccaagctgtgtgactttgggaaggttgtttaaacttctgagcctcagtttgctcatctgcaaaacggcaaaagtaagatctgcctcttgggatgatggagactcagatgagatgacccaaggaaagctcctggcctggagcctggcacctcaggtgctggcagggtccccttcctttctcctctcctctgctcccagcatccttctctcatccttgctgatgacttgagctaagggccccaggttacagatgtgggacaatggagtctccaatgccacttttttcaatcatgacagagcaaggacataactgggtaaaaatgatgacatcatggcttcggtcagaagtaaacaaataccactatttatctcctctaaaaatatctttgactaataaaaatgaccactaaggggacagcactataggatggaacacacaggctgggcaaaggcagggagraagtcagtatgtcagaaamtgttattgaaaacctactatttgccaggcaaggttctagattggagataggagatagcccatggttaaacagagagtttggagagtctaggttctcatgtagcttatattctagtgacagaayagagggaacacgaaagcaaatagagaagttagttttgagggcactaccaaacagtgtgatgtgatggaaaatgacgaggggaaaagcattagggagggaggtaagggaaagcctttggcagaggagccctggagctgagctctgaatcacagagggaggtagacacacatctcagggaacatgtttcaggtagagggaatggtgagtgcagaggccccaagcaggaacaaacttgcatgttggtgagacagaaagaaggccagtagagagagtgactagggaaggtgaggcacaggagaagctgcagagatgggtagagtcgggtcttgcaggtcagcgaatggagctctcactggatcttttttttttttttttttttttttcagacggagtctcgctctgtcgcccaggctggagtgcagtggcatgatcttggctcactgcaagttccgcctcccgggttcacgccattctcctgcctcagcctctgagtagctgggactacaggcgcccaccatcacacccagctaactttttgtatttttagtagagatggggtttcacctggttagccaggatggtctcgatctcctgacctcgtgatcctccagcctcggcctcccaaagctgggattataggtgtgagccaccctgcccggcctctcactggatcttaattacagtgcaaaccattggagaagtttgatcagaggtgtggcgtgacctgtgctttggaatgatccatctggctgctctgtgggatccaggctacagcagggcaggtgtgtgagccagagagagttgccggcatccagaccagaggtgatggcagcttggacctgggtgtggcaggggaggaggaggaagagatccaattcaggatctatttggagacagyaccagcaagacttgtggatgggtgcaaggcatgcagaaacagaggggtctaagagagcttcctggattttgtctcaacaactgggaagatagtggccatttgctaaagtgggaaacccagaggaagaaaaggctaaaccaggtgaaattgtgttatgcttgggatgcctgttagatatcccacagtgacacgagtaagcaggtgggtatttgtgtgtggaatcaggaatgagtgctgggaagtggtggagtgggaagttaggtccttagcattgctcagaagtggaaaataattaaggagttaaggcaggaagttcagggaatgcagcttctgcaagcagtggctgggaggatattacgtgaatatcagtcacgagcaaaatgtccctttccctctggaaagagcgggcagctcagctctgtggacattcgggactgtgacctgtgcttctccagtacatgcagttcaccaccaggtacagaagcgcccatgggtgtgaggatgcacctacagagatccagggtggcacctgtagagcctccatggttgtgtggggacacttgtgggctgggtcaggccaccaggaagggaacaagaaagttcccaaggtaaagccctctctgaactcaaacttcatgtcccaggggattagctggactccaggtgttcccgctgccttgcaggaaatgcctccatagcctcatcccctgcctgttctcctggtccccattcctgccaagctggcctctgcctccctcctctgtgttcttgccttccctgagctttcccgcagcccctgcctctgccccctcccaccccatctccaccygggcagctcctgctctgcctcaagtccaagcggaaagctctcttcctcgcaagtttctttggcttaataaccaccatcccttcagactgtcccttgcaggagggcagcggctgtgtctgccttgcttgccacgatgttcctagggcccagcaagcagcaggcacctggccagcgattactgccttgaatttgccaaggagctgctgtcagggtcctgggcacagctgctttgtttgctttccagtatttgctgagttgtttctgatggcgggagatcagtgtcccatgtaactctctcccagccccatgacaagacactgagcttttgcatttgtattggccccttgcagtgggaaacagggtgcaaccggcagtcagaagacccaggtcagtcygaacccaccagagacatcctgttcatcccatgacatcctaaggcctcactttcctcatctgtaaattgggagtcattaattccctcacagcagggattaaatggatcacacttgcaaagttgtcctacgttcatgaagtatatttaaaacaacttgcatcttttgcagtcagccacctcaaatgagagattcctgaatgaaatatgcaatcagggcacggatcctaagatcccagcactctcccactgggtgagtgagagaggtcscaggtaaaggatctatacctgctcaggctaggacaaacagggcttagggtcaaggaaccagcttttcctttataaggcactgtttggatatagtgcaagctaggtggaatactccacaggcactttattgggagttggggaagtactgaaagaaataatgtgttcatgggcaggctctcttgtttttgttgttccctaaacacttggacatcaacatttcactgcaactgcaagcatcacacagaatgcaatccttccaagccaygggacttctaggtgtcagagccaagatatcacagcctctttgcaagggcttcaagatgctgcacagtctaaatcatatcatgtactccttttgcccaacagttgagcaaaccgaggtcgtgatgacaaatgcacaagaatcttctgaaagaaagcaaatgcaggaagcaggtgcctgatttaaaaacaagcaaactttarttagagattgagggcctgctgctgacatggaagttcagctgggttttatgactagtcattaaacatttactaagtacctactctgtgctgagcacggtgccaggacagaactgccagggtaagcaatctatgctgctggtagatgcagaatgcatggtaccagctggagccatgtggtgtggctgcccttggtgtcttgtgtggtctgacctgcctctttctccctctgactcccagacagtcctctggtagcccatcacaatccagggccctgcccttstcttagatcaccaggctcagccccctctgggactctacacttaccgttccctctgcctccagcacacttcccagatcttactggctcctccctctcattccattctcagctcaaacatcaccttctctgaggagaggccctcactgcccaactgcagaccttctgccccaaccacacgtgcaggattctctctaccccacttatttaattttctccaaagcacatataattctgcaatgatctcgatagtttattcatctctgtgttcatcatctgtctccccactggaacgtcagtccgagagtccatccctggatgggcacagtgcaggcaggtatcaggtgtccctgtgtgttgttgaaagaaagatgtagaatgtctccttgaggaccctcagtccagagagaaccagacagaacaatggccgtcaacttgggggttgaatcaacaacttgcaaggtctgtctccaactctcagccacggataccctcagcagcccctgcagcaattctggccaacacscccagatccccggtccccccaagaaacaacgaccccaaaactaaggatttctccctggacctggctgccacacaatgctgctttggaacagggaaggtatttttaaatgttcttgcaagcgccaaagtatgtctcgttaaaaataagatttgtgttcattgaaatgcggttcaggctcacctctctgcctcagtgttaaaattaaccacattgtgcgcccagcaaattccgaccagtgtgggaatcatttggggcgaaaaagttgggagctgatatttgctgaacttggatcttatttgtgctctgtgtttacctaacaaatccttctctagcacttactctgtgccaggcactgttcgatctgctttgcaaatatcaatgccttcaaccctcacacaagcccatgatgctccccgttttacagatgaggaaattgaggctcagaaagttaaatcacttgaccagggtcagatggattgtgcccttggaggagttttttccaacattttggctrtagggaagaccttgtttctaaccrgccctacaaaaagctatgcactttcacttatgtcctttttagggaattcagaattccttgcgrtgcctagtgaggaattttctgcagcatttcccttctcctcctgcctgtggacttggcagcctcttgggaccctgtggatgaatcgcccacaaacatcatttttggagtctttctgcagttcctcatcactgtggctgtgggccagcgctccccggctggctcgtgcccctgccttgccccagttctctggccaacccttctggatttcctttgtgggctcttccagatctctcatcttaccatccccaccatccagctaaatctcctctccctgaatgactcagctcagattctgcctcttcccagagccttgtggggctcctctggccccatttaccctcatcttcagaacttctcttctcttgcacttgtggaatctacttgcattgtgcaagctagtcctgttgtgtttgcaatagaatctgttgcagaatgtggggacatggcatggtggattcaaatcctggccctgctgcctactggttgcatgaccttgggcaagtgccatcatctttgggcttcaatttccacatccataaaatgggcagaacagtagtccccaagctcctgtagggttgttgtgaaaatgtgacaaaataatacatgtaaagtctcatagcctgtacttaatctatgacgggggtcagcaaatttctgtaagaggccagattacatatttcaggccttgcaagttagatgacttctgtcgcaatgattcaactttgctatataatatgtgaaaacggccatggatacacacaaatgaatatgactgtattcaaataaaactttacttacaagaagcaattgaagcctgatgtggccacaggctgtggttgggccagcacctggtctgtggagaaacctatgtgatctctgaaatgctataaaagatcagagaagagagagttctcgccccactcccaggcatgaaagtttctgtgaagaagaacaaggcgtgggagcagggagacagggagggggaggcagggaggaggggctgcggacagggataaggcccaaagatgaggaagcagaggagggtggtaggggaggagccgcactgagcattttgcaggggtatcgtgggaagggccggaggtgtcggttgggaccaggccaagctgaccttacaygccaccctcatccacagaatcactgcttcctttatgtaacaagtatttgctgagcacctgctctatgccacacactgttctgtgtgctgaggccacaagaagagcaagacacacagaaacccctgccctcataagagcttcggttccagtggagcagggaaactgagacccagagaggctaatgactcccccagagtcatgtagctggtacacaagtgttctttggtttttagagtattccgcgtttcctattgatatattaagatgagcacaggatttggggtcacactgascaggacttgagtctcgttcccctgccatccagccctgtcacctgttctgagcctcagttcctctgcctatacatggcccgtgatccacactccccctgttgatgtaggatgaccggaagagtggctgtcagtgggtgggacctcagcctatccctgccattagagcccctggatcactgcattctgaatcccttgggcctctctgtgaccagggtgctcagaacttccacctgccaggaggcgttagaaacttttttgagccaaatggagtcacttgtgctacattcatggaaggggaaactgtggggcggcactttgaggcccaccttctgggtctgtttctttgttttgttttgttttgttttgttttgttttgttttgttttgttttgttttcaagacggagtctcgctctgttgcccaggctggagtgcagtggcatgatctcagctcactgcaacctctgcctgccaggttcaagtgattctcctacctcagcctcccaagtaactgggattacaggcattcactaccatgcctggctaatttttgtattttttagtagagacagggttttgccattttggccaggctggtctcgaactcctgacctcaggtgctctgcccgcctcgacctcccaaagtgctggagttacaggtgtgcaccaccatgcccagctaattattgtatttttagtagagatgggggtttcaccatgttagccaggctgctcttgaactcctgacctcaggggatctacctgccttggcctcccaaagtgctgggattacaggcgtgagccaccgcactgggcccttctcagtctgtttmtaagtgaagggcagctgcacagaccccaccttggccactcaggaggcgagccctgttctgggcacatttgcagcatcatctccacgagctgcaagctcattattcccattttacagagcaagaagctgaggcccaagagaatgagaggtgcctcccctacaaaacttcaacttatctttagcaatcgttggttgagcatccactatgagcaggactcatggtcttctttagtaccattctcagaacttccctgggaggtaggcctggtcctccccatccctcccacatggcttaatctttctttctctcattgagtaaaactgcacagtacaatgagcaaatctcaagtgcactcctgggtgaatttttacctctgtttctacatgcatgaccaatacccagatccagctgtagcacgttgccacctccccaggaggccaccgcyccttcccagtggatccctccttgccctccagaggagaccactgctctgaccattaccacggtagattagtttcacctactctggaacctcatataaatggaatcgcatggtgtgttctcttcctgcctggcttatttcactcaacattgtgagattcatccatcacccatgtgctccaggtatcaatggtccattcattttcagagccgtgtagtatttcattgtcagactacatcacaagttgttcatctgttctcttgtgggtgggcatttgggttgtttccagtcttaagctatagtgaattaagtctctatgaatatctgtgtataagtctttggtggtcatatacatatatatgtttttctttttgttttttttttttgagatggactctctctctgtcacccaggctggagtgcagtggcgagatctcggctaactgcaacctccacctcctgggttcaagcaattctcctgcctcaacctcccgagtaggtgggactacaggcacgtgccaccacacctggttaattttttgtattttttttagtagaaacgggatttcaccatgttagccaggatgatctcgatctcctatatatttttatttctcttatgtggagtgggattgctgggccatagggtaggtgtaggttttgctttacttgaaactaccaaaactttttccaaaatggctgttccatttcacactcccaccagcaacgtatgagagcctctgttgctccatgtttccagcaacacttgatacagtcagtcattataggtttcgccactatggtaggtgtgtgatcatacccattacatagaagcagaaactgagcctcagagatgctgagccccttgccctggaatctagggcctagatcacagggttactgaagacagagtagagacttggactctgggattctggatttcgggactgtgtcacagccacagttagagtcatggagctcatggacagaatcagaatataagcaatagttattagtgttttctgcacaggaagtggatggttgaaaaccatcagcagcagtgttggaccaggctgctggtctgtggactctcagctcagtgctcatcctcctctggcacagtgcctcgggttccctctggcatccccagggagatcccaggttccccrgtaaccctgccattccgagtcacgctgccgggaatgcatccccatgagcttgccaagaaagattgttcttttgggagctggcaggacaccatctacattgtgcagcccagggccttctctgagtccccctcccaggggttttctgtccccaaaggcactgattgttcctctcaggaaaacaacccgttctgaggttgggagattaatgaggatgatggagcttcaggagactcctgcttggccctggcccagccgatggtttctgcagccctgggatcccctgatggccttggggattaaagctgaggaagaggacaccaaaagtctgagatcctataccagctctgctcctgtcttgccgggtgacactgggaaagttacctcctatctctgaactcttgccactttccataaatggaaagactagatgagaagccaggaatctcagccagtgtctggaaccccagagcctcccaagattccctatggcaacttggcggttttgccacacctgttggcctcccagcctagtgattctcaagtcctaaggtgaatgtgattctccaggaatcctgctaactgcagattccagctcagtagatctggaatgggatctcagtgcctggacttccatcaagttcctaggtgacaatgaggctgctggcccaaggaccatacccaggcagcttcttttttttttttttttttttttgacacagagtctcactctgtcacccaggctggagtgcagtggtgatcttggctcactgcaacctccgcctcccaggttcaagcaattctcctgcctcagcctcccgagtagctgggactacaggcacccgccaccataccaggctaattttagtagagacggggtttcaccatattgaccaggctggtctcgaattcctgaccttgtgatccgcccaccttggcctcccaaagtgctgggattacagacgtgagccaccgcgcccggccccagcttcttatattgtcctgaagacagcctcccacgttatgccaagctcgtcattccctccagctcttcaaaaggactctggacctttaaataatcattctgagccaggtgtggtggctcatggctgtaatcccagcaatttgggaggccgaggcaggaggattacttgaggccaggagttgaagaccagcctggggaatatagtgagaccccatctctacaaacaatttaaaaattagccgggaaaggtggcaccacacctgtagtttcagctactmagaagacaggtgggaggattgattgagcccaggaggttgatgctgcagtgagccatgatgataccactgcactccagcctgggcaacagagcaagatgatgtctcaaaaaataacaataataataagaacaatcattctgattgagctcagtgttcaccgtacactcggcctaagcagcctgagtgagaagggaagcctcggagtgtggagtgaggccgcaggagaagcatgctcatgcctgcaaggacgttctgccgagtgtgcgcaggacatcctcggccctgccctttttctggtgccaggtccatccacrggggcagtcagcacaggggctaaggcatctggaggcctggacacctccagtcagcaaacctggctttgtaactttgctctgccagcaactagctgtagggcctaggcaaagccccagcttcgccatgtgtgaaatgaacacgttagcagcrtttgcggtacagggtcattgtgcaggggagtgaggccatccatgccaagtgcttgttaagggccacgcatccctggacatgagggacaattttaaggtttcctatcttgctcagaactgaacacatggggtctctaaggcccagattttggacagtttccagaagwcagattctccctcaaataactagcgcttctctaggttatcctagaagcccatagatttgggcaaaactcccaaatgcagccctacatagagcctccctgccagcacaacttccctcagacaccagagacaacagagggctgccagccagcagcccaggggaaattctcctctccaggtattggtgyttttatgcacatttctcatcctctctaccccagacataacctagcatgcatgagctgccagctaagtcttctcaagtcagtgtccacctatcactgcccctgctcaagagccttccatagctcccataagtgtgtagttcagcagcattaaatatattcacatcattgtgcaaccatcaccactatccatctccacaaattcttcatcttccccaactgaaactcttatctaaagactttatatggattgttttcgttgaatcctccctagaactctaggaggtcattttcccaatgacctcttctctataattattattttrtctgagccccattggccttagttttctcatctgcaaaatggggcataataaccctctgagctttacagacatatagggccctcaggctcagccttcttgcacctcccctcaggtacaccctctgcccagcaattctgaattgtgatccagatggctttttctggtgctggagcctaagtggtgggaggaggggttggggaacctatccccacttccagctctttctttcagctttctcccccgggcggaaaggctgtattgtgaccccaggcactgagcagtcggcagcggggacttcaccaaggattcagaaataccagggtttactcaggcccttgttgacatgtggggtctgggtgtgtcccagcccggcaggccctgagacacaggcccaggtgtcaagtcagccagccctttgtgaatggctgttcccaccacactccctgcaagggacagacaaacccaagaatcccaccctcatatccccctcctcaccgggtcttccatacccacacatccttcccctaccgtgcagtctcccaccccgaagtagtccactcctccttcccccacacagctgagacctgtttactttttaaattaatattgtaagctttgcagggttccttacactcatgatctaatttaatcttaaaaagatcattccaagtagatattactacttttaaatatgtgtgctccatgttttacaagtgactttgtgtatagagaaatgtaaataataattataaattagagataaggaaaaaagaaactaataattacccaaaatgcccaccagggagataagcatcatctagaccttgttaaaaggatgagatggactgaaaatcaatagaagaaaaggttgatatggagaatgccccttgcctagtatgctctgagaacgccaggcagacagatggcccaggcagatcctccaggcagaggaccagatgattctgctctagggaaagtcaccagcaccaaaagaaacagccatcaccactgctgtgtgggggcctcccggggcacagctcagccacctcggtgaagcccaccattcagcgaccaccttaccccacagagctcacaatcagcagtttcatgtttcccccttatgtggaatagactcctaggctcagcgggcatcggagggaggcaggaaccaaaacccagaagaaagaaactgggagaaaatagaggcaaagcagaaagcagaagataacttccaaaacccactgcaattaattaacattgctgggagataagacaagagggagaagcaataaaaggacccctgggagaacaagaagaatctctggaaacaaatttttttgaaatagcagaattgaacgtgtcaataggatttataatggggggagacaggcagagtctggctgctgagtgaatgtttggggaaggaccagtgagagaccagaaaggatctgggtttgagcaagcaggaccaggcagacgccgtatttgctgggctgacagctcccagaggaaaagcaaattgaagaaggcttctttttagatgagtttagtcagggagtctccaggacgtcccagtggaacagtttgtatagaatggggcactctaccagcaaagaagcagtagataggaacccagagagtaagatggcgttgctctcagagtctggagcctggctcagcataggctatttctaccccagccagttcttgctgaaggatggtacccaaccaagcctctgagacacttgttaacaatacagagtcccaggcctgggatcaaaacctggatggggacacaggaatatgcatttcaacaagctcccccagaaatctgaaattgaccaaaatttgagaccctcttgtttcaggaacaggtagtgatcaaagttctagggaagagactgagcatgcagtcagggaggcagggggtgaacaggaagtagaggtggggtgccatgcaggagcttactctctgtgccaagttctgccatcctggtgcagtgaacttatcactaacttcaaaatagcaacagctcttcgaaattcagcagcaaaatcactgattcaggaagcaattaacatagacattcaatcaattattcattgcattactaatgtgtagcagtaatcaaattggccttttaatatgtatttttttcttttaattaaccctgtccaaaactagagtatattccatgcaaaaaaaaaaaaatgtatttggcttgattttaaaaagaaagaagaggaaaataaaaaccattttatctcattatcattgtgtcaaaggaacctgcgggcagaaattgctttgtgtgttgattgtcttgttcacatgatttgagatgcaccaggaatctgcacgtcccgtctgcagatgcctgaaattccatcattagtgattagatgaagccttattgtgttcctgtctctggtagaatagaaagagcactggacttggagctgagagatgcagcttccaattttagagctgcccctaagttactgagaaaccttgggttacctctgtgagcctcagtttcccccaatgaagagactgaagttagacactgccaagaagtcttccagttctgacattttctcatgtggcccctgcagatgccccttcaacccattaatatgaatgagcgtttgccccttcctggaggaagtgagcagtgggggcaggcaccatcattccagaactgttcatctatcattccatgtagtgtagttggagtatgtagtttcaccacacacccyctcctgctcctaataattgctaatatctactaagtgcttcgtatgtgccaggcactatgtggtattttttaattgtgctaaaatacacataacataaaatttaccattttagccatttataagtgtgtggttcagcagcattaaatatattcacattattgtgcaaccatcaccaccacccatttccacaaatttttcatcttccccaactgaaactcttgtctaaggattttatgtggattgtttttattgaatcctccctagaactctaggaggtagggtctgtttttcggcctgtgtattagttagctgtggccatactgatgctgtgtaacaaacaaccatagttcttcagccagatacagtaacacaacagtaaacacttcttagcttagctcccaagtctgcagatgggccagcgggcagctgatccaggctggcttcatttgtctctgagcctccgcctgcaaccaacaagtttaaaatagggatgctcttcttatggcgatggcagaggcatgggggcaggtggaaacccacagtacctcttagagtctagattccaacttggcacaccttgttctgttggacagagcaagtcacatggccaagcagaaagccaaggggtggggaagttgacccccttaatgggagaaactgcaaagtcacttagcaaaagacatgaattttggggaggctcaggaatgggagccaattgcacaatcttccagagctccgttttagagataaggaattgctatctcaccagactgtttaaaggattggccaaggtgccagaagcgacacaggacactgctgggtgctgagtgggaacccaacgatgctcatttccttcagttaaggagtcatccagggtgcatttaaacaagggagcacccgacctccccaccacagtgattgtgactttcttcaaccccttccaagcccatccaaagctttgagcttggcgttcagtgctactaggagctgagctgagtagcctggctgagcttatctggctttcctctccttctaggcccccaactcttgccagactgatggtcccatgcccatgtccatgccttgctcacgtggactctttcttatggaaacggcccaggcttctgcagccagttcagcggcccctcctccaggcaacctacctctagggactccaggcagcatgctggctcccctggccttgtgtggtacagtgggttctcacagcccatggggcgtgaggccacgagtcacctacctggccctctggcatccctgctgaaggctctgttcctggcaccaccaggcagtcctcctggcctcatacaaggaccttccccagcttctgcccatcttgggggagctagagaaccccacggcaatggcattggccctgtggacaccaagttggtttggggaatattctgccttcttcacttcatgtaaccacagcatgaagaaacttccagaacaccttcttcctcccyaaacttccacctttcccccaccaccagttcaatgtaaattcttagagcaacggagatgcagagaaatttgtctcttttcgtttgtggcctgggatatgtgaaaagaatgaagcaggccaactcactgacccagaattttatatttaaacctagctttccttgtgtgsttcagtaatggcagtgagaatttatcttcattaaggattggagagtaggggcctcagatgggcaaagtgggcctctcggggcatggcagtgaggagggcctttcaggccttggtcagtacagcagggcgttgaggtgctgcgaagtcctggggagagtaggtctcattgcagggggcagggagcctttgcctctcgccaatggagttttgggctgggttccagcagggactgacttgtgccaggtcattgctcaacacgccagaggggtttccatgtaactctctccaccaagaggccagcctttgtgttcagataactttggctggagaaagtgaggaatccaccttcttaaccctgccttaattacgagggaaaaatcaactgagatattttgataaatatttcattgtttcaggtgcaacaagtagagcccatgatggctccagcccggcctactggggagacactggtttcttaaaatcactaacaatggaccaagctgacctcacagctaagcagagtgggtggtcgccttagtgatgtgagtcgaggggtgccaggcagctccctctgctgcaaatccctcccactcaccaaactgctgccgcctgcaattccacaatgagcactttagtcatcaaatcataaaatgtcagcttgtaattagccttggaacctgtctagttcaatttcccagctcagagtgctcttggaagatacctgaacgggccctttattttagagtgaattagtggcagagctggaactcgagtctgaccctgcacagtgaaggacgctagaggcatctgcagcttcttcaatgggaaggtgggttctgagtcacaagatgggcagctccccaaacagaggaaggggttcagacatcaggcatccaaagtaaatgaccagtgtcctaggggcaatctggtgggccggsctggattttaaatattcttccatcaaaatggccccaggctaggctaccagtttagcttcccaattttgttttctgtctttcaactcctggaacttctctaaagacttctggccaaataggtatcccagtctgtgttaggcaaatagagccagtaggtggaggcaagcctgggaccaaaaagagcagtctatgctgtgaacctagctttagtgggtgttagggttcagcctccggttgttgaccctcagcaagtcccttcacttcgggacttgcctcacctccttcactttcaccccagagtgttacacctgagccccttcaagctcacacactccaaaaagctctgaacggtacaccttaatattcttccttgaactgactccctgtcctcactgtccatcttagcttcatcctaaggattaatatccatgaggtcagggattacatgctagttgcacattttttttctggttcataaaaataatctataactactaaaataagaaaaaaaatactggtcagggtgccatctagaagcatctgtatcactccttgggagaggaaaggagtgaaaagagttggcccccaatcctatttctagcacttcctcaccgtgggaccgagggcaagtcacttcaccttcccaagctgctgcttctgtttcctcacctgcaaaatagggttaattcttcccactagggatgtgagtgaggggtggctcccgttaaaatatatcacctgcgtagccaggatagtgtcttgaatacagtaggtgctcaataaagaggagcgattgtttttataattgtcacatttttccctatttctcttgggtggagcaagggctttggggccacataaggacttgacgcttggctctgatactccctggagtgtgagctcagatcattcatgtcacccctcctcagtttcctcatctggaaaaagtgaacagcgataccacgtcccagggttaagaggaggatccatcgagatggggaagagtctgcatatagcagcagctgcagaagttatattcggcaagttgttgtttctagctgatggcaactctatattctttctttttgtccctgacactgtcggctggtagggttttattttgcctgtctgttgttcaaacaaaagccaggcagggaaaatggaagaccgaggctatgtgacagccacagctgcttgtctgcattctgagcagtggaaaccaggcaaacagaaagacacggctataggtctggagccaatggctgagcctgggaacacattgggaaaagcatctgagtggttattcagggatgttgcctgagcttataaggaagtcacacacgattcccaaactgaacaggaggccgtggtttcctgaggccttgagtccaaagggacatttctgaagcagtgaaaaccataaatagctggtagtagactaattgttcaacagccagaactgaagtgcaggaagcaagcttccccctgagtttcagcctcctgaacctgtctgtttcaagcttagagaatctaggctttctctgctgggcctcatgttcaggagatttttctttctctgaacatcaagtgtgtgggttttcacaccatgggacacccatgagccctgatcctaccaggtgcctaaaagctgctttgaaaacctcctggacactcatggctttggtgtatggttgtggagggtggagaatatggcactggatgagcaagctggcttggttcacagtaccggggtccaggaaagcaccccatgggcctccccattcttcctttgtggccggcagaggtaagcgagctgtccttggtgtggcagcagccctgcacctaaggctgcaggacctacagtgtcaggggcacagcctgagcccactctgggcaggaccaggctcgccctctttgttcttaactctgctgagggacagagcctgctccagccacaaagggcctcttcacctttgccttcccctcacctgggtacaggtgtcatttttggagttggccaaacaggatatactgtcttagcccttctcagaagacagtcaatgctgccaccttcacacaatttactcactcttcatggtccctatcggtacagtttgaccattcatcaatcctcaccatgaaaccaataaccattcatttgttccctgagcacccactgagagggccaaagtggatgaaacgcagtctcagccctcaagaagctcccaggctggtattgttttccatcaccacatcctattcctcaagccaagcacacattccccatgttccatgattaattatcaatagaaataataacttgaataactaatacttattgagggcttgctctaaacgaagcacctgtggaaaacactttgcatgaattttctcatgaaattttcacaatgatcttgtgaagcagcccctgtcatcatctctatttttcagaagaggaaactgagactcacagaagtcatgcccaagaccacccagctgataagggaggctgtcagattgcacagccaggctggcaggctcctgagcccacacccccctatatggcattcctatcagcatcaacaaaattagactgagcaaatgcaggttagatttgcctgtctcctaacacaggagacattatcatgtccatttggtgatcccagaaacagaagctcagagaggcctgcagaattccctgaggtcatagagctgagacttttgtttcaggacttgtggttgcaaacccactttcactgcaacatgtggccccctaaattccaaaagggcattctgtccctgggtaggctttgattagctatggctaaaatgaagcctctggccccagttagattgtggttgggaggaagattgacaccaggagagacacctctagaaggaggggctggtctagatatcaatgggtctccccagttatggygaggagagggaatgggagagttctaagctgtcacagtggcagggcacaagaaccaagcatgggccccacacattgaagacctatcatacaactggcacagtgtcggatgtcttattggatgtttatatcagtggaaatcctgtttgtacgtatctgaacccagaacctgactttgtgttaaatcttaacccactaatatatcctgaaatttccaggaattagacaatcaaggaaattgatggaaaactgtccttcattttgttcagaacttcaccaagaactggccccatgttaaaaactcagaaccagcatgtcactcaggtcccactgctgttacagccaccctgtctgtgttagtaactgtcacatttccagtgatttgatgtatatctatgaatgtatttatttagccctcacatcaaaatgtcaactataaagaaaagaggcgacaatattccgttgaacgttgccttctcttcaatctaaactaattcatcccaagtaggatccattatctgactgtctcattatagtcacactggaaaagcacatcttgttgttataaatgactttcattttatttctcttctttattacagttggggcattatatgcctttttgaaattatgtgtattggtaggttatatgatgtgtgaattttcttggaagataaagaaaaaaagtaaaatgatgttggatccaatgggaccaagagccaccagcacagtggatagaaacaaaggccctgtactgaatcctgccctgcctcctaattagctaggaccttgcatatgagcatgaacatcagctcttaccccgggtctctgaagtcatttattgaacttggtttccccactaactagtgggtgaacagtgggtatcaacagataatggaatcgagggacagatggataagctggatggatggactgataggtggatggatgaataagagagttggagggtgggtggagaaatcagtggaaggaggggtgggtgcatgggcagatagctggtgaacatctggactcatggatgaatagacatagtaggcagacagacagatacatgggtgggtggatgagtgggtggacagatgggaaggtagataggtggatagacagctgagggggtcggtaggtggaaggatggatggatgaagtgagggaaagcaaatgatgaggcacagagagttttattcgcttgcccaaggccacacagctagtaagaaggactgggactcagccactctaactccagagttcattctcttaatcactgtattacgtttgttgaagtaacttagccaagtcaccagctagcaataggtgaagccaagatttgaatccaggtttgtctgattctctactacccctctggcctgaagactggaggctccacattgaagaccaactatgaatgccacaggaccccagacctcaggcagctggggtttaaatctggcagtcacaccatcagttctgagtttagaaaaataatttgcccaacaatgtaatgtctgggctggaggggaccccagtgatcaagaggctgttgcagtagtctaggcaacagacaatgaggactcgagccagagatatggccaaggaggcagagaagcaaaacagattccagaggctttcagaattagagttgtcaggacctggtgactaagcccacgcgagagatggggaacagcagaaatcacagaggtctagggaaacccggacacagtcatttaccttcccaagctgtgcttccttcatagaatgtattagttaggataataaaggctaggttgctgcaacaaagagacctccaaatagcagggtagaaaactttttctagggtctaaattggctgctctagcctgccaagagtgctctactccacgaggtcatgcattgacccaggttccttgcattctgttgctctgccaccccttaggatattgtcctcatttacatggtgggatctgtgtcccaggcacattgcattcacagttccagggaccaggtggaagacacacaccccccagtgttttaagtcaagtcctagaagtgacacatattatttctactcatcttccattcagatgaggatttagtcacatggctacacctagctgcagagaaggctggaaaatgtggtctatctaagcagccrtgtacccagacaactctcaattactctgggagagtaggagagtgcatttgagagaacaataggaaatctgtcctatctgggaattgttgggatgcagagttatcatcagaaaaaaatgagatcatgtccttgtagcacctggcagcacacagctggcagaaggtagaagcccagtaatggtaggtgtcattgccatcattcctaaagggtgtgtaagtggcacataaaggagtagcaaggcctctaagaattaggaggctctggccacaaaatcaattcacagtggaagagatcagggacatcctgggacagttccaaaatgaaaagtcatacacactagaatctgtaggggagaggggaggggaagggaacgttttagacagggggagacaagatcagcctggagccagggttgagctaaaggcagacaattctggcaaggagcatgcccccactgttggggaggaggatgggaggagctgctggcttaatagccaccggtggagcagacttagctggagaatagggatggaggggcagggagccaatcaggaaaatagaatccactccaggtatttcaaacagaagaaatttaatgcagggaattggttgcaccgggaacaaaagagctgaagccaaataggacagcccaggtgagcagcaacagaagaargttgctgccagcctatgggtattattgatcagcccccaagggattggttatatkagtctttttctgacagacaggtcctctagactcagctgacaagatcgagattctaagcctcagagccaaggctagacctagaatggatctggttgtaccctgaagtttctttctcaccagggcttggggtaagttcctggagtggcagccccatgaaaacacatggtcagaagtgtgagctagtttgctgtagttacaaggtggaactgagttccacaggtggggaagttaaggcataaacagacttggttctaaacctggctccactgtgtgttcttggacaagttgctgtgtgttcttggaccaaaagttgtgtggtttttgacaagttgcttagcctctctgggcttcagtttcctcttctgcaaaatggggatgctaatactgtcctctgagagttgttttcagagagtaaatgaaatattcatagtcaggtggctggaacactggcctagtttacttcctgtcctctttcagaagcctgggctgcacagtactgggtgctcagaggcagcagccasagcatcagccccagtcttgccctgtctgtagtcagactgtgcagctgatgcaaagaaaggatgcaagtagcgggagctggatacccagcctctgggcttccccaccctccaggtgcaaggaagccctgattctcagaccttacacgtcaaccccaaaccaacaatgcctgaccatctcacctgtgagagtggaagggggaaagccacataacatcctgtttacccatccaatgagggtcagagcagttttgttgtggcctaattggattattgatttgccaggagttagtgcggaagagttgttaggatgctagctcctagggtcaggtgaaactgggctttattcctgatccagccactgctcagcagtgtgaccatgcaaaagtcacttaacccctctgggcttcagtttcctcatctgtaaagcagtgttgatagcgtctccttcattgcttaatgtgagaatcaggtgaaataatacatgcaaagttccggctcagtgcctggcatacagccaaccctcaatataagttacctatatcattactgctctatcaatttttaaaaaaggaaaaacagaaaggacttgtgtcagcctatttatacaatatgacaaagttgaaaagaaattaactagggaatcagaacataatggtagaaaataggatggaaccataagaaggttcattcaaagcatgtatgctttaaatttggttttgagtttcctagcagccaaagcaaagaggaaaaccaaattgattatacatacatacataattgcaacacaccttatgcaaagaaaatcatattcctcatagattataaggatgggtattccataatttatttaacgaatccccattgatgggcatttaggttgtttacaatttttctaataagcaacgttgcagtgaatattctagtactcatatgtttgcccaattcttgaatatttacataacactgctaccaattcaatgatcaacttgaggtccaaaaattcctagtcctcctgaaggaaaaagactgtttgggcagggtggaggtcctaaaaagagatggaggactagagattgaaaggcgctggaggtgaggggtcagggaaaggggtgattcagggaatcagatatccagctgctgttgcccactgagtcttccctccttccccaagacccagcaagagaagacccatagactagtgagggaaaatgaggcagaagccccacccctggagggcagctcattctgagaacataccacttaggagactaagaatagtaactcccccacccacgcacaagctcatgcccaactcttcagccacaccaagctactcactgttcctcctcgtaccagtcagactgccatgggactcctcttgatgtcctgccagcctgaggagccctcctcactgcctctagcccctggtaagcacctgaaggtgcagctcatctgatctctctaccataagggcttttctccccacccatggcactcaagagaatcactgcacctcccagatgcagtgtcacaactgttcatatactagcagacctcatccacattctgagtcctctaagagcaggaacgttgtcttgtcgagttcctcacagaggcatgttctaaaatgaacaagggatacagcttttgcatgagatgctgggtggtcttcttcagccccttggagaggcaagatattaagtgcagagtcagactgggttcaaatcctgactgtgatttgctagctctgtgactgtactagcctattctcatgctgctaataaagacatacctgagactgggtaatttataaaggaaagagttttaatggacttacagttccacatgactgggaagcctcacaatcatggcggaaggcaaaaggcacgtctcacatggtgacaggcaagagaaaatgaaagccaagcaaaaggggaaacactttataaaaccatcagatcttgtgagacttattcactacygtgagaacagtatgggggaaactgcccccatgattcagttatctcccactaggtccctcccacaacacatgggaattatgggagctacaattcaagatgagatttgggtggggacacaaccaaaccgttatcagtgaccttgggcaaatcacttcacctctctgagcctcaacttcttcatctgtaaaatgaggataatgataatactagctgacacattctgatccactcccctgtgccaggcattgcagggattcacttatttaaatgccaggggaccgctggggggttaaccagtatgatgccatgcaacatagcacatgtctcatgaaaggcagctgtgccccacctcgtcccactctggctatatgtccatacatccactgacttgttcccattactcattcaatcagttgagcactgtctgtataccaggtgcagtgttaggttctgagggtgtaatcgtatacagtaaaaatgttctctactcacaggagctctcagcctggtggagaagacagaaattacatcatcacacagataactacacaatgaccactccaggctaagtgcaaggggagacttgtacagaaccctatgtgagcacaatgggagtggcttttgattagagggtgatggaaggtcattcttcagcagtgacctggatgatcggaaggattttcttggaagaaagcagggcacgagtgttccaggcagaaggagtagtacatacataggtcctggggtgggaacgagtcttgtgcactggggccactgaaaaaggacagatgctctggagcctagagaacaagagatggtgctgtgaggggctggggagaggtgtggggtttggatttcatctaactgcaggagggccgtcaatggatgtaagctacaatgtgctcgaatccagcccccagaagccccttctgttggggagtgtatcacagggggcagtcgtggagacccaggtggagggtattgcattccttcaggcggatggcgagctggcaaaggaggtggtagcagagggaaggatgtgcaaggtgctagatatagaatctacaggatttggtaatggggcaaggggctgatgggagccaggcagcaggctgaccagctgtggggccatattccaagatggggaagactgagggagaagcatactagagagaaagatggggctcagctggggctatggggcatttgaagtgcttttcagctctcagaagacggcccagctgaggggatgttcctttggtgttctgattacatcagagtgagagcctcagtgaggtaccccaggttggccgcacctcccaggaacatctgctgagctccatccgtcctgggaggacaggccctgggctgactccagccgtcatcagaagcttggaacattcctactgtggagctctagcacatgaggtttcccgccctggcctgcctgcgacacgccattataaaagacagctactacacgatgcctttcgctggtttgttcaraagcccagcgactgcctttgagttgctcccatctcattatccccagagtttctacttctttttgtgaaaatttaattgcctgctagatttgaaagggtctgggccaactgttaaggtttgagaagtcagagtgaaatgcactgtgatcaaaggctgcaagaggccagcatctttcgtgttggcagctccttaaaatcggagcaactttactcctcccaaaacagaaaccatatcactcagtgtagaaacttgaaagagtgttcagctagccctagcatttgaactgccttctgcatctttaaatcgttttctctctggaaatggaatacccgggactcattctgagctccccgcggaaggaacacgtgcagagttaccactggtggaacttgtgtctccttggatgttctttaaacctcaagcccaagataaatcttgaggagccaatgagttgtgcagattatctccatactcccagagcttctcagagagctgggattggaagtcggggggcttggaggcaaactccagcaccctgggctgggtgaccttgagcacatctctctgtaccctggatctacatctgtaaaataggcctaaagacttccctgtctaattcactagttttttttttccttttctttttagtggacacacaataattgtacatatttatggagtacagagtggtatttccatacgtgtgtagtgagcagatcagggtaattagcatatccatcgccccaaacgtttatcatttctctgtgttgggaacattcaaaatcctctcttccagatttttgaacatgtgcaataagttattgttaactatgttcacccgatagtgctataaagcactacaacttattcctcctatccattaactaacctctccccatcctccccgcccactacatttcccagcctctaatagccacagttttactctctacttccacgagctcactccaagcttaaataaagtgtgaaaatgctttgtaaatgaaagcatcacacccatcagcagttaatatcgttcatcttactacccctcctggggggacttgcatttcaaaactgaggagcctggatcagcagagagtgtttcttagggaagaaaagcatttctgaaatgttggaaaacaaattagtgtttgaagggcagggataacaggtgtgaggttatgttgagagccacaaggtatataaatagcagaggaggtgacaggagcagctggcctcactcctggagggtgcagggccaccttctgttactctcctcactcgttctctcctctcctctttcctcccctcccctctcctgtcttcctttccttctcctgctgttattccgtgctctcccctcatccatctttctccatattttgcttctgagttccgttctttctttcttgttccaaaaaggctatgagctgtagacattaggagtctttctctcaaatgcatctcaaactgggttaagcacaaaggggtttaagggttaaactgggggtttccattattccacttattggcttgagtaactgaacagtcataggaggtcaggcttcaggcacagctggatccagggactgggaagatgtccagaatgtattcaccccttcctctccatctctcagtcctgactcccttatgctggcttcaccctcagacatcctctccttgcgtggtggtaaaagtgcccccctcctcccaccttctcagaagctttaggtgacttcctagcttagccaaccgagcagaaaaagagaagggagcacttaattccctgcagtcctagcaatgatcttagggctgcctctcagtggctcacagaccacgtgcacttccatgaaccagtcactagctggaggctacacagcttggtttggtcaaggctgggatgaatcatacccatcctgggagcaccaacagggtcagccccatcagagcctcacagtctgagagtgcgggtgctggggggttgagcatttccccaaaggcagttctagctgctctgacccaaagaaggaggtaaatgccagcagaggccccactggcatctatatggagaataagttctgaggacatgccagaagcacacttcagtctgcttgggagcttactgatgacctgtcgtctccttccttgtcttgccttatttctacattatgtccctgtatcactgcctggccaggggcmttcatgctaccatctctgaccaagatgcatccccacactggaggcakgcctggccacaccacttgatcttcgagtttgccctcctcccctataagcttggtccttgccaccatgatgactcaccttcctgttcttagcaggatggtatagcaacagcatggactgcaggctcacacggactggagttcaaacccatgcctgccaggtactgagataaatgacagtgggtgaaagataaaaacagaataatggtgtagaatgtaccctctggtacacaggccccactccagtcacttcagaccattcttccttccctgaactcagccctcagtgactgtgccctgcagtccctgcctaaatgcccagtccgtttctcctctgttcccaagaggccagctccagtgcctgctcctctaggaaccccagctcctgggtctcactccagccagacctctccargagctctgtccacctttcctgcatcggctttcctaccagaaggctctcctgcctccttccatcatgctgcagcaggggcacaaactccctgggaatctagcttcgtccaggcagcccagatgccgcaaaggcggtgagagacccaagcccatctggcaaagcrtcggcagcttgacttttctgatgaactttttataagtcctcaaaagttcacacttcccaagcgtctgcctactctctggcatcttcatttatctcctcagtgggtgacatttctgggcccctggaactgtgccttccagaacgcagtggccacccagggcccaagctgcatatttacctctgcatctcagagcagagaccaaggctgggaggccagagatgccaattagaaacacctagccaggagagggagaagggaaccacttctcgggactcagagtgactcatggcaggacagtctgggggcttcaccaccatcacagcctggtgtctggagagaaagaaaaaaagcatgaactgaaatatagcctagtctgagattcaaatcctgacttagctgcctaccagctatgtgaccttgggcaaagcacttcacctctctgagcctcacttttgcacacttgcaaaatagggacaattgtacccaccccagagggttgctgtaagaattcagtgacaagatatgtgaaagaggctcaatgaatatgagtttgttattaataaaataagaaagaatacataaataggagtaattaaagtttaataaaacaatataaatgacagaataacatttcagttctgcatctgttctctgagcacacactatgtggtgtccttgcagtttctcaaacacgccaggcacaccccaccttcaggggtttcgcccttgctcttctcctcccttaggagccttcttctccaaacatctgtgctgctcactctagtctgtgcttaaggccgcgtcctcagagaggctttccctgcccccttctataagacagaagcccttcctgtcacttgccactcgccctgccttgtgcttcacaacggcaatcctctcctgacacagtcaatttttatttaatgtttagtttgttcagcatttgtctcccccaccactagaaagacagctcgagggagcagagaccttgttcacccttgtccccccagtgctagtggagagcctaatacctactaggtgctcagtaaaaatttgagagcagtcacatagacaaatcagacatatccctggcctggagaasctgggttttccgtgagcactgcctgtcataaaatgggcttctggccaagcacagtggctcacgcctataatcccagcactttgggaggccaaggagggcagatcacttcaggtccggagtttgagaccagcctggtcaacatggtgaaaccctcgtctctactaaaaatacaaaagttagccaagcgtggtggtgggtgcctgtaatcccagctactcaggaggctgaggcaagagaattgcttgaacccgggaggcagaggttgcagtgagccaagattgtgccactgcactccagcctgggtgacagagcaagactccatctccaaaataaaataagagggcttctgacctgtctctcacaaagaaagccacagagaaggtgggatctgggctctggggtcctaatcaggccagctatgcaggcatctgggatgatagcagccattctagtgaaaacagccactgccttttgctgcatgctcactctggaccctgtaaggaacccttcccacacagcatcttatgggcttctccccaccagccccacaatggaggtgctgctattcctcccattcaacaggggaagagacaaagctcagagaagaggcataactagtcaagaatcactctgtcagggccagagatgtgttggagcattggagcccagatgtgttggccaccatggctggagcccttagcaccaacatcaaggtgccacaaggaagccagaagcccagcacaaagagatgaatgtgaccttgcacagggaggtcagggaaggcttcccggaggaggcagcatttgctctggaccttgacagatacataggagttttctaggtgaaggggaggagacagaagcataataggtgttaatcctgtggtccattcaacaggcaatcattgtactcctgtgtgctgggcagagataatgcccttctgggaatgaagccctcagattccaaagaaggctgagaggaaacagccagttgctgtgaaacacagagcagggcctgggcctggctgagagaaatctaagagcaggcattgagcacctactgtgtgctcacattttatccttgccgtttgatgtggaaggtgctattcccattttcaaagaaaggcactgaggccataggctttgggctgcctgtgcttggcaggggcgaaaaggaggagagtaccctcctgcctgtcacataatgggcctctgacctgcctgtgcccaagaaaggttcagaggggataggtttggggtctggggtcctgatcaggccagctggcagagaatggcagggaaggggcctagaagttccaactccctggcaggtggcctcagtagcctcaacaaggtctgacccacacccagaggtgcctgtcactgtttgtgttacttgctttgggaccttgagtaaatcattttattcccctgggccttctgttttctgaactccaaaaagctaaatgtgatcttcaaggccctgcttctggcttaggcattgcagatttctaagtgtggtgtattagcttactattgctgctgtaacaaaaaaccatagaccaggggatttaaaaytgatcagctgacagttctgtagtcagaagtctgacacagctctaccgggctgaaatcgaggcagagccacattccttctggaggctgcgggggagaagaatctgtctctgggccttttccatcttctagaggctgcctatttccttgattcacagacactgaatcttctgcctcccttttccacttttaaaggtccttgtattccattggcccacccagatcatccagggtgatctcccctgtcttaaagtcagcggtgagacaccttcactccatctgcaccctcatttccctttgccataagctgacatattcacaggctctgggggtttggatgtgggtgtctttgtgcagccattattctgccttccacacctggaaactgagacatttctgagaggccttgggcaagctgtctcccctttttggacccagttttttctcttctgtgaaatggtgtggctgctttgaaaacaaagtgagaggatgagtgttcaggtgggttacaaagggtcaagcgccatacatggggttaattctttattcctggggtatttctattgccagcaatggcagctggcagcctctcaccgggccctcatgccttcctatgccttgttctgaaaagctgcagcccccacccccgccccactagacccccagaaaacaaacgtgggtctgtgtaccgctcctgctcattataatctcttgcttcttttcacaaaaccccaggggcccctgggatttgggagctgggggatgtcactcaaggatgcctattgagygctaaacaatggccccctcatgaggtcatagggccgcttagcaaccacccaggcccttagtaacgggcccagaagtgttgatatttacccaacagaaactttggattatctcgataacacccagttccttccagagagctgcaggcactaaaagcaagctccacccactcygagctgctgctctggctcttccaagagcaggcctatggaggggcagggagtcctgggtttcccccccagctctgcaatcctctgagggcctcagtttcccccacaacatggggatcagactaaataagtactaaatatttaagtagtatgactgtatgtccctgctggcccagaacagttccattttatcaagactattaaaagaggcgttttcattctcaagagttggaacatcaaccttctggtcacccacctctaaaaggccacttccagccctcaatcccattgttcttcccctccaccctctttcccagtctgaattaatcctgaatagtttcacctagctttttcaaggtccctctctgtgtcaggcatggaacagggcgctgaggaaactgaggcaaaccagacgtggtccctgctttcaggagcttccagtccgggaaagaacaccrcttaaacactctgcagaaatctaggtctgaatctagaaccttgcaattctcagacttatttgtgttgtcttcactaagctattttagtaaataataatactccatagaattccggtggcattttgcagtttctaaagcatttctgttatgttccctcatttaaccctgacatcatctgaaggtgtgattttaatatattcccattgcacagatggggaactggaggctggaggccatagaggacagagcagttggatgcccttgaggagcaattcaatctctgcctccttgccttcgaaatggagatgttagctcccacttcatagaactgttatggaaagtaaatgagacagcacatagaaagtcctttggaaagtgacagctgcctaaaatgagtgtttctgccctgagctgtctgtggcctcagcagttgcacttcctggatgttctccagttcacctgcttctcacatgcccacagacacccatttgtaaatttcctgacccatttttgagcacagggaacacatcttggttggaaccccagctctgcctcagggcagcactgtggcctcgggcaacttctagcctcagtttcttcatttgtaagaggagataagaacaagtcatcctgaggatggaaggaagcaaataacataaaagcagtgctgaggggagccaacccagcacatagctgttgctcacaaatgggaggttctggattgcctttccgatgttaagtatgtgagaagactttgaamgtgtttgtgtgagagggagctatggagggcagcacccacaagatgggatttttccctcaccccaggagccaggccagcactcactttgggcggaaggcaggacgctgccaccttctctaaggttggcttccagccacgttgcagcaagggggttcggctgacgaaagctgttccctctgtgccccactcaccttgcaggaggagaagggccccctcttccccttttctttacagagtagctccacaggggcaaatctgtcagatgccatggtgatgcctatgtggtttcccgcccacgcccctcgccagtgctatgagtcaccaaccggcaccgaggcggcggccgtgggaagggtgttccctctccggctgcagaaatgctgccacaggcgagctctagaaagccaaaactgggccccaggataggcacagtgaggttccttatgcaacttttgacattgttcggaatcagtgttacagaaagcccaaacccagccccatgataggcatggctacatttcttatgcaaccttggcattgttcaaaagcagcgttaatgttcgcaacttccatttgctgagggccctagggagctggcccagcctagacttcatgtcctgcttcccacagcccaggaagaagctagagtccccttttcaacagatggggaaagtgagacatgcttggggtcacatggccaggacattcccagatgtgactcccctttactggcagaccaaggtagcttttggaattggagacagaccaaaacaggtaaatatgattgatacattgtgttcttgtttgaatgaaacataattgtgagcaattgtgtacagttgccgggctgaaggtttgaactcttgatttcttaaaaggaaagaaaaatctatctctaaatctgagttagcctagaatagaaatatgtttacagcaaaatatttctttatacagaactttgcattgccaaagcagggctgtggaatatgcatgcgtgttagtggggtgttacagaggaaggaactgcatcagggattgtatcttgcaagtagcactgacagtgatcacagatccgcatctgagacgttgagcttggccgctttggccccatctgtgcccatggtgggcttgataatcggcacgtccattcaccactgccttgccaggtcctaaagccatactacctgcttcactgcaggctgcgtctctcatctttcccccactgaattcactgatcactcctccatcaggtactctaactgtcccatgagctccttaagaataggagctgagctccaggaggctatgtgttgggagaagggggcagtagaaaatacgtgtagttatttgagcgacttggtatgccctgctgtctctggctggagtccccttcgtaaaacattcgcccaggccagaaagagacctaaatgagagtagagggagcagaaggtctccacacacattcccacctgcctcagtgctgtctgagcctcaaacttgcctgatccaagttgggtaaaaccagactgtaccattcagccacaggaacagcaggccgggccgtatcctgccagcaacctgcctgattggagggtttactttgcagccaggccttggcgaccgtgcataacagcttctgtctctcccagaacaactgtgaatgtttccccttcgccttcaccatgacctcacccggcatggatttcctactatttaaaactcttctgcaactcgttccatagaccggggtgacattgatccttgctataatcagaggagtgtgtgaagctggtgcccaggcagcctgggatcctggagggatacattaagacttgacagggttcccgtgaaatggatttctgtgcatcagaacctgtactcctgttgactttcattggagcattgagaatgtgtcctgctggaagggagaaatgtttgatgcagctgtacttcagagggcactagacctttttaaaaaactatcacatagacaaaaaatgtgctttctggggtgaaaaaaaaactggtctgtaatattaggatcaagtttatttctatgctaaataaaaaagggaaaaatcaaaatttattatatagttaagttcatcttgaggagactgaagaaaaagaaaccaatactattccatggccaggtaaaacactctgtctacattccaatatggtcctgatcttcaggaaattgttctgttgcattattgctatttacttccgttctaggtttcagaaaaaaaattaatatgtcttatcagcctctgtagtaaacacttattgctttcatattggtctcagatcttcacttgctttttctgttgaaatttcagaggctctattctctgtagctagccagccacaagagactcccttgggctaagttcccaagacctgtcatgtgatacaagtcattgtcattattgcttctttgggctgttgacagaatgtgatcccatagcaagatatgagaaatatataggatttggagtcaggccattttcttgctatgtggccttaagcaggtgacttaacctctctgagccatgtggctcccctgagttctagcatcactaggtaaggtcagacgcccctcctcagtgggcccctcagtgggcccctcccctgtgctggccattgttcaccaccctgtgctgtactsttcacttttctatcttccctggactccgagagctccctgcaggcagagtctttgtcatttctgtcccagcacagggcctggcagggagcacagggcaggggtttgagatggttgagaaaaagaaagaaaacagaaaaggaagtgaaaaggagagagggaggtagggaaggagagagaaaggaataaaaagtatggaaaatgcaaactttaaacttctttgcaattcggatttatttcaccactggctggcctaagtgataggacatgctagtattgctgctgcctctcactttccaatgttcagcaccagtgtcgccatcatcttacagataacacacattgagcacttatttatatgcatgagcttgtttgctctcccaggaacctgtgtggtaggcacattttctttctttttctcaaccatctcaaacccctgccctgtgctccctgccaagccctgtgctgagacagatgtgacaaagactctgcctgcagggagctctcagagtccagggaagatagaaaagtgaacagtacagcacagggtggtgaacaaaggccagcacagggaagggggccactgaggaggggcatctgaccttacctagtgatgctagaactcaggggaggaagccacatggctcaggcacctccatttgacagacaacaaatcatgattcataggagaagttgagtcactcacccatgtcacacagctggcacatggttttaacctgatccccacaatcccagagccagtgcatttaatcmgtgtaccctcagcacttagtttggggcttgacaggcaattgatttcaataaaaagtctttgaataaatgaatggacctggtcatttatctcattagatgctcagtctcactcttagttccatcttcctggcatatgtaatgattaaaacaaaacctctgaggctaaacaagcctgggttcaaatatgagctttccatgttacgctgggaaagtcattttctctactctaagcattggctttcttcccactaaaatgggaataatattggtgccttcctcccttagactgggttcttccagaagcagatcataagatgacgattcaagtgcaagtagtttatttgtgaggcrtgggaatgctggtaggggagtagggaagtgagacaggaaagggaacaaggtgttatcaagcaagttaattatcactgtgggcacctggatctgggagctagtgtaaaacccacagctcatggttttcccagctgagagggaagggagctgggatagctatacactatctatacaccaactgccaacacccatcaatcattagctgagagggaacagagctgggatatctatacactatctatacaccaactcccaacacccgtcaatcattggctgagagctgctggggttggtgagttgcatgtgctcaccaaagaacatgctcaggcagatgctgtgtgtggtatcaaaccagcttgccccatggtggttagatctgtgggattgtggacaaggaaataacagcatctctgcaccagctcttagtgttgctatgacrattaagtgggttcgtttctatatagcttggagaatggtctttggcacagattaagccccttatgagtggcagccttcaggggcttttcctagcactctctgtgtgatacaaacagatgcctttgggctctactccttagaacctcatcaccagtctacaaacggtgatgtggtcctgctgagtgtcaggtgctgggacacagccatgagcttgaccagccctccaatgtttgtgaccccaccaggtggacagaagatgaataagaaatgacagaggcagtgcccagactccttgcccagtgctcctcccaaatgccatggaaaggggtgtcacacatgtggagggtgttgggaaaatggtccagctgggatgcccagtgagtatttttgtagcataggaaacatgttcagcaaatgtctaaactgagaaatttcctggggagattcccttccactttggcataagatgattttgccttacaagggacttcagtttccctagacagggacttggaaagtccatgcctgcagcctccctgaggactaatattcagaactttcatggaacagatgcatgagaacaaggatctgtcttccctgacacggaccagctgtgtggctttaggcaactctctctccctctctgggcctgttttctcatctgtgaaatgggtacagtgagtggaataatgggcataagagtgctttgggaaatgtaagccaactgtgtcttatggagcgggagatacgaccattgtcgttactgttgttgctgttgttaggaaaggtgtgaccgtgggccagcracttcctctctctaagaatcctttctccctgttgcgtgtggtcaaatcctcaagggccaggaatgtgaagacagccccctgtgtcttactaccatagaatatgactttaccaggcccgaaaggactcatgttccaaccccttgtagcagggaaactgagacctaaagaggagagaggacttgcctgaggccacacagcctcagtggcagtcggttctgggccccaaccagagccgctgagtcccagcccactgctatttcctacatctactgtgagctgtacccgcctgcctctttgcccccgcccttgacccgagctgctctcctctccccagaccgatacaattgacctgccccagccagtaaagtctcggagggcacaggggcctctcgctgctcagttcccggctgctggagtgttcgtctctgcagcaagtcaacatttttgcctctgagttggtgtgtggcagatggcacagcagaactgagccttggggtctatttttgactcagagaggacattgcgcagatgctcagtgctcactgatggcagcggagggtctggaggatgggacagcattaatctattggctttggaagacccaccgcctgggctcaaatcctggcttcatcaccgttagctgtgtgctctcagatacgaggtcttcctctaagagcctcagtctccccattgtaaagtggaggctgcaagatcaataggttgtacctcatcaatttgacaggctagtggcctctcagaggaagatgaatayatggtggtgggactttgggggctaatttatagctctgagaagaagaggccataggaaggtagggacctcagaagggaggagttcctgcaggcccaagtcagggtctggaatggagctgtccaaggtgcagccccttcacaccccatgtaggggctgagtggccccagcggggtggagaggttggcagctggggcgggaccaggcaaagtcctgggaacaggcccctttctttgttctgagtaggtaaccctggacagaggggctgggcagggtgggcccaagggaaggaggtgtccggctaaggtgggtgagggggacacacaggcatcatttgtaggggaggctgaaggtggtaaagaagtggatatggggagagggttctcagcgtgctacctccctgtcttgcctcctgctggagtcaggcagatggggtcttattgcgcagaatcccagctccagggggcagttggggaggctgagagatgggtgtggaagagagactggcacacagagagcctgctgcatgcacaactggcctccggcatgcatgtgcctgtgtgcgtactaacatggtttcttccatgcacgtttactatagaaaatgaggaaaatgaagacattttgtttaagaatcaaacatcctaaccccaccaacattgacatttggggaatactrtatctttccccttatatcttgttttgcataccataaccatagtaattttcttgttggaatcgtgtgaattgagaccctatatcatttcagttctctactctgcattttttatttgaggttattaagatattttcctaggtcataaaaattacttgaaaacatgttttttgatagatgcctaatattctatcctatgactcctcagtaatgtacttaactaatcccctaggacttgacatttagattgtgtccaaattgttgccatgatttaaaaaaaccaccgctaacaataagagaacaccatgatgaacatctttatgatcaaatgatgtctgcattcccaattactgcatattccaattttgcaaatttctgtccaatcccagaggaaacagaccatttctttgcttttcttaaaatggttgggtttttaaattttgttttgtttttattttttatttatttaatttttttttttttgagatggattcttgctctgtcagcaaggctggagtgcaaaggcacgatcttggctcactgtaacttccacctcctgagttcaagcgattctctcgctgcagcctcccaagtaactgggattacaggcacccaccatcatgcccggctaatttttgtatttttgtagagacggagtttccccatgttggccaggctggtctcgaactcctgacctcaggtgatccacctgccttggcctcccaaagtgctgggattacaggcatgagccactgcacccggcctaaaaatggttttctttcatgtgtgtgtatgcttacaacgcatattatttagtttcacttttgtcttagtcctttaaaatggcatcatrcagtatgtaatcttctgagactcgcttctttccgactttcttctactgggaaacattgtttctcagactcctccctgtggttcctgcaggtgtggtttatgcattttcgtagctgtgcaatattccctgccatgacgatattacagtttattggttcattctctggctgttgggcatatggttgtttccagggtttggctctttcaaacaatactgctggagacattctcagccatggtgccattttcctagtaaaggaacacaggaggaaaaacaaattctggaaggggcgggtggaaacaagagttgagcaaatatagcttgaagtgaagtgtctgcaggacatgagctgatttgattttggaggaagactgtcaggagcatcatctgtgggcttggctgagctgcagagcacttaactcaggcttagctgccaaggtcagtgatctggggctcttgagcacaggtggagccctcttctgtgcaccccttcaaagaggcagaagcatcgtttgtgaagggagcctgatccacacacctcttcatcttggtgccattaaaatctgagcctcccaaagtgtggagtgtctacttccagggtatctaagaggatactaggtgttattaaaaagagctcatcacctgatgggaaaactagtccatttccagttctctttcagtcttccaggtccatcaaggcaaaaggttctgctggaagtagtctatttttaatgaccttccccacaaatatttgttaaactctgtttgatgagagaccagacttttggcctaggcccctaggcaggtgataggatctgtcagacataaggatgttctgttgttttctttgtaattcgttgttgtgctcatctcctatttgtggtgagtggcactggttttgcaccgatggtaatgatgaaattttccctttaagaaaattgtttaaacttaaatcaagcagattagggaaaacactcatgagctcaatgatagaagagatagtgaccatgatggcagtcatatttgattgactgaggtttgagaaatgctgacctaaatcagcaattctcaaacttcttttctgaagactcattatgttcttaaaaattatgaagaacagggccaggtgtggtggcttacgcctataatcctagcactttgggaggccgaggcaagcggatcacctgaggtcagaagttggagaccagcctggccaacgtggtgaaaccccatctctactaaaaatacaaaaattagacgggcatgatgacrtgtgcctgtagtcccaggtacccaggaggctgaggcaggagaatttctcgaacccaggaggtggaggttgcagtgagctgagatcatgccattgcactccagcctgggtgacagagtgagactctgtctcaaaaaaaaaaaaaaaattatgaagaacactcaaagagtgttgattgtgtaggttatatctctccaaatttacaatactagaaattaaaactgattttaatactgtttcttaattcatttaaaaacaacaataacaaatctattgtggtacagaagtaacatagtttatgaaaaataactatattttccaaaacaaaaacaattagaagattaaagttatttcatatttttacaagtctctttaacaatttacttgaaggtagttggattcctattcacatctgcattcaatctattatgatatgattgatgttttaattgatgtatatgaagaaaattcagccttacatagacatgtttttggaaaaaggaggagtattttaatagccttttcagataattgtagatacttttctttgacactacactcccaaactcaacaagctcagtgtattcaagctcagactgccataacaaaataccacagactgggtggcttaaacaacagtaatttattttctcacaattctggaggttggaagtccaagttcaggttcaaaagcagtctgctattaagcacattcatcaagttttttaaattttatgttctgacttaagccaggggcctgccaggaatcagtagcagaccagaagggacagaggaaggaatgattgaactgaaatatagaacaatagaaactacctacctaatcaaaatagcaaagagaaagcaggctggaaaacaaaatgaacagagccttgatttaacaaaagatttaacactcgtgtcattggactactggaaggaggtgagaaaaagaggatggggctgaaaaagtacctgaagaaataacggccaaaaaatcccaaatttggtaaaaacacacaaaccaaccctacagattcaggaagctgagcaaattccaaagaggttaaacccaaggaaatccacatcaagacaaaaaatacatttctaaaaactaaaaacaaaacaaaaatcttgaaggcagtgagaaagaacatctcacctatgggcgtaaaaattttgaatgacagcagatttctcttcagaaaccattacagtcaggaggaagtggcacctttctcaaatgctgaaagaatagaactatcaacccagagtcccatatccagcaaaaatatttttcaaaaatgaaggagaaatcaagacattctcagatgaaggaaarctaagataattttttgccagaagacctatcctaaaagaatggctgtagttctccaaacagaaaggagacaattttttaaaaagaattcttgggacatcaggaaggaaggaagaacatgataagcaaaaatatgggtaaatgcaataaactttccttctcttcttgagttttctaaattatgtttgacaactgaagcaaaaattgtaacacagtctgatgtggttctaaatatatacagaaagaacaaacagaaaacaaaatataaaatgacagacttaaaccttaatatatcaattattacattaaatatcaatggcccaaatacaccaattcaaagacaaagattggcagagtggattgaaaaacatgactgactacatgctagctacaagagactcacttcaaatgtaataatataagcaagctaaaagtaaaaggatagaaaaaatcacatgcaaacattaatcaaaagaaagtgggagtggctatataaatatcagataaagtcaacttcagagcaaagtaaattactggagatagagaaggatattattataatataatgataaaagggtcaatcaggaagacatagcaatcctaaatatgtgtacaccaaacaatagacctgtaaaatatgtaaggcaaaaactgataggagtgaccacaattacaattggagacttcaacactcatctcccaataattgatacagcaactaggcaggatatcagcaggaatacggaagaacttaacaacaccatgagccaataaaatctaatcaacacatatagaatgctccccgtaacagcaacagaatacatgctgttttcaagcgcccacagaacatatgctaaggtagaccatatcctggatcataaaacaaacattagcaaaattagaagaattgaaatcatggagagtattttctctggccacggtggaatcaaaccagaagtcaataacagaaagatatttggaaaatatccaatcacttagaaactaaataatgcatatctaaataatctgtggccaaagagaaagtctaaatgtaaattttaaaaatatatcaaattgaatgacagttaaaatagaacctatcaagatttgtggaaccagctaaagcattgctgtgagggaaatttatagcatcatgcataactagcaaataaagwattctgaaatcaacaatctaagcccctactttgagaagccagaaaaggaagagcaaaataaacccaaaccaaacagaagaaaggaaataataaagttaagagtagaaatcgataaagttgaaaaccaaaaaatgacagagaaaaccaatgaaacacagagatatttctttgaaaagatcaataacatcaaaaaattctagcaaaactaaccaaaaagagaacaagacagaaagagaagacacacatgaccaaaattgagaatgaaacaaagaataacgctacagaccccacagacatcaatacaataaggaatactatgaacaactctgcacatataaatttaacaacctagtagaaatggaccaattcctcaaaaaacacgaactaccacaattcacccaatatgaaacagataatttaatatccctataattactaaggaaattgaatttgtaatttttaaatttcctaaaaaaaaaatccccaggaccaggtagttttttttttwaattatattttaagttctagggtacatgtgcacaacgtgaaggtttgttacatatgtatacatgtaccatgttgctgtgctgcacccattaactcatcattaacattagatatttctcccaatgctatccctcccccctccccccaccccacgacaggccccagtgtgtgatgttctccaccctgtgcccaagtgttctcattgttcaattcccacctatgagtgagracacgcaatgtttggttttctgtccttgcaacagtttgctcagaatgatggtttccagcttcgtccatgtccctacaaaggacattaactcatccttttttatggctacatagtattccatggtgtatatctgccacattttcttaatccagtctatcattgatggacatttgggttggttccaagtctttgatattgtgaatactgctgcagtaaacatacgtgtgcacatgtctttatagtagcgtgatttataatcctttgggtatatacccagtaatgggatcacggaatcaaatggtatttctagttctagattcttgaggaatcaccacacagtcttccacaatggttgaactagtttacagtcccaccaacagtgtaaaagtgttcctatttctctacatcctctccagcacctgttgtttcctgactttttaatgatcaccattctaactggtgtgagatggtatctcattgtggttttgatttgcatttctctgatggccagtgatgatgagcattttttcatgtgtctkttggctgcataaatgtcttcttttgagaaatgtctgttcatatccttcacccactttttgatggggttgtttgatattttcttgtaaatttgtttaagttctttgtagattctggatattagccctttttcggatgggtagattgcaaaaattttctcccattctgtaggttgcctgttcactctgatggtagtttcttttgctgtgcagaagctctttagtttaattagatcccatttgtctattttggctttcgttgctattgcttttggtgttttagtcatgaagtccttgcccatgcctgtgtcctgaatggtattgcctaggttttcttctagggtttttatggtttttaggtctaacatttaagtatttaatccaacttgaattaatttttgtataaggtgtaaggaagggatccagtttcagctttctacatttggctagccagttttcccagcactatttattaaataggggatcctttccccatttcttgttgttgtcaggtttgtcaaagatcagatggttgtagatttgtggtattatttccgagggctctgtttggttccattggtctgtatctctgttttggtaccatgctgttttggttactatagccttgtagtatagtttgaagtcaggtagcgtgatgtctccagctttgttctttttgcttaggattgtcttagaaatgtgggctcttttttggttccatatgaactttaaagcagttttttccaattctgtgaagaaagtcattggtagcttgatgaggttagtattgaatctataaattaccttgggcagtatggccattttcacgacattgattcttcctatccatgagcatggaatgttcttccatttgttggtgtcctcttttatttcattgagcagtggtttgtagttctccttgaagaggtccttcacatcccttgtgtgttggatttctaggtattttattctctttgaagcaattgtgaatgggagttcactcatgatttggctctctgtctattattggtgtataggaatgcttgtgatttttgcacattgattttgtatcctgagactttgctgaagttgcttattagcttaagaagattttgggctgagatgatggggttttctaaatatacagccatgtcatctgcaaacagggacaatttgacttcctcttttcctaattgaataccctttatttctttctcctgcctgattgccctggccagaacttcaaacagtatgttgaataggagtggtgagagagagcatccctgtcttgtgccagttttcaaagggaatgcttccagtttttgcccattcagtatgatattggctgtgggttggtcataaatagctcttattatgttgagatacgtcccatcaatacctaatttattgagagttttaacatgaagcactgttgaattttgtcgaaggccttttctgcatctattgagacagtcaagtggtttttgtctttggttctgttaatatgckggattacatttattgatttgcgtatgttgaaccaaccttgcatcccaggaatgaagccaacttgatcgtggcggataagctttttgatgtgctgctggattcagtttgccagtattttattgagggtttttgcatcgatgttcatcagggatattggtctaaaattctctttttttgttgtgtctctaccaggctttggtatcaggatgatgctggcctcataaaatgaattagggaggattccctctttttctattgatgggaatattttcagaaggaatggtaccagctcctctttgtacctctggtagaattcggctgtgaatctgtcaggaccaggtagtttcactgcagaattttaccaagtgtttaaaaaattaacaccaattctatacaatgtcttccagtaaatagaagaggaagaaacaattccaatatattttaaggagctactattatcataatatcaaaaccagacaaagacaatacaaacaaaactgcagacttaacatccrtcatgtgtatacatgtgaaaatctttaacaaaacattaacaaacagaattcaacactgtgtaaaaagaattatgcatcatgaccaagtggggtttattcaagggatgcagggttggcttaacatttaaataccagttaatataatccaccatattaacgggctaaagaagaaaatcacatgatggtatccatcaatgtaggaaaagcaaattcaacacccattcgtcataaaacacagaaaaagtaggaatagagagaaacttcctcaccttgataaagagcatttttaaaaactatgttatacttactgaatgctttcccctgagattgggaacaagacaaggatgccagctctcatcattatattcaacatagtgctaaaagctatagctagtgcaaaagacaagaaaacatatacaaattcaaaggaagaaataaaactctccctgtttgcagatgacttgattgtctacataaaaatcccaaggaatctaaaaacacaaacctcctagaagtaataagtgagttcaggaaagttacaggatacaagctaagcatacaaaaaaaaaatgtattttcatacactagcaatggatacgtggacaccaaaattttaaatacaatgccatttacaatcactcaaaaaaatgaaataggtataaatttaaccaatctataggatttgtatgatgaaaattattaaacacagatgaaagaagttttaaaagcctaaataaatgaagagacttgtgttcatggattggaagacttaacatagcaaagatgtctgttctgtgcaatttctatcaaaatctcagaaaaatcagtatagatgtagaaaagattataaaatttataaggaaaagcaaagaatttagaatatctaaaacaattttgaaaaagaatgaagaatcagtttatctgatttcaagatttattatatagaaatcatgacagtagtattgacagagatatgacacatagatcaatggactgagtagatgacccagaaagaaacccacacaaatatgcccaacctatttttaacaaaggtacaaaagcaattcaatggagtaaagatgataaccttttcaacaaatggtgctagagcaattggacatccgtaggaaaaaataatgaaaatgataataacttcaacctaagtctcacaccacatgtaaaaattaactcataatggaccatggacttcaatataacatgtaaaactctaaagcttgtagacaaaaagtaagaggctgggtgtggtggctcaggcctgtaatcccaacactttgggaggccaaagtgtgaggattgcttcagcccaggagttcaggaccagcctgggcaacttagtgagaccttgtcactactaaaaataaataaaattagctgggcatagtggtgcacacttgtagtcccagctattcaggaggctgaggcaggaggtttgcttgagcctgggagttcaaggctgcagtgagctatgatcatgccactgcactccagcctgggtgacagagtgagaccctttctcaaaaagaagaagaagaaagaagaaaggaggaggaggaggaaaagaaggagaaggagaaagaggaggaggaggaggaaggaggaaggagaggaagaaagacaggaagaggaagaagaagaagaagagaagcagaagaagaagaagaggaaagcaaatccataaaacaggcaaaaaaatcctgtgacaaggataaaaagacaaaaaaaaaaraaatcctgtgacaaggataaaaagctaagctatggactagaagaaaatatttgcaaaccacaaaaccgatgaggtactggtatctaacatatacaaaaaagtctcaaaactcagcaatttaaaaatccaatttaaaaatgggcaaaagacatctcaacaaagagtatatatagatgacaaataagcacgtgaaaagatgtgcaacatcattagtcattagggaaatgcaaaataaaccctcaattagatattattacacacctatcagaatggctaaaatagaaaatagtgacaacaccaaatgtcgatgaagatgcagagaaattggatccacttgtacattgctggtgggaatgtaaaatgctacagtcatttaccatactggaaaacagtttgacagtttcttaaaaaaaaaagaaaaaagaaaaatcaactgccatacaacccaacaattgcactcttgggcatttattccaaacaaatgaaaacaatttgttcacacaaaaaaccttacataaatgtttataataccccacaactaggagtaacacagatgtcctttcactgattgatagttaaacaacctgtaatgcatccacgtagggaatactacccaacaataaaaaggagcgaactcttgttacacacaaccacctagaggaatctccagggaattctgcagaatgaaaaaagccagtcccaaaaggttatataccacatgactccatttatataacatcattgaaagaacaatattagagagatggagaacaggctagaggttgccaggggttagggatgaggggcatgactataacagggtagcccaaggaagccttgtagggatggaacagttctacatcttgattgtagtggtggtggtgacacaaaactacagataacatttcatagagctacacacacacacacacacacacacacacacacatcaaactgctgcatgcaagckctgtagattgtatgatgtcacaagactggtttttatggcatgctgcagtagtgcaagttaamcttggggaagtctggagggaggtgcatgggatctctctgtacatttctttgcaatttcttttgaatcgataactatttaaaataaaaagttacaaatagggctgggggcggtggctcatgcctgtaatcctagcactttgggaggcctaggaaggtggatcacctaaactcaggagttggagaccagcctggcaacacggtgaaaccccatctctactaaaatacaaaaaagttagtcaggcatggcagcatgtgcctgtaatcctggccccttgggaggctgaggcaggaaaatcgcttgaacccgggaggcagagatctcagtgagctgagatcatgccattgcactccagcctggatgacagagtgagactccatctcaaaaaaaaaaaaaaaaaaaaaaaccaaataaatgaataaatggattgagagagagagagagaaggaagctgatagggagccctatagcatccagtgccctctgctgctgctgtttgtcgggcgtttctaagacccacggcacttatgcatattatattttagttacccctcacaaaaatcctgaaaaataggtattatgatctttatcctccagatgaggaaaaggaggctcaggaaatttaagtcacttgcccaagaaagtatctctgtctctccagggcacacacctgtgaccactctttcacaccccctctgccctcacaggccacacacaggccatctgtaaaatggggacaacggtggcatcttatgaagatccagcaaagataatttatgtaaagtgtttaccagagtagctggaatgtagtaggtgctcatgaaatagttatcaaatgaatagaatggctagatgcccgatgcatgttagtgaaaggggcagccctctctctggggcctgccactcaaccttcccagtatcagacagagagacccctgccagcaggtggacttgcactcctgagatggtctctggacccaggaggggcaaagcccacccaggctggtctgaatgcagaaggcaagggccaggtccttgtcaaacccatccctagcctagagccagcacatcggggacactccacaccacggttaccttcccttctcctttctgacctgggtccctgtcatgtcacccacccctaactaatgccatctttccccttttccagagctgaacttcgtcacccagtccctagagccagcaagacatgggccccagtttccagaccctgacacctctcatttaaccagaagacgtggaggggtgagttggagacgggggcttgactggggggtatcagcctgggaagagagctgctgggggtgggggttgccaatggagggtcaactgagcaggaacccagtgtttaaaagcagctgtcctctctgtcatcctattggggacatgtgtattatttatgcaacattgggctggtttggggaaattccctggaagccctatggcatttgaattaggagcatggtgtagactgtggaggaggaaggccccatcatgtcacatggtggatggttgtcaatccagggtctgtcccagcactggcactggggagcccaggcggatctgacactgcctctgccctgggaggatagaccggtgcctgaatgaaaagccagccacctcacctggtcctgcttcattcttctaccctctgggccatgccccagcctgcacatgaagcgttggagctggggtagtcaggtgggcttactgggacatgtgctaagtgctgacagagaggacaggagtggcagtagtatgtttattggttattgagagcttggcagctggactcagtcccaggttcaaatactagctctgcaactgggacagcccctctgagtctcagatccctcatctgtaaaacggcattttgcagatgattcatgtaaagtgcttagcagagtagctggaacatagtaggtgctcattaaatacttaccaaatgaatagaccttctaggtgcatgatgcatgttagttaaatggggcagccatctctctgaggccagaacaccactcaaccttccagagccagcatatacagcagctctgtgagatttctgtggctccttgctgaaatcaaccatgtcttcctctgtgctcctgaagccctttcttggggcctctgctatttgccttgcttggccaaccttacattagggtgatatacaaatcttggagtgcatgccccatggacccaacatgtaagagatcagagctctcactgctcatctttcagcatcagacacaacttacgttgcacaagcttstccycsgagccagagcttagagtygccatctcatctgaccttcccagtagccgccattagcccttttcacaaatgagaaaactgatgcccagagagaagaaactttgcagccagcatgcaaccctgagcttctaactgtgcaagcaagcatcactggcttcctactgcctttgtgcctgcctgaagatgagtaaccacagactcaactcagggagggagcaaacaagcagatgggccacatgccyccctgttcagccttcagacaccacccagacctcttgcttcgctaaagtttggtttcttgcccaagcactttgggacgaaccagattgtttccaaacacattacataattgctcacatatttatttaatgccatctcttgaatattaaatgacccataatacagaacagaaacttgagcatctaaacccagcagcttttgacaggcataggtggggaaggaggttgaggagagccatccacaagccatcctcagggagaggcggtgacgtcgctcctctcctcctcctgaaatgggttgacaaaggcttcccatgcccatcagtggaaaccaggtagtggaattttcaccatggaattcaacctgttttgttatataataacaaagatgcatcatcttctctctaaaggatgctcgaagccagggcttagctacctgtttatttggttacaagtgtttattgagcactctctatgtgcggtcatygttatacttttattcacctctcatgtgcctttatgaatgggacaaagagacccctggcctcagtgggactggggagggatgaacagggcccaagataaagtggtaatgtgagcagagggcccctgtgaggagtttgaattacaatctatgtgcagtggtgaagttattgggggtttccagtggtccgatcaatgtttgagaaacatccttccaaagccaggagaggayggggggktgaggggcacatcagaaagggccagatcacagttctaggttgggggtgccagggtggtggggcggggagaatccaaggaggacatgagggccacccagaccctaagtgatgaacttctagcctcagaagtgggtctgtccaaggtgattctaagtttctccaagggcagygatggaggacctgacctgatggccagtaggaatcacagtcacaccaatgttaataatcatctcagtgcctaggagtccctaagtacccactgcgtgccaggcattgcgatgagccccttgtcctcactaccagcctgtggcatgtacaattttgttatcctcatttcacagaagaggaaagcaaggcccagagtggttaagtccaacgcctggattgccaggaagtagcatctctctccacacatacaacccatgttggttgaatgaattcatagtcacaaaaatcaccatagcaatcacttaatgcagggctcgccttgtgccagggcctgttctaaatgctttaaaatttttaatcatttagtcctcacaacagccccataagacaggcatgaccattcttatccccattgtacaaaggaagaaactgaagcagagtgttcagtgttaatcccacccgagttgggatttgaacccaggtagtatggctctggagttcagattttcagtaaaatgaagtgcaggtggaagaagtagcatctgctgggaaccagcactctgacccggcactgtctgcgtttccaagtctggggtcaaagccactggctcactgtcgatgggacattcagcagcactacttttggggcaggcctgggctgagcccgaggggagggagtgtgtgccagcagaccctcaaccctgagggctgacctgttctctctggagccagagtgaaaggtcctcccagaggctgcccctcctgcaactgccaagatgttccaaccacaaagcagctcgagtcactgcctcaataagggaatcagggaatcttgtcactctctttgccagcaggaacatccagagaggaaaaccaactgagggaagttgtggagtcagaaaacgkttatggaaaatgttttaccccaagactgtgccagaacgacaactaaatcctccccagcagaaaccctttctaactaaaaatgacaggcatctttccttataaataagttcaatcggcagaatttccacgtcagcaacgtattaggcagttgtaatcaacaccagtttacaaagcaactgactcatccctccttaaaatgtgggcaataattcccatctgaggggccttgctgggggatgggagccctttgtaaaaggtggaaattggcacaaagtagggctttaaaaggacttgaggattcttaaacagcttatccttttggggagtttgaacttttccctgcaatcctgctctcttcaaygagagaacgaaggaaaaaaacgtgagccctgtctgtggccagactgccccagtctaaaactcagggaagggaacaaagaggttgcatcaacacacaccccaaacctctggtaaccactcgtcagagccagggagctgtcgcactaggcctcacttggggaggaagcgtggtgcggtgggacactccggccgcaggtcgtctcccctctgccaggtgcaggtcccggctgtgcagtcctggacaagtttcacttaagtgcttctcacctcagttttatattctttaaaatgggagtcctcctttttgaggatgtcggaaggattcgatggaagagaaaataggatatgcccagcttagggcctggaatattgacaactgctcagtgagttttgttcttttggtggtccccggtgggaacaatcgcytcaaatggtgaggacctcaggcgcctttgctgggactgtgtcggtcgctctcagccacctgagcactgcgaaaagagagtctgtcatctgtattagtttgtgagggctgccgtgacacatgaccacaaactaacagaaatgtgttgtctcacgttctggagactaggagtccaagatcaaggtgtcagagggcttggttccttccgaggatggkgaggctgactctttcccggcctctctcctggcttccagtggttcgccggccatctttggagctccttggagtagagaagtagcactctagtcccctgccttcacatcgtcttcccccagtgagtgcctctgtgtccaaagatcccctttttgtaaggacaccaaatcattccagattagggcccattctartggcctcattttaacttgatcacctctgtaaacaccctctgtcaacgcccatctgtacctcacattctggggtatgaggggttaggacttcaacctatctttttgggaggacatagttcaacccttatccctatcataatgatttgaagctgattctggacagaccaccagttctttcatgatatttaagttcccaaatagactcgaagaatattttacatcattctctagaagtctgacatccttctaaaaatcactgatatcttagcttccaggagatgcccattggcatcttaaactccaatctgagactgtggggtcattgtcttacataaagagcctgtaagtttgaagctgagctcttyctcagcacaactatatgctagactctggagacacgggaagccagggacttagctttcaaggtggttacaggcaggaaggccacaaaacaggtaagtacgcaactggctgttgttggataggggagtaccaggaagatcgttcccaaaataatcttcaaagcgtgagagaaagaggttttcttcctgggtcacctcctgtctttgtttccctagagaagtaatgtccttcctgggtggtctgagaacctctggggagcccctactccctctcatcagtcacttgactttcattctgagataacacctgctcttgagtcttcccccgggaaggtgggaagtagcacagagacatgagcccatcacccccgcttggctgggatgcccagagaggtggggggtcagtgctggaccccctttattgccagctctccatttttttcctcccaagtcatctcatggatctgggaaagttaactaagcttccccatcccaaatatgagcagttcccacattgcttgaactgagagcctacaatccatattcacacactgacaccagcaccaagcaagtagccgggatcacgggcatgagccaacgcacctgcttaaaccgtatttttaaaagcaaaaggctgggaagcgaaggaagtcgctaggttgactaaataatatgtttgcagcatagatgttctgctatttgtcaaacaggagttgctgtgattagcaaaatatcaattcacataaaagtgaaaaatatattcaggggtgtgttccttacaccagaaatatttaagataaaacacacgttggcacacgaaggaggaagattacagtggctaggaaacttgctcatgtggaaagtgccccttctccaaggatgctggaggaaggacaagttgctcagcaggaaacaataaatgttttcttcctgtttctctatgaagagaaagtgatcaggcacattatagggcacaagcaaggagtgtcatggggcccagaggcaaggtgggtgggggactctgttacccttttttccccttagtccagagaggcttcctggaggaagcaagattctgtgctgtttggcccaggctctcctggcctggcatttccccacgtgacttgtttcagtggaagcttccttgggttgggccagatgcacgcgtcgtagccaccctttccccacgttcccagggctgctccatgccagccagttgtacagagagtcctcagaacaaaagaacttccaggtagccagggctgaagccagggtattgctgataggatcaggagcctcatgctcgtgagaacaaaagcccaagaagaagccaggggtacagagttatgcccgccacccatgttgcttttgacagagaccactgttttgccgattaccgcactgtgaaggccagcccacagaccttagtggccagccctgctcccctgcccctccccaccccacctccctcctcaccgatcctcaggccagaaagggaggcagccctgctggcagccaggcctsggtgccgtggccaccttgcagggtgtggccatacgctgcagacttctgcagtgactgtaggtgctggagccgagcagtcagagagggtacttgtgtccgtggcctgaaacccagcggggacaccgggtgattcaccgccatctctggccaggtatgggaggctgggttcgcgaggcactccccacagccctggactggttggtctcctcagaagcctgggtctccagttcagggcagggcagtggtggggaggtagggggttcctgagatggaaagagtataaggagaggaacctgtgaggctttgagtccttgtctcagagggagagtggagggcaagccctggcccaggcaagctctgtaggtattgatgaggagccccaggagggactgtctctggcctcacccagctccataggagtgctccctccagagggcggtgaaagagtacaagagcgtgggctctgtagccagaagacccaggttcaaatcctgacacccaggtgtccatttggacatttacctccatctctctgtgcctcagtttcctaccctgtaaaatgggggtggtggtaacagttcctatttcataaggctgtgtgaagatcaaatgagataagcgagggagcccttcaacacaggcaagtgtccagtaggtgctagctctgagctgccccctttccctccctgaacatgggagccgccctcagaggcagcaaggttgatgctggaaggaaaactacctgcccagctcagaggtgcaaatacagaggagatgacctaggtcatggtgtcagtttctgagtcagacagattggagtttgaatcctgtgtttgcaaacggtttagctgggaaggcttacacacgctctcgaccctttgaccccattttaaaaacccatgaaatggggataataataggacctagcttgtgggttatgtataaggatgaaattacgctgtacacataamgggcttatcccatgccttatacttaaattgggagctagtgtcaccaccaccaccaccatcatcactatcatcatggttactattattgttattattattaggaaatagagactcagagaggggaagggactcgccagcagtcatgtagcaagtcagagggcaaggcaggacccagtcctgtcctcctacccctcagtccctattctttccactccccacaccccctcactggccctaatgggtccttcttggccatccgcacactcatcacagacagctcccgctgacttcattggttctgggcatgggtctgggggtgccacacaggggaatctggcatccccccaagaggttgagccagcagacagcccaggttggaggctaccttgtccccgtgacccacarcacccctctaaaagccctcccaatccctgtgtccagggatcactggccagggaaatctctgagggggcgggatatagctttggaggaagctgtcagggaactgcagagctcctcaagctccttgcaccccaaggaactccttaaatagggaatgattggaaccccagcttccaccaaagcttccctgggctttgaggacagtctgggggtcatgctcaagggtcttctgcttctgttggccggtacacaccgtctttgcaggctttgctctgtctctcccacctcctggccctcccaggcagagatgaacagagacaaaagaggaggcagaggagagaggagaaggagaggatggggtttgctgtaaggagaaggaaggctcacacacctgttttaataatacaaatattacacacacaataatcctcatcattcctatttattgaacacttactgtgcaccaggcactgtgttaaggacttgatatatactgtcccagttcatcttcactacagccttatcaagtagaaaattattatacccactttgaagatgagtaaactggaagggtcttattcatctactgtgtaatgaatacagttgcgaagcagatgatacaaaacaatgacagagaatgagtgaaatataacagggagtcctggggactgtggcaaattggagaacctttttttttttaattgaggcatgatacacatagtagataaagtgcactaattttaaatgtaccactttttacacgggtttacactggtgtaaccaccgcccagattaaaatatttcttgtagcccaaaataccccttctgaggtattcgaatttattttttccaaataatattctgcaaaactgtcccagccgagaggaacctaaggagacatggtgactaaatacaatgcagcaccctagatggggacctggaagaggaaaagggtgttaggcaaaaacagaggaaatgtgaataaagtgcgggtgttagttagtatcaacatatcaatattgattcattgattatgagaaaggtatcattctaatagaagatgtgaataataggggaaactgaatgcaggacagacaagaactctctgtattgtctttaggaatttttttgtaaatctaaaactsttctaaaacaaaaaggttatttcaagatattgtacagataaggaaactgaggcccagaagagcaaagcctcttactcagggccccacagcagcagtggactaactacaaccaaaaggctggtyggtgctttagctgccaagggtggagttaggggatgagggtgtcaggggtgctgaggtcttcttgaatctgtaagtgccttacagcagactcacctctgcaggaagctggctacacagcttcccctctgctgcctcctcctgaactgtccagggctgtttgttgaaaaccagttctcccactggccttggccccagagggagtgttcataggtagctcctgttctgagagcaggatgtcaccgttccactcctgccagtctcgatgcaggtatctctgagcctcccatgcccagcacaggggtggcatgagcacaaggtgttggttgagtgttggatggataggtaagtgaaaaaatgaaggatggaagaaatgaatggcaagctgggtggttgaggggattccagggtgttagagactgccaagagcatggactctgcaaacagatggccagggtcaaaccctgactctcccacctctagccaggagaggttacttaacctctctgtgtctcaatgtccttgccccaacatggggaaaatagtatacctgtccttagagggctgttcaggttaaaggagttgattgacatgagggagggaagtaataaatagaagagggaaggagagctggggagatgatgaattagttgtcatattgagagatggaaacttggacaaagccataagactggccattctcccagaaaagaggaagaggagcagcactgtacaatggttagagcacagatctggaggcagagctgccagggatcaaatctcaatgccgtcacttaccggtcatgtgactttggccaagtgagttaacctctctgtgcctcggcatgctcatctacaaaatgggtgtgatagcaatggcactcgcctcaggacgtggctatgagaactaaatagttgcctggtgtgggtatagtgcttagaattgtacctgatacgtttactacaaccctggcatatcatgagtgcgttttaaataaataggaaaggttttgtgccagaagcccaccccctcccttgaagaggctcccacgttcaggatgcaggtccaggcgtcacagactcacttacctcctgggtccagggcagaaagtgcccttaatgaagtcagctggagaggggatgacctagtggccacatgttcatctctgtggcctcatccgcctccagccaactctggatgggcaatgctcacgatattttaagagaagacagaaatctggattcttatgcacaatccccccatttttaaacattggcatttaatgcaattttattttaagctctgagcaaaacaaacaaatgtattttcagtgggctgctctcacaagtagctggtttgtagattccctccagtctagtcctgccagttcactttcttttatttttttttttttctgcattttagagaagaggaaacgggggcctagagataaatgcctgggctctgatatatttgaccacttagtggagccaagttctcctctcccctgctaccagccacatccaggatccccgaataatcaagcgggggaggaagcatcaagggggcatttttcctgtgaaccacggtttttccgatggcatatttgaaatatgatttaggttagccagacaccatttgcaccatgtgtcagaggtgctgctgcatataaagcaggagccttcaccacttccaaagctgtagcaaagattcgcaatttatggaacccaacttcacttctagccctggcccagcaggctgggcaccaggattccgccttccatgagcaatgagggctagggtggcctgccagagaggagtaagttctatggtgaaggaagtcacaaagtaaatgctagagaggctaacaaaagttgggggacatgttcaggagaaacgtttaagagtgatttttttaatagaaagttaaaagcttgtcatactctgaacttggattgttttattcttttctattgaaaactgctgtctggttcccacctactcaacctgcctgcacctccaccttcccatctacaaaatggagacaaaatcataactcactttgtacagcttgtgatgaggatggaatatgacacttgtggaggattaaacaataaaaaccagccattgtcactgtcagcagctgccagcccacctgtttgcacaagcagtggctcaagagcctttcactcttggcctctctttaccctcactatccacatctgtgaccttcactttgaagagtccagtgcatctatcagctgtggagcacctattgtgtgccaggtcctgtgctaattcttccacctgtgtcctctcctgtagtcctcagagcaaccctgggtgccgacatcatcgtcaccatctctgcagctgaagaacctcaggctctgggagaaaacatgaggcatccaaggtcacccccaggtgtcagtgtgaccttgagcaagccccattacctctctgagcctccagcttcttcatctgtaaaaggaggttcaggacacctgccccaggctgctgtgaggctctatgaggtaatgacttcaaaagtgcaccatcagctgtagatcccagacaaacggatggtgtggatgtgagtccttcagaggcctactcctgttcgggattcagcacattttagcagtaagggctactgagaaaagttatttcaagtgtctttttcttgggtggtttccaaacacatctcctttctccagctaacaagtccaacactggcttcagcagaagctatgcacacagaaagttacttccrgtggaatgaccaggaggtagaagggagataggcatgatggtcacagggaagagaggatcccagggaaggtctcaggctgtgcagtcaaacagatatgggatcaaatcccagctcctccacttactagctgtctgatcttgagacaactagctaacttctctgagcctcacacagggggttattatgatgagggggataagcacagcagctgagaaaaggcaatacacacgtactgaaaaggaagcctcctcaaatagggcacagcagtacacatacacgggaccacgaggagctggagggtggacactgcacttttcatcttggcaacctggctcacagtaggtacacagcatacatttttaaaaataaaaatttacattcattttcctttctgccttgtgsccacccacataatcccccttgtctttcaatccccaaccccactgtcccacctctgtgaactgtgaaagaacacagactgttacctgacaaacgtgggttgaagtccaaacactgccctgcctggctggatagtcttggataagttacctcccctcgctgactctcagtctcctcttctgtaaatgggctaatattgcctccctagcagggttgctgtaagagttagagatgatgtatgtggctggcgtggcctctgacacagagtaggcattctgaaagtggcagcagaaatgctgttgttccttccaaatgtagcccatggccacctctggctctccactcacactcagactaactccctaaggagttcacaatcaacttgtctctacatctcagatatcacaatacaagcaccttgggtgtatatatctctaaagagtgacatttcacctccgttcccacaatcactttacacagtttccacactctcgctgcttctatattggttggacttggagggattaacaatgtccttaaaacaccttaaaaaggagcatcaacagacaaatcattctggatcaagaacaaatggcccagagattaaacacctgtccataatcaccgacattatccactggctatgggtttattcatgcccatgaaagttcccagactgaaagttcaygaatgaaggattttctggtcctggataccatcttatcctcaaagatagcctgcaaactcttcactgttacttgactgattgtttatgggggcttctctgatgcctccagatcaaggctaaattcttgagtggtaggattggctctgcttccctgtgaggatttgtgtgggggcaggtgcagggcttggcaggaaacccactaaggtgggtcacacaggggctggggtgccacagagggacaatctactccttgggatgtgtgccccggaagtctgaagctggcaagggtctcaggcaaaaccttgtccaatgtctggctaatatccatttaccttgcacgaaatgcagaccctgttctgggagccccctcctcagaactgcaaacagagtctgccctgttattagctggaaaagtctggctttaacacctgacactgtgggaggattgccacagccacatgcaaggggcttggagagtttatctgcagtgacatagtctagttgccactctgaacctgcagtgatgtgtggcctgccgaagccacgtatgccatatagtttgttccaatacaaatcaaaatagaaaggcactcttttttatttgggtaggcaaagaaaaaaaagaaaaaaaaaaaaaagaggccaggtgtggtggctcacgcctgtaatcctagcactttgggaggcccaggcaggcagatcacttgagattaggagttcaagaccaacctggcgaaaccccagctaaaaatacagaaattagctgggtgtggtggtgcccgcctgtaatcccagctactcgggaggctgaggcacaagaatcacttgaacccaggaggtggaggttgcagtgagccgagattgtgccctgcactccagcctgggtgacagaatgagactctgtctcaaaacaaaaaaaaagtaaaagaatatttttataatctctaagtccaccctctcttcttctgcattcatttaggatttctctccacccgcctcccacagtgaggaggtgaggggttctcccagcctccactattacctcgcaagggcaggagtctgatcttaaaaccggcacccccctcccstgctgcttgctccagcactggctccaacacctgggcctctccctccaggcccctgagctaattacaggcttccctaaatcattgtaaggaaaagctaattaaatcagggttggccattaattttctrgctaaggacaggcagccgacacctctcttcaattccagaatccagaaaccatggcttggagcttcctttgaggttgggaatagagttttatctgttagggctgattttaggaagagcagcatgtcccagtgaccatgagggatcaggstggggacctgaaaaactgggctgcagccaaatgtatatggtaaagggtatgaggaggtgaagtcagatgtccctgcacccaccaatagcagttgtatgatgtgagaaaaacccctgcattcgatcccagtcctgccacttgctaggcaggtatcctggtccagaagtctccacatgcaaggcaggcagcatcagtgctggcacagagagtggagtgagttctgagccaatgtttgttgaatgaacaagtgactgctgagtgcctggctcagtgccacacatacagtaaacacccaaacaatatttgttctcttgtccctcttggaatcttcttttggaactataacattcatgggacgaggtggcttaagttcctaaaacctttctatcaaaacattcattggaagctttcctcctttgagatcaagggtgagagatgtcagaggtggggtaggggcaggggacacaggaactgagttctccactcctagaactccaacgcctctcacgtaccatcagatgccagcctgccctgccatgctgccatgcgtcagcatacctctctgtaaagctgggcaccttgacaggagtcccagctgtgactcttctctctttcttgctctgttccctcattagccaagtcctcaatagccccttgaaaggcccggacattgcacattgcaccttcattattcactcccgcctcggccactttattgcagacggtgagtgatgtgcttagctaattcaggggaccccaaaggcaggaaacaaacagggcaaatccacagtatggctgaggaccactctgtgtgtcaagttcagcacagtgcccggagtacagattctggagtctggtttgaatcccagctaggtgtttgaccttgggcaagctgcctaacttttctgttcctcagtttcctcctctacaaaattggcatgatgataccagtatgtcccttgtggggttgttgtaagaattaaatgagttcataatgtgccaagtgtttagacagggcctagtgcacagttggtgttccatgaacattagttattactcatgatctcagaatgaatatctcagtttatcttcaccacagcccagcctggccggagagtatgatggctcttactttacagatgaggtccagggaggggaagccactttcccatggccacacagaacaaaatccctgccccacacctgtccccgacagaggggagactgacagcacctgccggtgaaagcggggcccggggcagggcaggggtagtgaaaggagctttcaaagaagggccaggcctccctcagaggcatgagtggagttgggaggtggctataaatacgcgaggcgaggggctctgtaactaggccaggaatgtgtgttagtcattgaggtcagcacggccgcagcggcgcttggctgggagaaagcggatcaggagtgggctcaggtgaagccagagagctgaggccaaggaggggttttgctggggcaagagtggcactctcagcttgggggcatgctggcacccccagacctttgtcatgggacaagggcagattcccaggaatgcctcccctatcccttctaacctccgagaaatccttctgtagtccagatcggatcaagcctccaagctgcctaaacccacggtcctggtttccaaaggcagacgcgagtccgcattttggaggggggcaagcacatcctctctagtttaatacctgtgcacttactttgatgtgttaggggaaaaatacaactggcaaggcaaatccatgatattgtgactatgaatgcttaagataacactaagtagagagatacatatgtttctaaaagggaggtgatttcaggacagatgcaaagtatatgctagaacttgcagactggcaaacatcattactggagtttgagggtttctggtccacagactaaatgcaaatctttttgctgtgaggtttcaagccctccccaccccaaccccaccctaccttcattcttgctgtgcctgctacctggaatgcctcactggcaaaggtgaaatgtgctcctccctgcaacctgcacaggctgcccaatcccccgtctgtctactgccatttcccacactgtgtgaggtcatcctatctgcagccatcgctccctcaacgacagggaaagcaagctctgtgtctgtcttcctacctgctgtgcccggcacagtgcctagagccaagcacaggcccaggacgtgacacccagttcacatcctggagctgtcactgcctggtgcgagactgtgcatgtgcaaggctctgggctcagtcacctccccatgtatcagatggggatgacaagcttccttctccagtggggttgcacggattcagtgagtttactccacctcaaggctttcttagcccggtgcctggtatgttctggacactccacaagtagtggctgagtagcagtatcatcaatgctattgtcattattaagggccagtggatattcattaaatgagtccayagtgttataggctgaaggggagagaaaaaagaatggagcatgtatgcatttaggctggagagaaaattctcagtggctattttcccaacccctctcattttgaatatggggaaaccatggcccacactgcatccctgggaccaggacccagaatatttgtccttcagtctatggtgctccaccaccacctccctccccaggctgggggaaggggaaggggtggccgaggcgagatgcatctgcccagtgtgacacttgcaggttccccgcccccagccttcctcagctcctcggtgtagacccagtcgacctggttaggagttccagggctgtggcctgcaccgagctggcaggagagtcctcacttcaccgaggcagtgaatcaaaaggctcattctttgtagactcctcagataggtagaagcagacttgacctttgtcgttttgttatttttagcagagcaggcaaggaatgataaaaacctgtacaggagctggctataaatagcatgcctgtggctttttttaagaaacacacacacacacacacacacatctgaaaattgtagatctaaacaagcattgcccttcaaagtagaataacagcattagcatgacactttacaatcagcaagcccatttaagctgtcacttcagctcaccgtacaattccacagggtggacacttccatcatctccattttgcagatgaggaaacaaggaatgaagtcagccaggaaggctgtgggcacggcacctggcacgtggcgagagccctgtaaatatcactttccttatcactgaatctccgaaaagttgagtaacttgtccagtgccacgccaggagaaggaagagaagcaggacagatgccagggccacctttctccaagtccatgagtcccctggctggggctgaaggaagaagagttagacctggaaaggtcagaggagtggcaatggatgttatggggacaatgggatgagaactggaacgacaggatggtatctgaggtgctggcagctaagagggagtggctgtttgggaagtgcctttggggtcagcaacaagagaggaaaaaggaggagaagaagatagaagatcgctggccaacagttttttaggacaatgccatgccagggtcacctcgtccggcactgccctcctttgggcagagtgggaaatgtcagtaggctccatggtgggagggctaagagcaggttatcagcactgggatgagagccgacagaggcccaggggctggggccagggcagcctgcagcagggaggaacaggtcaaaggcaactaaatcagaaaggggtcctgaaacttgaaaggtaatgaactccaggtaaccatgttgcgggcctgcccagggttctgtggtgtgctggtaagtgtttcacaaccagctctcagggaggtggatgtcctgctttccagtgcttgccaatttctgtggtgtcaatgctcccaccttggcagattgtaagctgccaatatgagatcactgacaacacaatcggctctcacaagtcagtataagcaactccagaacaagactgctgccacaccatgccacacaagatggagatacttacgtcctgcttgtttcaagggaaaagagaaggggcttacaggtagtttttaagctaccattaattgtgcatgtaacacatgataggcaaagtattttacaggcagtatctcagttaattctcaggacacaactccaaagtagatatcatcaccatgttactgatgaagaaaccaggctcagaagggggaactgacttgcccaagatcacagagctcagtgagtggtggagctcagacttaagctcaggcctgtgtgaactcagagcctgtgccccagacatataccacctggcctctagcccgggtagttctgggacctcagttggggctgggttttcaggcagaggctgatgggtgggttcctctgcagggctggcagctgagagctcccaccaagtcacaggggaaatggttaccacccttgggggaggtcctgagaagattgagacactcccatggggagagagcagagcaggaaatgaccctcttaatrctgaagaaatgaacgaacgatatcttcagattccctctcattttgtttagatcagattgtctatgaattaaaagtgttgtcacctttgcagaatagagatgaaaaagcaagctagacatccctgaacacccactatgtgccatgtacatatgtattactcatttatgcctcccaacactcccataattgcaggtattgttagccccactttacagatgtattaatagaaactgaggttcacattggccaagtgactagcacaaggccacccagtggtaagtggcagagctgggcttcaatcccacatctctttgatgcccaagcccctgctctatgctctgtgtcccccagaaagaaacagcaccttgtatctgagaatctacttacagtttacagagatccttccatacccttcttttatttggttactgctaaccagcccctggggaggtcaggaaggctggggggacaaggtcagcactctcccggcccactgcggctgtcttgcccaataacccctgatctagtgctcttccaaccccctggggccacctgcagggggatgtgcagtgagagaggtggcccagcctttcaggaagtctcatccatagagggcctgcagagtggccactagactggggctttccccgctgctggtggcaggcctccttggagagcctatgctctttggagctgtgtctgatgaagatgagccctgagcaaggtagccccacataaggggggttccttatggggctaacaggcggccctggagtgagcacttgcctccaagccctggcctggctgcagtgtgctcaaggccggtggtgaccactctgtgggcctcaggatccctatctgtaaaatggaaagctagggctggacacaggaatgcagcggcacctccagccctgatgygccgcaagtccacataaaccagccccaaaggcagatcccaaagggaattcccagaagttttctgggcccagcatcctctggggagtaygtgggagatatgacacccttgtgggtctaaggaacccatcaagactccatcagcatcaccatctcccaagggcggccagttcctgtctgtcctcctccttcaggcttggctctggccctccatcccacctcttccctgctcccctcaaccactcactggacaccctggcagaacccaagtgttccccagacctatcacagggtagggaagaacaggcagggactaaggagccagctgcctgagtccaaatcccaactgcacttaccagctggacaactttggccaagttgcctgacatctctgtgcctccatttcaccacctgtaaaattagggtgatcatcaaagccaccttaaaaggtctttgggaagaactgaatgagtcaacacatgaaaagttctaagaacaaacagaacctggcatgtaatatcatgtccccgtctcagggccatttatcatttgcgggcgtgtcccctcttccgtctctgcatccctcctacccagctgccctggggggttgggaaaaaaccaggttctatcaagcagggctaccattaaggtcagtcaagggaacttcccagcccctggagggagcactggattgagagtcctgagcctacagctttcattcaattgcccatgaccctggcctcagtctccccttatgccagggtgccccctcagccccctgcacattcgcgactctgtgaatgtctactggctgttcttctcctcccaactgtggccctgtgcaagcagggcccctttcctccttgctgatgtgtcctgggctcggagtccaccccagatcacagcacattgagtggatcataggacctgcggaaggcaagacatgactgtgctgcactgccgcattgcagatgctgttacacgcagggccctcaccgagggcttcgtgttcatcttcgggttccatcctgaaaacccttcccagctgccccccttcccagggtaaggacagaaatctgtacagtggtccacaggggcccccactgcctctcctgtcccttgcccacactttcccccagccatccgggcctccttttaattcattgagaactgctaagcttttccagtctcagggcctttgcacaagccacaccctttgtcggcaacactgcctctcctcttacctactgaactcccactccagcctgcagaccccagctcagtcatcaccccctcgaggaaaccctctgtgaggcttcctgctcttgccagagacaccggggcctcctgctgagcatgctctcacccctctgtaaatacactttggtttgtgtgatcatttcatttcatggctgtctctaaaccctcttgagagcagacaccatgggtgtttctgcttaccactgtattctcagcacctagcacagaacctgggaaggagatgctcaatgggtatttgtgaaataaataagtcgatggagaagcaggaagcacatggcatcgtgcgcattttacaaatgaggagcctgaggccagagaggttgagagacttgcccaaagtcacacagcccatcacrgtaaagcagggatttgagcaagggccaccagactccagctcccaaactctttgcaccacttcggaattgccgcctgtgggtgcaatggaggactgaggcagagtcccagagggtggggctggagtgacagggaagggctgtggttgttctgagaccctggctgcctgcaaacctcacagggagtgagcccgcagcccctctgctcctctgcaagccttccaggaaagatctaagctctcattctaactccaggtgtgtcatactgggtttgttagctccactctctaagtctcagtttcttcatcaataaagtgggggtgatactctccacatagcaagactgttgggggcagacagtgtgtgtgtgtgtgtgcgtgtgtgtgtgtgtgtgcgcgcgcacacactttagcacccaggaatatgctcagcagaggtagctgatgtggcccctgtggcctctgagccattcaggctggacatgcaggcccctgggatgaccacattttattccctaacttcttactggtcatattcccagcagtgttggccacccagtgagtcagcagttaggcctgccagctcacagcattctcagtcgtcacccctctgctctaggaatcctctttccctgctgggtccccaaccctcttcagcaggaagacgacagagagatcacaggcttcagggaagacaatgcatatctggatcctcaatcctgtgccacagagctatgcacccttgaacaagccacacaccctctctgggctcgtttcctcacctctacgttgaagactgataacatcaaattctcctggggtagtagttaagagcctggcacacagtaggtgctcagcaaatgtcaagttccctttcctcttctgacattcctggattcatcatccccacccgctccctttcctcctttcttcacctcttctttcttcagggaggcagcctttcagcaagagtgaaaacacacacacgtcaatgttagctagggaccccagtacaggacctcacattcagtgagaggtgaataaatatctgttgcctgaatgatccaaagaaatgaattacgaatggcggagtgtcaggttgtaggtagcttggaggggccatttaggrataggggctctccttcctgggtgttcaactcaccttgagtccagccctgggctcaagcacgctggtcccagttgggacatctctgggcagtgggatctgagtggagttggggtctccttttacccttcccaagctgggcatggggagggagccccattcattgacagctcaggaaatagcaactcctaagccaggacccctaaatgcgtccaaagaatatttccagagcctaaagagatgcaaacaccatccaaaactactagcagaattgctttttcattcaacaaacctgcatttatcagttcaatcaatatttattgaggatcttttcccagtgctagggataactcaggcaaatgagacccagtttcctgtccctggggagtaccccagccagatggacaacacagatgcatataaaaakgttaattgcaaaaaactcttcttggggcatggggaaaagggggayggagggaaaatcaaggaaggcttcatggaggaggggctgctggagctgagtcttsaaggatcagtaggagttctccaggcagagaagtggaaagggaaggcatccctggcagagggggtggcacatgcaaagacgcagaggcacggaaatgcaagagtgtctttgggagcaacaaagacccactgtggggtctgagggtaatgggagcagtctggagtggttatttgggcctcatgagccacagtgaggagtttggatttgatgctgagagcacaaaggagccaaagaagggtttggaggaatgtaggcagctccccaaggctgcagggagttaggaaatggccaggggatggcaggggaggaggggggaggacagttaggagtcaggattkatgggcgggagtgggcagcatgtatgactccgcattaccaaggaggtattagctctgaggggcagcgcagatgagaccatggccttgtgcctgggaaaggcagtctgccccagagagtcctctgagagtagctcctgcttccccaagctctgcgttcttccaggaggaaaggcaccagatccctcattgtttccacagtaacactgtgagctcatggctctgaccttggcctctggccttgcagaagggaggcagggtcagccatcaccactcacctgccccacacaggtgggagcctagggtggaccctcacggggctaaggttttctaagctgtgtggccgggaagatatgcccactgctttgggaaacctaggtcccaagcagttccaggacccagattcaccccacctcccacagcgtttctgggctcgccacagggcctcctgcagttcctatttcaagctccaattcccctactcactctgtgaccttgcgctacaatgttttacctgtacctcagtttcctcatcggtaaaatgggaataaaaataggatccacctcccagggttttgtgaggaacacacgaggtgtgtgcacagaatgcctggcacatagtaggatgtcagtgtgaatggtggctggccagaattcgccagaagccaggcctacaacctcctccctgagggagcaaggaccagtaggaggaggggagaattggtgacctgcgttcaaatctcaatagactagagaccagaccagcctcagccctgcagatgctatctgggaacccttatctaccagccagaggagttggaagccacctactctccgccagcattttccctggggcctgctggagactctcaccttctgtttcttccactaataacagttgccattctcctttaacttgcaaccccgccaaataggtattatcatacccattttgcagatgaaaaaaacctgggactcagggaggtcgagtcacttgcccaaggtcacacatcctgtaagtgagagagctgggagttggacccaggtctgtgtggccacaaagcctccactcgagatctggttggctgagggagtttcaggccttggtgggagtggggagtggatgcgaggcttccatgtgactggagaggagatttcgggcaagccagcccgtgtggtcccctggatccacagtccacggcccgtcaaggtctggggctagagatcctgagttgtgtgcttcaaacttgggtaactttaggcaggcgcagagagargggcctagggtttgagtgggaccctcaatcttgctttggtcctcactggctctgtaactttcacgtaaggccctgtggtctccaggtctcaattttcttttctgtaaaatgggaagaagcctgggctctttgagggtgatctgtgggggtcagaggagacaggaatgtgagagacctttggaaataccttcttatcccccggggaacccagctgacagctctttggggcagcagtgacctgagagctgccccagaactcctacccaggtgtctacagaccccgagccaggcaaggcaagggcaggggtagccctcatccatgcttcccagaaagaagagcaaaaacagagagcccacgtctcataccgaagacacagctggcctctaattacattcagtcctctcccctcagacctgcctggacctacctcctctattgccttcgtgcagagagcctcctctattgcccttgtgcagagagcctccagcagcctgggccaagttctgtgtccccattcctagacagactgaccctattcactcaccctgtgtctcagctccaggacccctccccaagggagaaaaacatggtctggccaactaaacacagagtaaaaatcagattggctggctcctccttccgtccccctcccctatgtctcatacctttccctaaccctgactctcaatcggtgtccaccataagccaaatcatgctggaggcagaagctatcagtaatcctcccagctggcctcttgcctctttccccctcttccctgtggctgaccctgacctgtcatttccaaccttcctggagttgcaacactagtgccattgtttgtctaatttcacaacacctctgcctgtccaataccccctgcccccyaacacatcctggaaggccaggccagatgacccaggtgtatctgctgcaggaagagaaggcaaaggggacggggcaagggacagatgtctgcagccagattccaccctcaagaatgaccttaggcaagccctgatctttttcttgaggcttcggtttgctgaactgtaaaatgggagaattggataggagttctcaagggtccagcagactcattcaagcctttactgcaccatctaacacatgctgggacctgagacctggaatgctggagacatgtctgatgtggtcacagcccagtgagggagacagacgtgtagaccatcacaatacagtgtggtcagaggtagaacagaggcatgaaccaactcagttggtggaatcaggaaggactgtctggggaagcagaatttgagttggacttcgaagaatgagtagggtgggcctagaactggggtatamccacaaggaaaaaccttcaaactttgctgttcaatatttgcactgcctcaggagataggggcatccagtcactgsggggtggatgcaggcgctgaaagacatgggatctggaatgtcaaggagatgggaactcggccaggtggcagttctagtcttagggtctgaaaaccaaaatccacaactgcctgagagtttggctgctagtgtgcgttggtgagagcccagcccgtctcagacagggaccaccgggaaggtaagactcaagacttgggagcggacgagtgtcagggctcccagtgagcccacactcatgatggcctgcgcatgcaggcagccctgggcttggagtccagaggcctccgtcacaagtttggtctactctttactggttgtgccaccttgccctggccaccacatccccctgaactacacagagcttccccatctgtaccttgggtgctcacggcagccaccccagaggtagttgggaggatcaaatgatttactgttttgtaggtggcctttacaaactgtaaagtgtgccggacacagaaggcagtgtgattgttgaaatgtgtggctcataacaggctgcttctcgggctattttgtaagcagggaaagcagtttaccgccaaagatgttgaagtaataatggtgggattcctggcacagacatgtaggctggcaacagatgggaggtgcaatgggcctttccgcctctgcccgtctttgcccaccctcgctccaacatctcggaacagctttacacgggcctgttttggggaacggagagcctgtgggccttggggaagggcagatgcttggccctggtccstggggtggagctgactagggactgctgacttagaagaccacctagaggggtggccagtggaatccccccaactacacccctaagaggggtagagttcccatctgcacccgcaagatgaagcagagatgaggctgctttggaagcycccartcttgggctattggtgtggggtcgagagcctccctgaggggtgtcctgggctgctctgtcagaaccccagcagggagccttgcctggcctctgactcacacccttgccccagtggaggccaaggccttgaatgaccacccggcccttgacrtcgtagcttcgcagcatcctccctgcgttgaggccaccctgcgggctaaggggcaggtgggcacccttccatggggctgggggctgaggascaaggaggtctcagcatggcctactggtgggagacccacctcaggcgctcccaactgtctccctcccgtggcccctctgcacggccgggttctgattttggtgcagtgcagactttcagcttaacgagacaaattggtattctgtgccagcccagggatggagcggcagctcgggacgctcgggcgggcagctcagaggtgggcaggaggtgggggcaggggaaagaggcagcttctgcctggaactgcctcccggggccgcctccagccctgcccctgtcccccatgcacccctccaccctgacaggtgccctgagacactggtcctgaaggtccttccaccttcagtgccctccctccaagcagggtacccctcctggagggggcagggcagtggaggccaaggcttcagaattctagagaagcccctcgcccccggtgacctcctaaccttgctcttagggctctcctcccacccatctggagttgaaagagcagcaagtctggcagagattaggcaggaagaggtgagcagctggctaggggcttccaaccctaccgactcctcacccggggtccctgggttcccgtggaagtgtcagtcagcccacagtcggcctgcaactcatcatagatgtcctgaagattaggtgggtgtacagacatgcagacacccctgctggtgggcaccttcttgaggcaggcccttctgccaagccagcccccaccaccacacccccccgagggcaggtggggtcgcacacaggcagggcgggtcgcaggggtagcgcttcagggcagcagagagctgctgcgggctcagctccactggccctggaaacacagatgtgtttaaaatgtgttgagtcgacttctccccatttgcgacctttgcccctttgccccccaggtctgggggtgccttgactgcaaagaggggggccagagcccctgaccaaataagtcccccagaaagcaagggacgacttggggccatttgagcaaaatcctcccctctctgctcccgttctccccaccaccactctcaggacccccttccctccagcacagcccagccctaccctctccgtgcccttgacattccctcctgcttctggggagcgggcatattcctgggactctgccagcttcggttcctcatgatcccacgggaggaattaaaaccgcaaacaacagcgtggtggttcggtccacacaccccccccgccccccactctcctcccccgtgccccctccagaaccggccctccctgtgtccctccctccctccctcctcccgcccccatcccccagcctccggcagcggcaggggcggcctctgcctcccccgagattgcattttgccggcgagatgctctcctagaaccggcgccggcgcctccgccccccgccccccacccgctcgggcaggatggtacagtctgcagaggggcccgggcacgctggctgggctcagccgcggcaccagctgccgcaccgcgattacggggctgcccgccgggaaaccgtgcaggattggtggtgattttcatagccaagtaagtaccggcatcccccagcatgagaaaataaaaaataaaaagcgccccactccactctccccttcctccctcacccattttattttgtttcatttcatttgatttttctcagtgctgatggtggtggcggtggcagcgtggagggggggtgggagcagggcttgtttatctggcagcagccgaggctgcactgggagccgccgctgagggagacactagtgtgagggtccgcgtgttgtgggggacggctggatgctggggactaggacaggggggcctcggacaagcggatgcccagggtctcaggtagattccggcagcctctggactgcaaatgccccctaaggatgttatgcaagggccagcaagctggtggcaggggacaaggttctcttctctctgagccggtcccagggagaccaagaggactggagggtgcccgttgcccaccctggtcagagtcccaggaaagaggcaggaggaggcccctgtgaagcgtccctttggtggggtgggcagctgtgtgctgggactcattgggtcaggccagccgggtcatgtggtggcagggacgtgttcctgggtcccctccatggccaggagggtggcaggaacgggtggccaggccattttgcagcagtcatgctgggtggtggagtcggcaccctctgcccagaagcccacttcctaggccagcctcagtggtctccagctgagggatagggcacctgaggctcctccctgccccctgcagggtcaggatgggaaaatgcagcagggggcctcaggactccctgagggtgggttgckgmcagcagcaacccctttctagccaagtagctattccacaccacggctgtcctctgctcacccaggttgggggttgggggttgggggggtgctctggactggcctgccccaatcaggcaagggccctgggggtctcgggccctccatgcagaggcccagcctggctcgaccttcagaagggtaagtgagcaggcaagcccgaccagccggcagagggtcttagtgcgacgctgcatgccctgagcccagcgtggaaggggctccctcctctcctgcattgctctccgaatcgctgggaggaggcagagctgacgtttggggtatttccaggatcagcgggcgccatccggagaaattctcctttgacgtgtgcagtaggagggggcttggagcgcaggccttgggggcctccgcctgttaacttcgttgaaggagcagtggcaaagaaggggctgcagctctggggagtcctgtggggggttgggggtccaggaaagatgctgatggccaccattatttagccaccttcacaccctagtcccattcacatcagggcatatgcatgcccacaaattcacacatatgcacagatacaaatatagtacccataagtagtgcrtcatatatgtccraatcatatatacacatatggaatgcccrtgcccacaccccagcacctgtaaatacaacccacgttcctgaacaccacatgctcacgtgcaaaacacagcacacacacgaatgcagtacacacatacacacctgtgcatgcagcttgcccacacatgcatgtagcactaacacgggaaagcagtaggctgcacacagtgccctgcaacagccagaaatgtgtgtacccacctgagggctggctcaggtgtgaaaacaacaggcacacacatgtggggctctgaatgccatctgcgtgcctgcccrtgcattggcaggcacatggcatgctggaatgtgcccacaggtgaatgtcagttgcacacataagaagacggccacaggcacacagatgcagcacctctgcggatgctgcgtgcacacacccgccccctcagcttccaggaggcaaggtggctctgtgggtgctagggagagcttgccccttaagggacttccgatgaggacagagggatactggatcctaagtgcccgccacagcctcacacaggcgttgggggagggccagcccgtattcccasggagctgtgattagactcagcaaggccatcttgggttattgatgttcttcagagaaggctgcccaaagttggaaaggagacagaggcggccagggacgcagctgctgcccgtggcccagaccgccaggagcccagactggccccaccagccctctccctggcatcaggaaaccagcccgctgctatggggtctctgagagctggggcctggaacaccttcagcagactccaaagtcccctccagactgaaggtcagagaagctgctgtggcttacgttgtatgcagagcctgaaatgctggcaccctcctgtgctgtcccgctgccctcctctgcgttcccccagctcaggcgcaggtatgggtcaggggacccaagtaaataatagtaatccagctagcattcacccagctaactgctttgcacgtatcatctcagtgaggacgcccayagccctgttatccccacgtcccagatgaggacgctgtatctagagaggtgaagctgtgtcacccaaggtcacacagctggcatgtggcagaggggaggtagaaggcaggccaccaggtgcccaactaccctctttgacccttcggcatgaggccagttcaaattggggtaccaaaattttgggaacctatagctcaagaacttagaattttgtggcaagattccgagaaagagtgaagaggatctcctatgggtgaaggcggaggagccttccccaggcgggygtggccctgacctaggcagccrgaccgctgtgtcgtccctttaccctatggagttgctgatgcctagaaagccaaagcagacagatgccttctgaggccacctagctgggaccgtttataaaaaggaaactgwggcccagccaggcacagggacttgtccaaggtcacaccgtgttctgtagagacctgggcttcttgcaagtgctctcaggccccagacaagaagcagcagaggcctgtgttggcccctggttttccccaggtgtttgactgtgggtggaaagtatgagagccmtgggcccagccctgctcctgaccagctgtgtgatcttggccaagtcacttcctctctctgccctcaatcttctcatctgtggccaggcaggcctatctctgccctgttttatgccacagctgccagagagccctggacactgtagagggctgtgcacgaaggtgtgattggcatcaggatcaggagccggagcaggtgagcaccttgctgctgcaactggccaactctgagatcagaaagggaaaaaaggaaagaaatctctagtttgcagatcggaggtcagaaaagctgcctgtggcttatgctatgtgcagagcctgaaacactggcccatccgcctgctgtcccactgccctcctctgccttccccctgcccagccacaggtatgggtcaggaaacccattaatgcattaattaacctaaagatcacctgatgggggcagatttctgggccctaccttgatgaatcaggaggtcccaggggctacatttccacaggtacccctgggttttcacccatttcactccgcaccctggggagctgaggtgctwaagagtgggcttggtggagcacataggcgctcagagctgggggtggcctagacaccatgctgttctgcctgtacctgtcacacgtggggaaactgaggtctccaggctagtgggtgactgaatgagactgaaactcatttcctctccccaccagtcccctaccaacccctagcccctggcttcaccctgcacagctaaatcaggccctcctgaggaccgatgaaccctcaaatccaaaacaaggccatcttctcagcagacagctgggagccatgctccaagggcactctccaagaccccatctctacaaaaaatttaaaaattagcagggtgtggtggcatactcctgtcgtcccagctatgcaggaggctgaggtgggaggatcgcttgagtccgggaggtcaaggctgcagtgagccgtgattgtgccactgcactccagcctggatgacagagcgagaccctgtctcaaaaaaaaaaaaaaamcgtttaaaaaatgggttatgctatggaaaactcctgggacctcctgctgggcagtgtggcttcggcttcaccccggtcttcacttgacagtctggatggaggcggcgggaggcagggggaagcgggagtgacggtaaaagccttagaagtgtcattcacagtccaggaaatctctgcagggtcagagagttccagatatgtggccagagaccacggctggcaggaccaggagggcaagtgaccaggcccgagcaggggccacagctcaggttcctaaagaaacagaggtccctgggtatgggggagagtgtgttggtctgagggtcaggagagctgggtcccaggccggctcatcactggcgagtgaccttggaaaagctgtgtmrgccctctggtcccaagctctccccttgtgagaggggtcagtgatcctgccccccagtgtccttggtgagggcagcttctcctgcccactgccccttggggtgaagggtcagaaacactgcaagtctcaggaagtagcaaggagagcaactgcagggacagcccgttgtgtttgttttctgtggctgccataacaaatgaccacaggctaggtggcttcaaacaacagacgkgtattgtctcccacttctggaagccagaagtctagagtcaggagccagcagggttggcttttcctggagaggctgaggaagagcctgtcccttgtctccctagctacgggcagtggccagcaacccttgctcttcctcaccttgtggctgcgtcacacccatctctgctttcatcttcacctcactccttcctgtgtgtctctcggtgtcctctcckctgcttctaaagacattggtcattggatttagggcccaacctagacccaagatgatttcatctcaaaatccttagctaattccatctgcaaagatcctatttccaaacaaggtcacattctgaggttccaggtgggcatgaastttggataggacacccttcaacccactgcagtcactaagatttatgaggtgtttattgctcataagacctgcacacagtcttatctcttcttcaccatcacccattttccggattacagaaaccagggcccagagacattaagaatgtgcccaagtcaggccaggcgcagtggctcatacctgtaatccaagcactttgggacgccaagacaggtggatcacctgaggtcaggagttcgagaccagcctggccaacatggcaaaaccccgtttctactaaaaatacaaaaaaagttagccgggcctggtggtgcatgcctgtaatccagctactcaggaggctgagacaggagaatcatttgatcctgggaggtggaggttgcagtgagccaagatggaaccattgcactctagcctgggtgacagagtgagactctatctcaaaaaaaaaaaaaaaaaaaaaagaatgtgcccaagtcacacagcaagtgaggggcagagctgggatttgaacccaggtccctggtgctccttcacctttccacctttttgtagctggctgggggatgcccagagaccccttagggcccacagctaggaatccatggggcaggaattccagccagccctatgaagaccccaggtctgcaggggctcctgggyaccagagagaggctggagacaggcaggggagcttcaaggtgtgaaggggcccagccgtggtcccaggagaccaacatgtggcagaggattgagagccacagttccttgtctctgccactgactctgtgaacgtcattgtgctcttccggagaataggggcagcagcactgactttatggggtaattgccaagtaccgaaatgttcatcataatagtactaatcgctaaaatgtgtccgcaagcactttacaaatgctttttgttttcccatgtaatgcgtgggaggggaattgcttattcagtcatgtgcgttcggttgtgtgtggttgaaccagtgacttcgcctcagtttgctcctccgtaaaccaagggttagctgagcacccatcttcccggttgtcacgtgaggcaaacaggatccaagtacagggcttggcccgggtgtggtccaggtagaggctcagcggatgttttcttgcctgtaagatgggatagtggtagtattatgatgatgctattatttgttgtatgaggatttggtgaagtaatgcaaaggaagcacttggctcagggcctcgccagaaattgatggaaagtggcctcctttgtggcatcagaaagatttgagtataaatcctaatgccagtgtttactactgtgtgaccttgggcaggtagctttgcttctctgagcttgacatcctgatatgcaaagtggagtgggaaaaacctgcctcacaagattgtgccacgagatgatgggtaggtaatgtctcaaatggaaccctcatcatgccaggcattcgaaatatgttgagcttctgccctgcttgtgggcatcttaaagatgtccccagaaggggcacatcctagtccaaggagggtggatttgatttgggaaaattgggagcagtcgtgccatagtggagcatatgggrttggtggagcctatgggagaagcagtgaatggatgacaccgtttggggtccaagcaccatgtagytttsaaggaagaaagcaggtctctgcaagcttctgtgctgcctctgaaggcagtttcctataaagtggtgcctttcctgtgccggctgggctmctctaccgggccatgtctggctgccccgggaccattttgtgggagccatgggggcktcatctggatgaactcattctagcccagctctgtcaaacacctgccttgcaggcccaagggagctgtggaggcagtgggcggggaatgctgtggcagccatttggggtgcctcctgcatgcctgaggcatccacgctgagtgaggcccccaggctcatccggagcagagggtgctggcctccagctcastgatccttctgaagttttttgatctgtgcccatgggcagggcacgccatcctacgtgggcctgacttagcgttgatgtagcgcagtagttgaggacaacatctgggcccaggctgcttggggtcacatccaatgcctggccgctgaccagctgcatgtccttaatctccaagcctccgttccctccactgtcaaatggagatgacaacactgcctgcctcatcaggccgttgtgtcggagactgaactgtgcggattccaagatatacattttgacatttctgaagccaggttgtgcctgacaactggtgttacrccacagtggaaccagccatgccttttatttcttaaatatacgtaaagtagtgatacaggttagagtcaagaaaatatgataaataagatcagttttataaggggctcagaacagagccaccaggctggtgggaagaagccaggattgccacctgcctccccagctcagttgcggtgagtccctcactgggtcctttgtgtccactctgaaacaatcagcaaaagaacacctgcttgccggagcagctgtgagaagtcggcaaacttttgtgtgtattacgtgaccagcagagtccccatatgcagtaggtgcttaataaatggccgtgcaaaacaaacagcaaagaccgtagtacaaggaggaatttaaagcatagactctgggattctaattcctgctccaccatttccatgctgtgtgacccagcacaagtttcttaatttctctgtgccttagtcccaccatctgtaaaatggggataacaaaagtgtccaattcataggattgttgtgaggattaagtaaaattaaagtgcttaggacagcccttggcagaagtgtaagcaattattatttgatgaactttaatgagtctcttctagttcaataaatgatactaaaataaacactaggctcaataaaataatagcagttgaggctgcacttgctttatagctgagaaaaccaagggccaagaggcatgctggtttgcccaggatcacacagccagctcccagcagactggaaccacagcccartgtccaggcaccagcccaatgctgcctctttgcccatgttggttcaggactctttctcttatggagaaagcagttcttgccatggagaggagggtttctagaagaagccaccagcagatacatcaccagtgcttcagggatccacagggtaattagggccctcattagaagtcgtttctgtcttccctcaattttctgcctgaccaccacaaacagtggaaggggcctaactgggatgcccaccctgcccacagctgcccaaggtcagcagagcctgccaaccatcctgcaagcccaccagccagcactctcctggcctccaagtggcttctgcagagttgacacagcaaaattccctcctggagacagcaaaagccgtggctggcccgttggtccagccaccagacaggctagggccacaaagtggattggagttggggggaggacaaagacctgggtgcagccagccatgacargcacttcaagtgaccttggacaagtcacagtctctttctgagcatcagtttcccatctttgaaacaagccttttggagccagatgggccccctgagactttaaatgtctaaaattcgaagctgcctggacattgctgatgtccaggtcacgggggaaggggcggggttggaggggtggagctagtgtctgcgtgtggagtgcaatgtgtgtggatcttgggttggactcactaggagcaagcatgagacagcgctcaggagaaaggggctgaaaggaaacaaggtagggagagaaagagataaacaagcgtgtggcctcagctgatcccttgggggatgtggggcatgaactgcgccccaggtttggctctgccttgaagcaaaaaagctggcctttcataccccatatcagatagttattggccacggctgccttctgagtgggatgctgtgtgcaattgcccgggcaggagctcctgttcttcccagggcaagcctgcaaagaaggggcagccgggagctctagctcccagcagctggggtgtggaagctgcagaccggtaaggaggactagggtgggcaccaacagtgtccactctgttatgtggatttgggatgcaaaggttgctgggtgccagtctcttcctagcaactatctgaaggcagcagattaagagctctttaggccacttctaaatttatcaacttacatgactcacttcagattaaaatgaagcccttctccccatcccacccccagccaatttcagatttctgagctcagagcatcctgaagagggcatagaatgcaaatcaataaaaccagtattagctaagtatttggtgtggaccaggctgtttgtcgggctccttgctgagctcagagatgaatcagctccagaaacaactcctgctgggaggcggaggcagccccaggtagaaggtggtatacgactgcrggtgccctgcctgggggctaggccatgaataacttccaggaccaagactcagcctcaccaccacagtatttagagcttccagagcctcagtttccttatctacaaaatggggtcagtgtggtgaagagtatgtggcctgggccactcctgcactcagggagtagcaataaaattaagcgagacctggcactgggacccagggctgtttctaggcacttctctgccctctcagaggcctgagtctgccccatgacctcaggggaaggaaattctgagctgagtggagacatcagcttccctggccctgggaacgtctacagtgggcttcactacagcccccgggtaacctgtcataaccaagacagctctcgtttagcgagcaatttcgatgctaggggctccgtgtgcaaaagtttcctttactctcaccactgcgactggatccatttacagatgagcaacatggtctcagagatgtgggatggcttgtccaaggcctcttgaatagcccctctgctcctgcccctttgcattgkacctaagaggagactgaggccggagaggaattgaccaaggttgcagagtagagtccaaagcccagcaccctgtccatggtattagcccctcccccaaccctccaggaaaaaggcgtggcttgggccagacgtcaaactgggaatagggtgattcatacctggcccatgtcccaatgcaactgcccacggggacaagttcagggtgtccttgagactgactcttcagcagcaacaggcctggcccccaggaattgaccatgtccttggtctttatcctgcctccctacaagacagcaggtgactcttgaaggtttggagccacactggctccacatttggggaagaggtggtttacatgtcttaagcacctgccagctgctattgaggaaactgtggttcaaattccaactttgccactgacaagctgtatccccctcagtgagttactgttcctttctgagcctcagggttttgacctctgtcttggggggaaatgaccatagccattgtggagatgattcgagatatgtacgtagcccccacccaatgccgagggtggtgattatcaccccaggtagcagcatgtggggctgaaggccactctgtaaaggagacattcttattacactgcacagattctcagagaggtccagggacttgtctccagtcacacagcaggttagcaatagaacatgattgggtgctggtcagttagtgtcctttgagcagtgtgttgtggtgttcttgaggcctcagagggcagccaagggcacttcccaaagagagttttcttctgccaaggagattaaatcccaggatgcagaattgtggcatcttaactggaggagaaggcacagggcagtggttaagagcagcccctggagcttgagggcctgggcatgattccccaacacttsckagctatgtgaccttgagcaaatgacttaacttcctgtgcctcagtctcctcgtctgtaaaatgggcaaaaatactagtaccaacctcatgggattctagtgcagattaartgagttacatgtaaggagcctagaaccatgcctgatgcaagggaatctctrtgaaaaaatcagctatcagtggtagcagcagtcgtgggatcagagtagggagggagcacctttcaccatctctcccttaatctcaccctagccttccccatagaccccccatggccaccaggagaaacttctcagaatgtccaccaggcctgtcactctggtcaaagtcttcagtgctccccgttgccaagtggataaagcctagactcctcggtctgtgtccagtgcatttgtgatggagtgcctgtccccaccctaccttcccagccccacacttcaccttcatgccgcttttcctttgtcaggtcagttagaaatgtggccatgtgatatgaactggagcacaggccctgttcacactgacccttttccccacctctgagactttgcctgactttcaacccccacctaagggtctcccccttctgagggccttcctgcccctctctttgttgtaagctcctgggcaacacactctgggcctctggagtcatgatctccagccagtgtgttttgtttgtttttgtgtttgtgtttgttttcagtgatttcattagaacactgttgagtgcatgcatgtagaatagatgaagggaggggccttccctactggtcccccagatcctctcttgccctttcaatcgtctgttcttcctgcgtggccagaggaatcttttttaagaatatatatcagatagtagtgttcctgcttgaaactccacagtcctccccttgatgtacaggaacaagtcgagactcctttctgcagcctgtaagcccttctgggtctgaccctcattccccacccctctcctggctttcctctcgtttactgcccttctttctgtacctcaaactcatcagcctctttcctgtctcagggcctttgcacatgctatttccccatctagactacactttccccttcggtttatttcatagattccttctcatcaagctgagtggtaattcctcattaaggccatccctgatctatttaaaagagctcccccaccccctcacctatattccctgtcatggcacttgttttcgaatagcatgtaccacccttgacattattttctgtatttattcccttgtttgttgtctgtctgtcttccctagacaatcagtagcttgagggcaggaagcatatctgtctcattcacttctgtattcaagggcctaggacaggggaggtgctcagcagatttgtgtggaatgaatgaatgaatgaatgaatgaacaaatgaattggccagatatggagaggtggtacaggggaggcaagaataaacccagaacagcccttctctcgagggaggtagtgggagcagaggaggaggcgccatcctagaaaatgtcctttgaaagccatcctgggtggcagcctcggccaagttcaagttccatctgctctcttttgcgcagctgtgaaagggacaccagtatcctccctcaccatcacacttgacccgstatctgcaagacaggagagaaatgacagtggagaggttgcctagaaacccccgccttgatccacctgcctttcctgagtctctctggacaccccagagggagaaggaagcggggtgagagggagagcatgggcaaagggggtgcagtcgcaaatgaggcagctgcaattcacagtctcccgtggcatccattctagctggggagagggccagtgcagacagaagctcrtctggaacaagtctgacatcaggtagcagccatggagggaggccagagaaagagggcaaggctctagattggaggtggggctcagagaaagagtctccaagggaggaagagcactcagctgtcccgttctttggaaatttcggctttgtcgcattgtttgtggctccactgtgtactttccagcttaaagagcccttaatgaggggtttgggggccaggccttaataaagggaaatttctgctgattagacccatgcaggccaagctctggaaagagactggtgcttcttgcctggtgcttacctgccccaccccccgaaaagcccccagcttctcccccagcagagcaccccggagaagccagcaattactgtgtccccaacccacagggtggccagaaaagaaaccaggcagcaacagcttggaaaaccctattttccttttttaaactacagtcatttgaattacaaaaataatgcatgcttgtcgcaacaaatggaatgatacagaaggatctatggcaaaatgaataattttcctctcctcacatcccacatttacctgatgtaaccacactgtcgataccctattttgtcaattctgggatgcacttttttccccgcattttaacatctctgaagtcaggatatgtcttgcagttgacagcacgtcatagttttattggaagtccttttttctttcttcatggtacataaaatcatggctcgacttaccattggacttaaatctgaggaaatctggtaacttgtttctttctcttgtttgttctttcatatactggcagatacaagtttggagggggttcatttctttttttaatggtatcattttatgtgtagcccacagctttattttgtcacttagcaatgtaccatggccatcctggtggctcagcagtcatggaatgagaagtggcagaagccmgtgtagatgacaaggaccttgttgctgccagccctactgtttgccagctgtaggatacccgctatgggccccattaaggagtgaaagagccaggccaggcgcattggctcaagcctgtaatcccrgcacattgggaggccaaggtgggcagatcacttggggtcaggaattccatascagcctggccaatatggtgaaaccccgtctctactaaaaatgcaaaaattagccgggcatggtggtatgcacctgtaatccaagctactcgggaggctgaggcaggagaactgcttgaacctgggaggcagaggttgcagtgggccaagatggtgccactacactccagcctgggtgacaagagtgaaacaccgtctcaaaaaaaaaaaaaaaaaatggartgaaggagccagcacatgtgcagtgcccaacacaggcgggctccaggtgaatgcccggagtcagagcttccctgtggaaggtgtgccacagtaggatgcattgttgccccctccccaaccaagcacccctgagacccagagcaagggcagggactctgagctcagattaaaaggtcagatgcaaaaggtcagctaaaaacagccacacaaaaacaagagcagaaggcaaagtcagaaaacaggctcaaaggttagaagagaaaacagcatagcaaacaacacaaagctgaaaagctgcttccttcacccccaaatcaaataacagatatttttaaatatcaacaggarcagatagaggcttcttactaaggagaaagtcacagagaggccaaagtgatcttccagtccccctggctccacccctgccagttgcaggaggcccaggtcagctacatgcacctactgggtgcagctcctgagctcccagtctgtaggattttctggataagaatgctgtggattgctgggcgcrgtggctcacacctgtaatcccagcactttgggatgctgaggtgggcagatcacttgaggccaggagctcgagaccagccaggcctgatcaacctggccaactctactaaaaacacaaaaattagccaggcatggtggcgtgcacctgtagtcccagctactcaggaggctgagatacaggaaytgcttaaacacaggaggaggttgcagtgagccgagatttcatcactgctctccagccygtgcgacagagagagactccatctcagagaaaaaaaaaaaaaaaaaaagaatgccgtggactgacatgtattgttccaagtgttttgcttgacttatttgwttacaatatccctctagcagttattattcccattttacagatgaggaaattgagggtcattgatacacagtgacctgtccatgggcactgagccagctggtttgaccgtgaggtcaagggcactaggactcagaccatggggtctagcagagaaaccagtaattgtaagtcagtgtaataacagccaggctggaggaagccagggggatgcaggagcccaggggaagccctggcctgttgtcggggctgtcagggggcaacctcaagagggccccacgagggcaagtggaaggctagctaacagccagccagctggaaaaacaggggaccagggaggggtgctctaggcaaaggcaccacttgagcaggcactgaggccaccaccagtagtgcagggcagaaggcaccaggccggggtggccagcgcttggcaggagaggtggcccggctaagcccagggctgcaggctaaatggttgtaagttgaggagtgatgtggccagattggccctttaagagcatcctgcaaggacagtgatcctagtgaggataatgggttggagggatgaggctggaggctagaggctggaggctcacggtgcagctggggtagggcagaggctgagttgaaggcaggttcccaggagagcagggcatgggatgggctgacagggctttgggactgataggaggcagggagaggggaggcatggtgagtcacagcaggcagtgagtcccagctggtggcattcagaaagggacagagatggtgagaagggaagtagtcagaaaaaaccatgaatcccatcctgggaaagggcctgcaaatccatttaatgagaggccaggagggttatgaacagacacatttgggaaccactggcaaaaggcatatgcaagtcctccatagaatgaaagcaaccagccttacctaaaggggcggggagctttcactcatttagcaaacgctgtctgggggcctactgtgtgccaggcagtggggataccacactgaacacaacagatctgttcactgccctgtggagcttgcattcgagcaggtggagagagaccataaacaaagacataaatgagtggatcgtcaaggagaaaaataaagcagatgaagggagatgaagagggttgttttgaatcaggtcagggaagactttcctaagaaggtggcctttcagcagagacctgagggagcctcatggctgtttggggcgagggtttcagactaaggaatggccagtgcaaaggccctgacatggggacatgctcagtgagttggagaaacagcaagggagaagtggggtggaggaaagtgaggaggcaggggtaggagatgaattcagagagctgacaagttgggggccaggatcacgcagggtctcgtgggccatcacagggaccctggcttttcctcgaagaatgacaggagcaacaggagccttgtgagcagaagagggacttgatttttgtctgactgtgtgtggaaaacagactgtggggggtgaggtgagaggaaggagagcaggaaggaggctactgcaatgagtgtggtgagagaggatggtggctgggaccagggtggagactggaggtggagaaagagggtcacattcaggatagcttcagaggtagagcagacaggatttgcaaggaggtatttaatgagataatttttattttagaattgaagagttgggttgaccccagaacctagcgcattgtctagaacctggtagaacctggtaagcacacagtaaatattgaaccacggaaggaaggaaggaaaggaaggaaggaaggaaagaaggaaggaaggaaggaaggaacgaaggaaggaaggaaggaaggaaggaaggaaggaaggaaggaatttgtagggtggtggatggatggatggataggtgggtgaagagaygaatgggtgggtggatgggcagatggatggatggatgggtggatggatggatcgatttgtgggtgagtgaatggatggatggatggatggatggatttgtgagtgrrtgaatrgataggtgggtgggtggatggatgcatgcatggatggatggatggatggatggatggatggatggatggatrggtggatgagtggatggatggatggatggatagatgggtggatggatagatgggtgggtagatggatggatgcatggataggtgggtgggtgggaggatggatggatggatgggtggatggatggatggatggctggatggatggatagatggataggtggatggtttggtggaggagtggagagagagatggatgaatgagtgagtagatgggtggacaaaaggatggagggacagaagaataagtggatggatgggcaggaagatatgtatatgggtgaatggatgaatgggtagaagcaaaaagatagtgaggcagagagagaagaaaacaagtggacttcgattgccagaataagtagaaaattttactcagaggcagtgggagccattgcaggttattgtacagggacatgacaggatgcgagtactgttggaggcactttcagatagtggctttcagtggtgcctggcaccatggcccaagctcgtgattcccatgaacattaacggccaattctctctgtttcctttcccgctgtctaacccctcatcctcattcatttattcattcgcaagttttcattgagtacttactctgagctgagggcactggggacatgatgtgaataaaccagacacagtccctgcctgtaggacacattcttcaacccccatcagggctgtggaactaaagactcacaggcctttgtggcccactggcttcatgctgagaattgatgagttgctctctgcccttgccagtgaccttgacttcccacagcctcagtggagatcctaaggtaagccaggcaggacctgacaactggactcatgaccctggtaacmcctagcatcctccttctagcacagggctttcttgtttggggtttttgttctttggtctcatctggggatttgttttggggtgtatatctgtgtttgtctgtgtgtgtgtgtctctstgtatgtgcatgtctgtgtgtgtgtgygcacacacatgcttgkggggagaggctgtgctaggaatgtgtaaaggaaaggaagggaccagcatgtttcaggctcagtacatattatttgttcctgtagcaaacatttcttgaatgcttgctacatgctgggtacatttgaggcagtgggtacatagtggtaaacaagacagaggagttctcattaataactaagattaataattctggctggggctgggygcaatggctcacgcctgtaatcccagcactttgggaggccaaggcaggcagatcacttgaggtcaggagttcgagaccagcctggccwacatttagtagagatgaaaccccatctctactaaaaatacaaaaattagctgggtgtggtggctcgcacctgtagtcccagctactcaggaggctgaggcaggagaattgcttgaacccaggaggtggaggtcacagtgagccaagatcatgccactgcactccagcctgggcgacagagtgagactctatcatcatcatcatcaccatcatcatcataacaataattccagctggggtgattattataaagaaaattagtgagaatcgaaggggctccctgccactagcgtggtcagggaggaccttgctagtaggtgatgttcaagatgccaccatctggggaagagcagtcccagcaaaggagtcagccagtgcgaagatcctgaggtgagaacatactgggcacgtttaaagactccagctgttgtgactgcagcaaaatgtgtgaaggggagagaggtagatgatgtggaagaagtagagaggggcctgatcttttggtgctttgtagatcaccctgtggaatttggggctgatcctgacataggagcatcttatgcagggctgagacacacacacacacacacacacacacacrcacacacacgcacacacgcacgcacacacacctggctgctgtttgaaaaacagattgtcatctcattaaatccctgcaacagttctaggcacttgatggtgaaatccccattctacagacagagaaactgagtcrctcagctagtgggtggcaaagcaaggttagtttgaccaaatcttatgctcgatgagcgggcacccacaaagcctcctgggcagcagaatgatgttgtatgagtgcgatggaagcatgctgacctggccrctggctgaggggagatgcctgagtcccggcacctgacttgggtgcctccatgcccacttgtggcctcctgtcctcacttaccacccctsggccccatgtcgcaatggcgctggctgagtttcatgatgccctggcccccacatccgctcagggccattgtggggtgggtgctcagagcatggatctcacagggttctggcacacagcaccctcccagagcaacccttcctgactcccaagagcacagtctttactcagggacagccctgagccagagccaggaagccccaacctgagccgggaaggcaggcctgagccagagccaggaagcccccaccgcacaaaacatccagacctcagaccccaggctttgcgattctctgcagaggtgagtaggcagatggacaggctctctccccactccactcccgcgtcaccacccccttctctggagaaaatctggcagtgagcagagtaaatttggtgtctttgctctgattcacaggggcctgctttagaaagctccatacggaggcagggagaagcggagggagcgggcgcaggagaggagcctgctgcgggactgccaaggcgagaggaggctgtgcctgggtgtgccctggcttgccctgagctcccgcaatcccccacctccttttccaatccctctgctcaccctttgttccttcctgtgccctcgcccagcacagagctcaggggcaaagctcccagccctgtcacccaccagctcggcaacctcacctctctgagcctcagtttccacagctgtaaaatagggataataaaccttcccgacaggacttcaatgagaaaaccacagaaggaaggcacccttggtgcctagcacatagtaagtgctgattttaaaaagcaggtgccactcttctggtggtggtgatgactttggctactggcctcctgaagaccccctcacctcytgtcccctgccccttgcctctgtctccctcctctcacaccccttcctgaaggcacacaagacccagactgagccctcaaccagcccctttcacagagggggtctgcgtcaggtcagcttaaggcctgtcagtgccaggcactgtgcccagggccttcttattctcacttttccagtgcaaaggaaacagcttcagcccatttcacagctgaggaaactgaggctcagcactgtgaaggaatctgcgcagacgtgagctggtacccagatgcagaactaagtaggacacagactcattgcttctccttcaggggattcttccctggctgatggttgaggttgtattatatcatgggcctctggtgygtaagatttctttctgcatctggaggcaatgtactggtgcactgcgcaattcagctacagcctcagagttacggctcaacccccagggccatgggggccctgcaggatgtgaggcagggcagggacagggctgggacgtgcagagaccagcccactggcaagtggagtgaaaacgcagcatgggaagcctggggacaggccgtgaggaactcatacaggcagaggggtggtggcagcagcaggtgggtcatggagagctcaaaatgccacagagacccccgcggccagcagtgaggtggctgtgggggtacggggagacactgagggcatccccaggatcctcacctgcatgcagacccctcagcctgtcccttctagaatctcaccygaggagcctgtgcccacgggagaggcagacagtggccagcagggagggggctgtgtgttcacccctcagtgagctctttaggatctgcccccaaggtgttcaggtcactctctcctgccctggaagtctctggtccctggagatgcctccagagtttccaggaactcagtttttctgcacccctcctggactcatccccagggaccttgggaaacccaaagccagggccagcaccatcacgatgcttcagaccttagacagcaccccgccaatgctgcctgtcacagcagagatggactcagagaggcctagtcgttgctcaaggtcacaaagcaagcaggtggcagagaaatggagcctgggcttgtgactcactccccagggggcatctttctttgttcttycatgaatccctcgaggggagacccctttatccctggacygccttgatccctgggcctctgggtgcccggccctgtgccgggggctgacgccaatgcaccggcccccaagtccttccgtgggtggctccagcatctgtctggactggagagggccagtcccacagtttctttttggaagttttttccggaaggcgtttggaggccagccagtgggtcttttccatcaccatggaaatttcctaccatagaattattaaaacctcccgtggcccttctcccacctcactttgttttgaaaaacatctccttggtggccaggcaggggacagagcagctgagatcctagaattaagcccgcagagaattccccagtaagaggcttccaggtagatcgctcatcagactcaggatattctgrtttggaaatccaggctgcccctcaggaagggattccagccmctcagggccaggagccaggattgccttctgctctcagtgctcggggtggtgtcggcacagaccaggccagggccttgcccattgttgccaytcaaaaaatgtggattagttgttagataggtagggacayaggtaggttgacaggaaggaaggattggagggaaggcgaaataagacaggttcccttaggagtcctccctgccctgggacctacgccagtcattwactcctctgctgtacagcctcgtcatctgtaaaatggggactgtcacacctatcctaccagttggcctgaaataagaagcaatgtgtgtgcagggtctgactccagaaatggcagcagttttgtcggcccckacattaccctcaccagggagagaaggtaggatagatgacacgtgagtgagggagatggacctgaatccacctctgggaatcctaaccctgcccctatgagctgtgtcacgttgggtaagcgacttcacctctctgggcctcagtttcctcatccatgaaatgggtagaaaatacagtgcctgctgcacgggttggttgtcagggtccagtgggaggaagcattgcttccccgagtgcaaatccccttgttctgacctggatgggcagggccctcatgcacaggcatgttcaacagggctgggagcggtggcaggcctgggatggcagacggaggcctttccttcactgcagagggatatatccttcttcagtttaggctcctgtgggtgagcagaattcagacttcctcactctcagtcagaaggctcaggtggggcccagctgagaaggcagctgtgactggcgaggcctcaggggggagacctggcactggtggggcctgagccagaggtgccccagggacacacaggtcagggagaccacctgtgctggccaccatgctctagggttccagccttggggcagcttgaccctagccatggcactgccctctctccccttctcctcaccatcagcctggccaggaaagggctgccttaggccattgctcacacacccaggtgaggcatggagggatggcccaaaggtggcaattgaggcagcaggggcccaggatcagttggctgagtagagcagacagtgacagaggygtgctgtggagagcagttagggygtggcctctggagtgtggtagagctgggtgccagtgctggtgctctgctgccctcaccatgtggcctggcaagcagctgaagcttcaggcttcttatcagtaaaatgggggcaacagtaaagcccacccccaggctggctatgaggatgccatgagacagagcacgtaaatgcagcccagggcctgcgctcactcatccactcaactagacattaagcacctaccgcrcaccaacactgagctgggcagtgggattttacagcaaatgaaagcagtctagggggactaacgtgtccaggtttgtctgggacattcctgattttarcactgaaagtcccacatcccaggacacccctcagtccgaggcaaaccaggacagttggtcatcctaacacaatctctgccctcatggatttacagtttagtggagggacatagmcaataagtaaatatataacatcatagtgggtgtaagtgttattttttagaatatagcagaggtgggacatggtggctcacacctgtaatcccagcactttgggaggccaaggcgggaggatcacctgaggycaggagtttgagactagcctggccaacatggtgaaaccccatctctactgaaaatacaaaaattagctgggcgtggtggcgggcgcctgtaatcccagctactcaggaggctgaggcaggagaatcacttgaacccaggaggyggaggttgcagtgggcagagattgtgccattgcactctagcctaggtaacrgarcgagactgtgtctcaaaaaaataaaataaaataataaaataaaatagaatayagcagagtcagcgggaagagcgtgatgacraggcatcttatttttgatggggtgttcagggcagggctctctgaggaggtgccatttgagcgggcactgcctgaggtgggggactgaaacgtgcagacatctgggggaagagcactccatgcagaggaaacagggcaggcagaagccctgaggtggagtatgctggtgtgccgcagaaacagaaaaagagaggsggtggggtgagggaggatcagccagttggattcattgggactacctttagaagcaagtgatataaataccaactcaagttagcttatagcaaaaaagatgcattggctcacctaacagaaaaaaattgggattgttggcttcaggtatggctggatcctagtgctcaaatgaagtctttccatttcccagctctgcttgcctctgtgttatcttcattctcaggaatgtcctggtagccccaggcagacttcctaccagtgtgtaactgaacaaaaagagagggtctgctctgagactaggtggcaggygggatgractgagatctggtgcgggtggagcagatagtggtgtgagataaagagagggaggggtgacggggccctctggccctggccttgcagaccccactgaggactttagctctgcatgtactggaagccactgggaggttttaagcaggacaatgatgtgatccaatttatgttttaggaagatcattctggttgccatgtgcagaaggggttgtagtggggaggggtcctcaagggcttggcgaggaggctaatgcagtaggccttgcgggcactgatggcagaaggggaaatggcgagaacargatggacttgggaggaacctaggagaaagtctggaccaagctaggggtctaggctggggctgcgggtgctgacaaaagcttgacagggtcttgggcctgaaggaactggcatatgacagggagttctgtccaggaacaaggcaggaactagtcccacataggcgcggggcagttctcaaagcctgtgtgcttcagaagagacactcaggtctccctgtaccattctggggatgtgtccctgcccagatctggcagcttatggagagaagactgaggcccagataccccaggagggtttggctgtatttgggagtgtggctgggatcaaggtcaaggtcatttatggagcgcctatttggtgctcgacactttcatatgcatcatcttttctaatccagcaacgctgtcggtcggtgttgttagcctcattttactgatgaggaaactgattctgagagagggcctgcctgggcatttgttacataataagttctcagaaaacccaaaatttatagaaagtgaatamamccttccccctggagaacgttatagttccaagggatctgagaaccttcaccttgggaagcaaattagtgaggcagggtctcactctgtcacccaggctctggagtgcaatggcacaatcatggctcactatagcctgaaactccttgggctcaagcaatcctcccatctcagcctcccgagtagctgggactacaggcatgcaccaccacgcctggctaatttttgtaatttttgtattgagagacaagattttgtcatgttgcccaggctggtctcaaattcctgggctcaagcaatcaccttggcctcctaaagtgctgagattacaggcatgagccaccaagcccagccagaattaggctttttattcaatgcaaattagcctttcctccctctctctcttcctttcctccttgaactacttgcagataatctattatgtgctagacactgctaggccctaggaatacagtagtgatgaaaacgtagacacaggccttagtgaaaggagacagacagtaagtatatatataatatgcataatagctataactgttattttttwaattattgcagagtctgggcctaggaggtggtgataagggttcttatctagtcagtgatctaaaatcaaacaatccaacagtcacacaaacatgtttaaaatacaaccaggatgagtgtgatttcgtaagtaaatcagagaaggcctcccagagaagttgggattaagctgagaacaggaggaagagtaggagtttactaggtgatgatagggagggaacagcattctaggcagaaggaacagaacagacaaaggccatgtggtgggggacaagcagargaaatgagagaatggggttcttgggggctgaaggagcaaggccaggccacccagtgctttgaagatcacatgtgggagtgttttctttatcccaaaagcaaagtgggcaggaggatgctgtgatgtgatcagcactgcttttccaagtggcagcagagaggccagtgtattagtctgtttccacactgatataaagaactatctgcaactgggtaattttatttttaaaaagaggtttaattgactcacagttcctcttggctggggaggcctcaggaaacttacaatcagggtggaaggcaaaggggaagcaaggcacatcttacatggtggcagaagagagagagcgcccaaagggggaagtgccacttttaaaccatgagatcttgtgagaactcactcactatcatgagaatagcatggagaaaaccacccccatgatccagtcacctcccaccaggttacacatgggaattacaattcaagatgagatttggatggggacacagagccaaaccacatcagccagttagaggccacagcagtcacctaggcaagagatgagaagaactaggacaaggacatgggctgtgcagggaaattatgggtttcaagaaatgtaggaaggaggaaaatgaataggactttgatgatggagaagaaagaggcaggrgtggctsctggattctatgctgaccacctggagagaagatgaggcctttggtggcaacagcaaatcccaggggagcaggaggttggatgggaaagcttagaggttgaatttcagatacgttgagtctaaatccctacctcacaccacacacaaaatttaatggagacagaagacataggggaaagcttcatgacactgaatatagcaatgatttattggctatgacaccaaaagcacagacaacaaaagaaaaagtagataaattggacttcatcaaagttaaaaactttaatgcatcaaaagatactatcaacagagtacaaagacaacccatggaatgagaagaaatatcttcaaattacatatatgataaagattaatatccagaatatgtcgagaactcctacaactcaacaacaaaaagacaacccagttcaaagatgggcaaaggacttgacttgacatttctgaaaagaagatacacaaatggccaataagcatgcgaaaaatgctcagcaccactagttattagagaaatgtaaatcacagggaaatgccagttcacaccaattaggatggctatcaccaaaaaacagaaaataggtattggccagaacgtggggaaattagaacactcttgcattctagtagractgtaaaatggtgcggctgctgtggaaaagcatatagtggtccctcaaaaaaatcaaacagaattattccacgatccagcaattccactactgggtagatacccaaaaaattgaaagcaaggactcagatatttgttcacccatgctcataacagcattctttggaataactaaaatgagggaacaatcgaagtgtccatgaatggatcaactgataaatcaaatgtagtctgttcatacaatgcaatattactcagccataaaaaggaaggaagctctgagccatgctacaacatggatgaaacttgagatgctaagtgaaataagccagccataaagggacaaatactgttatgattccacttatatgaggtcgctacagtagtcaaactcatagaaacagaaaatggaatggtgcatgtgccagtggatgggaaaggaaaagggagttggtgttggatggggacagaacttcagtttgggaagaggaaaacgttctgagatgggttgtggagatggttgtgcaacaatgaggatgcacttaatgtcactgaactgtgcacttaaaaatggctagaatggtaaatcccatgttatgtagacttaaccacaaaaaagagaaacgtagatgaaaaaattaaattgagaatgctcatagacctacttgtaaaagctacagctatgaaacttccagagcgaacgcagaagagcatcttccccatctagaagtagggaatgatttttcagagaaaacacacacacamraaagcaccaatcttaagagggaaagctgaaacactgggcttgagatctgttgaagctgaagtgtggggacaactagcaggagaggccaggcaggacactggtgtctgctgcatggtgaggcctggcctggaggaagccacacattaggctccttatttcagctaacatttcaagccaaaatctgcatttggagcctacctcaggtcaccttcttatsacctaccagactagactaagtgactttgartggcttctagaatgctctagctgcagatgcccaagcagatgagcctctgagtacttccctaggtgcctgttctgctaagacccagcacccccagggtgtggcatagaccctccatctgcttcctcactggcgaggcttagggctcatctgcattagctgctctctgcccagctctgtcataccttcacccccttcctcagrgctaatgaaggaggcagaaaaaatttaatttcctctaaactagaggctgatcaattatggttaaaggaacttggtgtctggaataattagctttgcgtttgcttgggaaagagcaccatccacatcctttctccctcccgccaagctggcatggaggggagttactgactacaggatcctgtgccatgcagccacagaaaagctgtggagactcacagtgaggggtgattctctagtgctttaccttactgggggtctccaagcatggggccccagccttgacccttgctctctctaaccatccccacgcacccgttgttcccatgcyttctgggtctgccatcttggtgctatttctacacggcctttattgaaaagcagagagttgacttggtcctactaggccttgattttgagtccttgtggggtgagggcttcagggattcctttgagaagctagtgagagccaaaggcttcctccccagaaaaacacaacctcttacaaagaatgttggtaggttcatggccccttctgaagctctccacggcttcagctaaagatggcctgatctggggcaacctgtcataatgccaaggccctgcaaatgcttcccagtttcaccagctggytatcttttgggggtgatatgattatgcgaattttgcagacagagaaacttgcttagcggggtaactcatgcttcctgcctggtccctaaaggagtaactggacctataaaccaggaattctcaaactcaccttctcctcctgtgcagtctggaatccccatctccctacacctggctgatctgagtgggaggatggggttataaagtagtggtcgaagaccctgaccccctaaccagagaagcagcccctggaggacagagcttttgtctgaatcaccttcaagtccccagcatccaactcaaggctcagaatcaaccgactgcagggccaagtaggagacagcatgaggcattgcagacggggaagggggctttggctttggcagcagaaacgcacttagacatcagctctgtccaccctggctctgtcctctgagcctttctttctgagtctcagtttccctgtctataaaatgggaactgcagaactcctctaacagggttaggcctataaaagcctaggcaggcatgtgtagtgatccctcatcacaaagatgaagaaactgagtcccagagcaaggcagtgacctgtctaaggccatgtggcaagtagtagagctggaatcagagcacagatctgcctaaccccaatccgtgcccatgaccaaatgtgtggtgcccaacacatagtaggtgctcaataaatcatccagttgtccctctccccttacctgttccccagccagagaggcattctgcaggagcctgcaggtggtaacattaaacaagacagagcaatagtagcccagagggtgggggagctctgacatgacccctgcaggacaagtcccccacctcccccatgtgctacttgatttcctacacaataaagtctcttgtcatgagcgcagagcagtagtgaagaaagatgaacttgattgctctttttcttgcttttgtctcttcattttttcctcctcctactgcagtggcaggtgggaggctcagcaaatgttcagtgtggccacccctcgtgctgacgcccgctcacctcctccctctcttaaccgtccttcctctgagtctgttcagtgcagaagcccaggctgaaactggaagtggttaattcggacattctcagcccaagctgtgatgatacgtttcagacrtggggtggtgacatggggacactgaatgcatgagggttcaccatgagccatggacatgctgggccagggacacwgagacaggtcagcccgctccccacaaggggctcccagaaagacagtgatagtgtagtgtgtccagaaggccatggaaagtctgcccaggaggttagagaaagcttcactggccagcactttagaaaagcatttgcctttgcccatgggagggcatttatggcaggggaactgcctgggcaaaagcctggaagtgtggaaccttacaaggtgcttattatggcaggagggaaggttacaaggaacgggtggaaggatatgagcctgaagaagcaggcaggcstgtgtgtcaggctaaggattttgaaccttgttctgagggcagtgggagccaagcaaggcacctagtcaggtctgccagggtggctgcgtggctccggtctcctcctctacctgacctctaatggctggggctgggctctgagtcttttcccttctctggctgagctatgtccctcgatgatctcatcccatcccatggctttaaataccatctttaagctgctgatttccatatttatatctgtagtcagggcctctcttctgagctcccaactcatgcatccaactgcccacttggcatctctacttggacgtctcacaagcatctcaaagttaacaagtccaaaacaggattcttcatcatgcctacccaaccttctccacccacccccaaaagcctgctcccttccccgacccactgcagtaaatggtgccaccatccactcgccctcttcctaatggcatagctcaggttatcagcctactggttccacttcctaacccacccacccacacctctccaacaccactgctgcccctgcaggcaagacctgtccctacccacctggatgacacagtagccacctcacttcctccctgctctcaatctcaccctgccagtccattctccaatgcatgacagatccgtgaaaaagrgaaaagtacgttaatctatcacctaaaattctttagaggcatctctcactacctggaataaaatccaagttcccagcggcttcaaagcctggtgtgatctggcccttatgcttctctgaactcactttgcctgattctctctcatcacaagccccagccacgtggccttctttgagttactaaaagcatgtcttgccccttcccacctccagggtctttgcctatgccgttcactctgcctggaacatactgccccagctctttgcacatccccctggcaaaacagatgcctggacagtctcagtcataatgccttattctcttcatagcactttttttgtgtgacagagcctcattctgtcacccaggctggagtgcagtggtgcaatcttggctcactgcmaacttgcctcctgggttcaagtgattctcgtgcctcagcctcctgagtagctgggattacaggtgtacaccgccgcacacagctgatttttgtatttttaatagagacagggtttcaccatgttggccaggctggtctcaaactcctggcctcaagtgatccacctgcctccgcctcccaaagtgctgggattacaggcatgagccgccacacctggcctgctcttcatagcacttttcagtctgtcttccctaacagaagcaagtgcagaggcaagtacagtatgcttggcatacagtaggtgctcattaaatgactgtggagtgaacaaatcagagaataagagaaggggacctagaagtaggagattgggcaagagagagtgagacctgaaaggacaatgcaaatagaggaaaggaaccagcatcaggccagatgtctggatttaatcttaggggcactggggagccacagaaggttcctgagcagagacacagacatggagatgatcattagtacagggaaggctgtatgcctggtggtcatgtaaatgggctctgaaatcagacaggcttagatcagatcttggttcracaacttaccaacatgggtcctcagtttcctcctttgtaaaatgggacctgctgaagatcctacaactggggctactgagatgataaatgaggcagtgcacatcaagttcttgtgaaataaacattagccgacactgctactgtagggttgtcacttaagcaacttatgtgtgtctgacattgcacttggtgctggggatacccggggaacctgaaccaacccctgctcacagtctggtgggagatgtttacctgtctgtagttccccaggatccactgtacagaaggtagaaaccaggcagagaattaattctgggagaatcaggggaggcctcccagaagtgacattggatttcggggagacagtttccttgagagaatattttgagtcagcagccactggcccgtgaacaagagaagagsggtgtgttttggctgctcagctctcaaaataacccgaatccgagggcggacagccccgcaagcctcaggagctatgccatttcaggccaggttcctgcgacyttggaacagtccttgccctgccccgcagcgtccccccagcaagaggtctgggcagtcagtgcaggcaccacagagacaggccctctctcccctggcacatgggtcactgggctctcctgagacccarctcatctttgcatttgggcttctgaaccagtgccttgaccaaagaccagcaggtggcaagagggcaggctcagagcttggccactgccctcactctttcctccgggcctcccggctcccatcttcctgcttcggtctctgtgtcttggcttcagttcctctgtgtcttcctctgtctctgcgtccctccctctccctcccttcttaggtcttgatgtatctctttttttttttttttttttttgagacggagtctcgctctgtggcccaggcgggagtgcagtggcgcaatctcggctcactscaagytccgcctcccrggttcacgccattctcctgcctcagcctcccgagtagctgggactacaggcgcccgccaccacacccggctaatttttttgtatttttagtagagacggggtttcaccgtgttcgccaggatggtctcgatctcctgacctcgtkatccgcccgcctcggcctcccaaagtgctgggattagtatctatttttttaaaagaaaattattattaatttttttaaattaatgaatcataattgtatacatttatgggggacaatatgatgctttgatgtatacagacacacacaatgtggcatgatcaaatcacactaattaacatattcgtcaccttccttgcctatcattttttatggtaatatcgatttctcttttgaagtcagtctctgtttctctcccctctccctcttccgcctcctttcctccctccctctcctcccactcctagcctctcaagttcctctctgcctgactgtgtctttcctttctctttcccctcctcccgtaccctccctctgctcaactccctccagtaagaggcttcctagaacacacacacacacatctgcacatgcacacgcacgcacacgtgcacgcacacaaacacacacacacacacacacacacacacacacaggtttcctgaaccccttttaaaaccaaagtccaagctgtagactcccgtggcctggaacacagggaagagggtgggattggcccgaaggggtgtgtgctgaggctaatggcagggagggggtctcctgcaccctggccttcacccscaccctcacagccgcgcgctggagacactgtgctgggggcagggaggaggcttctgagcgggttccctgctgcgtgtggctgctgtgcttcccgggcaagttggactgggcaggtcggactgcggatcgggttattgggcccattcagcagaattataaatagcagcttgtgcctggcctggcccagagaacaaccagggctgccgcagggccccccaggccccccgttctccacccctccagccatcgctctgaggcaaggcctgttgtcccccgtgctgtcagtgggtcccaggtcagtatccgatgtgctgtcgccatagcaacctgcatgtccctgtctcaggttacgagacatgggggtgggggaactgagggacaggtccagtggcctggaatcaaaggtcactgctctgtgctggggcttgctgactctcttgggggctgrgaagtggggtcctgtcccctggaaatctcaccacgctggaggaagctgaggcagagatgccccgaggcctggcagaggggcacaaccccaggactctgccagtgaacttggcacagtgggtcaggcccagaccttgaagtcagagagacacaggaaatccttcatcctcacctattgcttagctcatcctgggaccaccatttaaccctcttgagcccagcatacccctcaccccctgccccagtgttactgaggagatcaaagtcaaccagctgggaggcaggtccctcagtcctgtacttaactcattagtccctggggacagtgtggctcagggtgaagctcacagactttggaatcacactggcctgggttcagatctgacctctgccattcaccagctaggtgatcttaagcaggttgctcaatctctctgagcctcagtttccccatctatataatgggcatgaaaacaacacctacacctgtgttgtttgagggtgagatgggcaacagtggcagaaggtgcatagccccgggtcctgaaggtagcagctatacttgtcattgttgtcactttccgaactgctatttctatttcaacctcctcgtcagagacagccctgccttccttgataactccctgggtcacttcaagtgattccttttccctcccaggtctgttttcccatctgcaaaatgaccacaggaccactcaggccctgcccagcgctgagatctgcctatcttaagcagcccccacgggggctgcgctgttctattrttatatactgacaccctcacctgggtctgggctcctgaaatctgagcttggtgtgagtgacatcctgcatggttgccaggcaaccaaggcgcgagctgggaggcttgggtgtcagggtgtccatcagcagccctctccccaaaggctggagggagcaagagggctyagggcagatctttgcctggctagcccaggaaggactgcccctcctctcatacctgctcaagtccaccctctcttggaacccactttctcagggtgaaaggggctgctggcctgggatatttttgtagatggagcaygtggtcaggctcagagagagaaactggagtctyctygcactgctatctgatacagctgctgtcaccatcaccctcttcctggaagtctgcagcctaagtgtgcccaaaagcatggagaattccctgaccccctcagggggcctgacgctggcttctggagcttccagggctctttgcacgggccctgagccacgcttaacaaatcatatcacccttatatttaccyagcctccctgcatgacctcttgtattttcattccttcacctaacaaatgctgtattgagtatccatcccagctccgctgtgttctgagtgaccttgggcaagttacttgccttagttttcttttctataaaatrgagataataagaatacctgcctcatagggatgtgatgtggatcggatgagatgacgtgtaaaaagtgcctcttgcagggcttggcacatagagaatgctccataaatgttagcttattatcattaattttattcagttgttatcatgtgcaggccccatgccaagttaggagggagcagtaccaggctttctgaggacaagggctgtatctggttcctctccatccacactgcattacacatcgaagtcgatccacagcaaaagtttgcgagatgagtggaaataagaaatgaacaatttgccctgaaattcattactcagctcgtgtggagacgttagctttgaacaccttttatagctccaggtattcctcaggctctcttaacggcttcatcatccacaaaactaccgaagtgtgtttgaaatctctttgtcagttttcagtctctgccctttgattggggtggggtggagcaagtgggcccatgagtacgtcaggctgacttaaatggcaaggcagacagatggcagaggaagcaggacttggcactgataggaacccaagacgagacctgcctttcatttcactccttcagcgcctcactggcctcaccctggtcccagcaccgtctgagtgacctgtatcaagcaggtcacttgtccccttggagccacagacccctcatctgtaaaatgggcaccttgctcccactttccagggttacaggtgagacaaaggaggctgcactatgatgaactccctcaaataacagtaattatttatagcaagataacagtgctgtaggagagggctgggctggtggccgctcctccctggggcctgccatgcgtcagcaaatcaacattgggtagccgccagccctctggcccagggccgttcctaacagcaggtgatgcggccaggctgatggtgccaaaatttcatccttgacttcttccaaacaggaaggggctgccatctgcttcccacccctcacacccagcccgctgggccagccatggcccctgtactgtgccccactaagggccctggcctcgcacctgtcagccccaccaggagttcccttagtggatgctgaagctgggggtaccctgaaagcatcctcctgtctgtcccacagcccacatggacactgggcagagaggaggggagcagggtggccctgtctttccatctcccccagaaccccgcctcccacttccctggcatctccaccaaggggcagccccattagtgctccttccagatccaggagcctattgagtgtcgaggtcatgtgcacagccttgggactcagggcctaatgcaaatcctggtcgggccattccctggctctgtgaccttggccagtcatcccacctccctgcacctcggcttaaataagggtaccttcctgggatcaggggagagcgggattattgagatactgcctggggaaaaggtggagacaaggagcagcagggggtggttataaaactttgctgctctcacgctcatctctgtgactgccgctgctcctccaatgccattacaacattggccatctccccgccaaaaatgttacctcgtttcctccggttcagtaacggtatcctacctgtaggctggggctcggtacacagcaggtgcccagtgcatgtcctctgcctttttattcaaacataagcgtggaaggaggggatgagtcctgacccaggaaatcttgttctttcccagtttctggggtccagccacaagtttccgtggccacttttccacgtgcccactcagctagcttttgccatgtgccaactgtgtctgccaggtgtgctgggaactcaaaaatggttggaccctaaagggcatgagcggtcaagccccatggagggatcagctgactgcccggagagtggggttagcataggatttactcaggaaggggcccctggagcggggctctcaagggtgaataggagtccaccaagcagagaagcagaaggcagggaatagcctgtgctaaggcataaccagtggtccacaaggcagctctgagttggttttttattattaaaacaagaaaatttccccatgtagatgtttcagtggccagaatattactctgtctgatccaaggacacagacaaccccatcaaagtagaggttgagggtgtcatgaccagagaggcccctcccctgggctccaatccagtgtcaaagacttatcacaagtcagcatgtagaagtctcttagaagccatctagcccaacctctttagttttcaggtggggaaactgaggccaaaaagagaagaaggtggagcaggagcagctaatggcagacttcattaccaggcttgcccaatgcctacccacccatggtgggtgtgaccagctgtggggccgcatgctctgctcatgattrtgagctgcacggtcacccctggagatgtcgctatctctgggatgcaatgcaggcccctgatatctctagccttagttttcttacttgtgaratggaaatggtcaacggatccttttgagcttaaaactgaaaagcatctaatgaacactcatataattccattttgttgttctgtcattgggttcagggtaaacctgaatggcagattttcctgmaagctaaagtcatctgttggcatggtttgggggttcaggggccaccctgcagacagctccagaggcagtgatgaagtttctgctataggttagccttttattctcttctggagtcttcatgggtgcccccttttttgctacccatccaccttccaaactgagacactaagacccccactccaggtagtaaaactgttcggcctaattgcttcctcacaccccaccacacacacatagtctrgacagagtcttatttccgaaatgcacatgctttctgcacacctcaacacccagcccactcagacgtgtgcaggctagcttatacacaaccacacacatcctggcctgcacagacacgcatctatgcatgcacacgtagacatgaacttcagtggacaagagggagcaggactattctgtgctgcactgatagtaggtcataaaacactcagtaaatatacaacaacaaaaattgttagcatgaagaaaatctcagctcaacctaaaaagctttgtgaccaccagcattgacacagactatcctggacaaagagagtgaactccctgtcaaggggggcatgcaaacacaagcagggcttaacagagatgctgtaaagggcttaggcatcacagggatgttgacctttgaggtccctcctgatctctggattcaagcaggtttggggagtcagggcctcttctgagctttgtaaacactgttcccttttggtggcctctgttctagaagtgtctcttcttcctgcggtaccatcacagtaaaggacctggtggttagggaccaactcagtgcaggcctggtgccatcaggatctgggtcagccactagagatgcacacacctgcacacgccccccaacctagcacccatttcgtagcaggcccaaacctggagaaagaaacagaggtggcagctccggccttgtcagtcccttataacaaggagtcagaagtagtgaagacctgatttgaatgttacaaagcaggaggtctcaggacaaaaatatctacaggggcagggagtaagtatggtgggctggagaaagatcctttgacttgaagatttgaacctaggttccaaccacatcttaaacccaaaacctaaactctcctagatcatgtctcacagaggacagatcctagaggcagcatgacatgaggcctgggattcaggagaattttgaaatgcagaaggatggtactggaggagctggggctgtgccccactgggaaagagggaagcaaacagcacctcccactctttctctgccaagttgcctgtcatcagacccagggcttcagagaaagaaggcaactgcaaggctgagaaagcagaagggagcagagcttggcagggccattgctgattgctggggacaaggagaggctgctggacatgaatacctccagagtctgaggtttggggtctcctggagccttgaaagcactttggcacttgaactcttaaacgttctggctgagggatctgggcaggacttgaacctacttgagaagctgaaggagtcacaccagggctcaggggagaggaggcttggggctggttcttggcaagtcatgaggacagggtatcttcaaggtatcccttaggcctccccagagcagcccaagattggagaagggcctggcactcagggaaaatttggcccaaggatgaaggtgggacacattcctggagcatccatccctggggtagaggtgggtggcaggcttaggaaggtgagtcctctgactggccttgggcctgagcccagctctgccagcacctgctccatggccttgcaccagagccttccacctgagggcctccatttccccatctagaaatcactgtcatcccagtttctagtttctctcgctggctaggctctgggctgagccctgtgccctgcattaactcacattttcctcccaacaaccctgggagggaggggctgtgattgtctccatttcagagaagtgacaactaaggccagagaacgacttaagtggtttccatggaaggtagaggcttctggggatggaggaagttcccaggaggagactgcactgggggttgcagatctagggaccctgagatggataaggtggtaacaggcagagaagagaggagagggcattccagatagcaatcttggtcatgctatggtgtggagctagggctgctgtgggggccatagactgtgggaatggagggagccaagctataccctgccgtgtcctggcttgcttttatttggggggcttggagcctcagcatcaaacccttggctctgtgcagcttcatcaaggctagggtcccctgggcctgtgtcccctgggaggctgcattcgcatctgtccccgcgcagatggctggtgagcacagctagcagcccccacccccacccgcacccccttctgtcgcgaggactcggctgcgctggggagtgtggtgcggcattatttttagaagtggcaccatctgttcaaggtgccgggtggattctgttcgtctccgcagtggccagggacagacatgccaagtcaggggaagagctacagagctagtcaggcccccccatggtcacacttcagccaggatggtcactaatcagcatgcgcacagggcatggggttccagggtctggggtctggggtctggggcttggggctgccagtggggcagctctggggccaggagagcrgacgcagaggatgagtttgaggtaggcagcggcatgtgcccccccacaccccacctggtccctgggactgggcccaagggctgcctcctggcagatcagagtgtcctggccctgacctccaggtttcagggacgaatggagaataggcaaaggagaaaagtacaaaggctggaccataaggatcctcagtgggacccagcactgggtgtggcagaagacaccggcctggccagagtagcccagaggactaggacatctccccactcctgacccacatgctgcagtgtgttccactgcctgaggggccactgtgtaacactgtgatccagagcaggggctctgaaagcagcctgcctgggctccaatccaacaattacgtgaccccgcgcaatctctttaaccttgcaaagcctccatttgctcatctgtgaaaggggataccaatagaagctccttcctggggttcatatgtggatttgctggtttgatgcctataaagtgtggcacgtgtccggccctcagcaagaatgcatttggcataagttattcctaccatctggttggccagtttctgctttgaaaggcaggtgtcaccctaatattcctcgcttcccatgtcattccatagtccaactgctttctcggtcatggaaccagacctggtggaggcctgttctgtgctggggactggagaggccctgttcctggggagctcagggcctagttggggaggcaagctggcaaaacccaccccaaggcagtgggtggagggtcaaagtatggatttaaggagtgagccacacgcgacgggctggcagagggaagagagttggaatttggagcagaggaattggagagaacttcacagagaagttggcatgaggactagatcttggagagtgaggtttggattaatggaaaagcaggtggtagaccattctggatccaaggaacatatatgcaaaagttggaaggcaggaacttgcattagttgttcagaaaatggcaaggaccataaggtccctcagtgggacccaacactgggtgttaacttagacaagaccccagagaggccaactcggaccccaaggaggccagctcagaccccagagaggccagctcagagccaatcaggtgggatgtgggaagctgtagtcacgaatatgttttcttaaataggcactggtagccagtgaaaatttttaatccagagacagccatgctcaaatccaaaaggcagcataatgtggcagcttcagagtcagaaaagcccagttctactcccagatctgccactcctcattagctgtgtgagcttgagcgtaatgttattttacctctctgagcctcagtctcctcatctgtaaaatatgcataataatacctacctcatggggttgttgagggataaggtatgagcagagcctcacacagcctctgacatgcagaagccactctaaatggcagtcactgtcagcttcactctgtggtcactgaaggaggatgtaaggctagagagccagggggctgaggggctgtggatgaacctaaaccagagttgggagcctggggaggggaggaagaggagttaggctgagcctttatgctgatgcttcctgggtctggtcaccggactggacatgagggaaggattagagtcaagagtggcccagatagtgctgtggatgcccttagtaacacaagggtcacaaaagaatgaggagacttaggagagcctgagggcctggaggacctttggaggggacatttggcaaccacaagaaggtcggttctggagcttgggagaaaggccgtggtggaaaggtcggtctgggaaccacccatgttagggtgaaagttgatgccagatgggtgtcattgcccagggagaggcaaggcattaagagggcaggaccatggggaaacctacagttaccccaaaacagagaagccatggaggcctgggcagacatggtcagagaagcacaggagagtgggaagaaggaagggaggtgccatcagccgtgggcagggacgtgaagactgaaaagggccctggagtttgccagtgggggtcctcaccagaagccacccaagggcctagcctaccaggaggtggcatttggatggttagggccagggagttggagattattttgagccacagactgagtcacaaaagcaaggcaggactttagaacccaaaaccaggaaagtgtgggctacaagasgaaggaagcctagagatggaggaacaggagccccaaagcacgaggacaggagttctgctcatttaaaattcacagcccccaccatccgctcattcatctctgcagggtgggggctgcagacctgtgttttaaccagccctcaagtgatgccaacataggtagccctcagggaaccactttgagaagccctgttctggggtccttgagccgcacccagagaagactttatcaggagaggaaggagagaacacctttaccatgagggagggtgcagacccaagtgcaaacctctgcttatccccacgtgctctcagctgctcctctggcttcctggccttttgattttcctccttcagatctgaggccaagtcagtagcctcacagagatctctggctttctgccaaggagactctgggtggagayaaccagggctcaagtgtggaagatgagtgcacagtcaccaaaccaggggcacctctgctttagtctagaagaagtagaacagtgtctggccacagtagtgagaaatagaagctaaaagacacttccacccatgcacatacgcaaatccctgctggtacctgcatcattctcatttcctcactcctttgaatccaagagtcctactttctgctgttttaatgcctctttctcaatatagctagatttcctagcatccgcattcttggaacacatagaaagactttcctccaagccttagcttcctgtttctctgatctggaccccaaaggactcactcaactatccaaaagtaatatcccaacttagacacatcccctggcacctctgtgggtgagtttttcctccctcaccccatggaggaaataatttactaagctcagtcagactgagatgctaccacttaaatatgctcccagttctggcagaaatcagaaggaaaggaccacgcacagtacaaaagaatgaatcactaatggtggaatttctggcatcagtggcagatggcactgatggactgaagtgggtccacagtgcatgcacttcagtgaccctgagtcaccttttatacagtatcattttgttagctcagtcctgccccctaaaagcctaaaaaacaggctttgagcatcagcactaaaatatggggtcagctccccatgcttgctcacagaactcatggaaaaggcccagtgccttccccagcgcctacacccagcaccctaggtgttggaagggggttgcacctttctcttggctttcccaaccccactcttcattggtcagcattgctgtcctggagagttcctaggggcacttaataacatcctgctctgtgtcagcacctcagtgtgtggacagctccttcacatgttgtccttaacacccacctccacctccctaatcagcactgtgcccttgaggacagctcccagggaagccagwtccccactgccagctttgtcctccccaggggtactgtctttcagcaccaggaccacgtgggcagttctcactcccagcctaggttagtcaacctgctggggagagagggggcctgtagttatcaggttccctgacctcagctatccaatccctccccagcactgacctccgtccatccatcagcacttcattcccagagacagctccctaggccccagccctccatggtcagaggtgaagcctgaggcctcaccaaccagccagtgacctgttgtgtgtggtcagaatactgaccgcagaagaaccctgtgcctcactgtagaaaccagaaaggaaaaacggcaaagaagttggtctgctggacagaagggtgtgagcctaggttgctgttaagagtgcctgtgtatgagagagggctggccctgccaccccttaaccataagaccttacaccaatcactgcacactcagtctgtcttctcctgtataaatggyggggctggagtaccagtgcaaagcatcgttgtgaaggattaaacaagctaagtgcataaagcagtgctgagcacctagcaggaatgatgttggtgttgctgttatcattttttgttcttcttccaagcctcttcttgtaatccacagggacggagcagacagtgggagagaatgagggggatgagggcagaagaggacagtgtcatgttggccagttaggccagttaggacctggaggctggaggcagccagtgctgcaaagaagacctcaagaatttcagtgcagcagtagggaaagagttgggcagtgcaagagaggatggtgggatgtggctgaggcatttggctgaaaccagagtacaatgtccagagccgctggcccatcccaggcagggccaccatccccagcattcccacggcatgttccctctcttgcagcccaaagtgaagcttccccaacacttttctgcctcaaacaggctatcttgtctggatctgctagtgactttactgttttagcctcattagaaactccacaaatattttttaaggaaattatttctaaacatggaacacataaaaggtacaaattttggaaggcaggcaccgcagtcagaagcccaagggtgggcagtggatgtcacagatagaaggtgaattccggtcaggtcatgccttcctgattctagggcatttctccttccttcggcctccagccaagcaygacttgacctgcaactgggatgtccatttctgctagacacaaggcagcagcagggaagccctgggaactgtgcatgacccaagaagcaaggatccttgagggtggggctaaaataacccttcaacactgagcttctgtccagattgcacccttattttacagaagaggaaactgaggcaggaagggccatagtgcaagttgttgaaggacaaggggatgcaaaggaaaggcagaggctttggacagagaagacataytgaaactatgccaagtcctacccatatggccgtggcgattgtggcctctctgagccccagcttccttgcctataaagtggggacagcaacaccacacagcccatggaaggcacttgctaagcaattgctgttcatcatagtcatcacaccaagatcaaaactgagtggatctgattcctgctgttcatcatagtcatcacaccaagatcaaaactgagtggatctgattcctgctgttcatcatagtcatcacaccaagatcaaaactgagtggatctgattcctgctgttcatcatagtcatcacaccaagatcaaaactgagtggatctgattcctgctgttcatcatagtcatcacaccaagatcaaaactgagtggatctgattcctgctgttcatcatagtcatcacaccaagatcaaaactgagtggatctgattcccagggaaaacccgaaccaaaagttgtgcagaaatcacttgacccagcctgcacatcctgaccatggggttgaggttaytrgggggctctgtgtggcagagtgagcagatgttaaacagcaggaaaaaggatctgagtgtctctcttgctctcctcatagtcccagtgcccggggcagggcctgtgatgcagctcattagttttattgggtaggtggatgaacagatggatggagagattgatggattgacagatggacagacagctaatrgtcaagcagacagatggaaggatggacgaacggatggatagacggatggatggttggatggatggatgagcagaaatggaaggtttttcctgccatctaacattggcaactcctctgagaacagaggacagtggagtgagttgaccctggtaggaaggtaagggctggacctccccttcctcaggccaggcrtgagggtgagaagctccacaggaagccctggatccctctcactgcctgccccttagacctacgtctgccacctgtgccttcaaggctgatgcaaggcggtttctttgggattttttttttagattttccttttctggttaacagaataggagttgtctaaaaatagcactaaatttgcttctgaggtattcattttcagttcccttcctctttccctgttctctcttctcaactgtgagagtttgtgagattgtcttcttcagctttgagcacatacacagacactcacacatcrtggggcttgcacacccagagacaggtgtggcacagatatcttgggcttgctctctctctctcacacacacacacgcacactcatgctgacatgctccagtagacctgtgtggcacaccttgtcctttggggtcactcacaccaaccacatgtccactgatacatcatagagaccctctttcccacacacaaagcacggtcacttacaggcgtactctaagaccagcatttgcacacttcttctgacacaggtgtgcccccagaccctgtcccactcatactaagaaaaccaccataatgcactcccactgaccctgcacacccacactcatcttgcatatctatactagccctgcatactcacactaaccctgcacccacatatgccttgtacgcccatacaccctacacacccacacttaacctgcacagtcacactagccatgcacactcacactggtctaacacacccacacccaccctgcacacccacatttaccctacactcacacactcaccctacagacacactgatctagcacactcacattggcatgcctgcttacatccacactcaccatcaggctctccctccttacacacacgtgcagaggaaattgcctcccccagagaggatatctaagagaatggctgaggctctctgggtgaggacaagggaggagctgttggccctccacccccaactgcaggctgagttcacctgtttccttgggttcagcatggaggaagagggttccccatcactggggcagtgggccccctacagaaaggccagaatttgcaaccaggagaggaaagcaaacatcctacctcatgggaactataagtagttcatcaagaccagaacagaagggaaactagccttgtttgctgtgccaacaagctggaggcctccccagccacctgagaggtgacaaggagcctggtgggcatgggaaagtcagagctgagttccctttgaaatatggcactatggggtacatgctggtctgggagcgattggaggcagggagtaagttaaattttcrtaggagagtcaccatttaacaagtgtttcctcgttgccagaaactgtgctagctctatctcaatccttasaaaaccctgtgaggtaggctgtagggttgtctycatgttggggagggtcaaccaaggcacagaggattaagagccctgcccaagtcacataactagtgactggcagagctaggcttccatcactggggatcttcagaccagacttgtgccccacctcagtcattgatgattcaatggaaaagtgaccttaaaaatacatattaaggtggcacttaaattcagcatgtcttaaaacagaagaatttggcatccagaagttatttttagcacataattcatgtacgactgtcccagctaccatccttcagttaggatttgaaaagctgttggtttggggatttgttttgtttatttttttattcttccttcgaaagatagattccttctttgttaaattaactccacaaacaaaaaaatattgctccttcctctcccaacctcccttctggcaaagactttttattaaggcacccctaacctattcttgagtcattgaaatgtaacaatacagagtaatttaaatgctaataagatgaaactgaaatgcataaatccaatattgtcagaatgttctcctggattctgaagggcctggcacatcagagcctgaagggactccagagagcactaatccaatcccttcacttcccacatggggaaactgaggcccagagaagaaaggggcttgctcagggtcacaccaytggagctgggaaaacaaggaggagattctcactgggctttgtctcagttggctgtgtgacccctagtgtgttgctcaacctctttaggccaggtctggctatatgccctgtccaggcctgtgtgcccattgcttagggcaggggtgctcacctgtgcagtgttgagagctgactgcaagtgaacctcattgcaaccatgagggaggaacatttgctaataactaggaggaggggagcaggggggactcaaggaagccagtgtttcattttctgctctgggccaggagctggctctcattgagtccttgcagcagcctgtaagacaaacagggtcatccccactttacagaggaagcccagcaaagttagatgacttctccaaggtcacatagttcatttagtctctcagccatagagtggtaggtcacatgatatttggatgaggcagcaagagcctgagaatcttctggggttgtggctgagggaagtygtcccagcttcaccctcactctgatgcctcattacaaagaggggaaactgggcagtggagggcagtgcatgcatctcaaagaaaaactatgactgctgattttgttatctttcctgaccccccagaaaactcttaaggtaggcagggtaggaatcactagcccatcttacagatgagcaaactgaggtctgaggacctatctaaagtcacagcttccacaggcagtagacccaacaccaaatatttattgagtgccttctggatgccagacactgcactaggtacagaagagacatagcaactgcccacakgatgctctcagratcctggggaaagaaaacagttaagcaggctcaagcaatacagtgtgaagtgtactacaatctgggaggcacctgggagtcaggagcatttatgcagtctaggtggtcmggaaaggcttccaaggaagggaaactgaggctgaacaggacagcagctgttagggaggcaaaggcccaggtagtgaagagtgttctgaacagacacatggcacatctgcaggagtcaggcatctgaggtattctakgcaaactatggggtcctcagttctgtcaatctgtgaaaagatcatttgtrtaatatcatacaagtagcttttgtgctggtggacttcacatttttccagcaaatcttgctgycagagcaagcaccaaagtgggctctacagcttggaatgaaaaaacaaaatgcccagaaaaggggtgacctcatgtttgcacccatgagatgaagcagggttagggaacaagccacatcagaagaggtagagaaggaagtatgagatcagtcgccttcagggtggagttctgatttttaattgattttgttatcccagagttctgtccctctatactggctcacactgttttccttctgcaccttttactagcagacagttgtgtatttcagtttcttcaygattcatctttttattaagtccttctttacctgaagaaaaaaaaatccctacttggagctgagaggaaaggcattcctggttaccccgggccagttcaggtcttcctgctttgtgtgtccacagcacctgggggtccccatgatggcaaactcttcaagtcatagaaatcactaatttagttgtctctcttcttcactgtgggctcgtagagggcagagttcctctctggattgttcagtgcctggcactgtgtagtacccaaaacacaatcattgaatggatggttggatgggtaagtggatggatggatggatgagtggatgggtagatgggtcggtgggtggtgggtgggtggatgaatggatggaagggtcagtgagtgagcgagtgsatggatggatggatggatgagtggatgggtgggtagatgggtggatggatggatgaatgaatggaagggtgggtgagtgggcaggtggatgggtgggtgtgtggattgatgggtgggtgggtggatagatggttgaagatcatttttcatcttatcacagtagtcattaaaatcaacagtagcccactaactcatgcctactgttgtgatcacagatataattgctgctaacgattctcatagcttgcttgtactgtcagagacrtaattatcagtgcctgtaagccactccgcaggtagcacaggcacagatagaaaacagcagctcgggtttagaaagtcccttgtggattgcaaagcactttcattcacatatggcacttcatttaagtgtcataagaacctcatgagggagattcaccaggggaagcagaaaagcatcctgattaggaatgtgtctctggacccagactgcctaggttcaaatcccagatccaccactcactaatcttgtgatcttgagcaatttacttcatctctcttggcctcagtttcttcatatgttctagggataataggtctcataaagcgcttttatggattgacaataataatcacaataatttgagtgctgactatgttctgggcttggttctaagtattttaaacgaaataactcatttaagcctcataacatctatgaggtagatactcctattcccctctgctttttgtaagataatgaaatcaaagttaatttccttcccattcagctgggagatgaaggagccagaatttgaactcagaatgagtggtttccagagccctatgcataacgccttgcagcgtctctgagatagatatttctgtaaaacactcagagtgcttggcacctaataagcactcaataaatgcttatcatgtgccagtcaggcaatgttatatatcagtagccccaaattatagatgctgaagctaagacagagaatccaggtgactagctcagaatcacaggtgatttctactgccagtaagtttagtgcaggtgtgggtggtaaatgttcaccagctttgccttcacccaatccagacttgttgcttaagcgtcaaggactgaggcctcctggggctccaggtcagtcccaagttccttctggacagaaggtctgcatctcctcatctcaattcttttccctgagtaagcaaagcctgttctggaaagttcttagtcaaatcacctccccagcgctcacccctccagcggggttcagccttcccccagcatctgagacccatctctcctacaagccccagccactgcattggcctgaaggacccctgacctcatttccttccttctgccccaattgtagcccatttgcctcactctatccttgtcttactcctgccatttggattttctctacccagcttcctgaacatacaccaaacacatttacactgagcaggcagcaggaagagcactgcttaatgtaaaagctcccgccccatccctgcacggacctagtgcctcatccaaccctgaacaagggcccacatgttctcagaggtctctccttgcctcctgtggctggccctagactggggagggagccgtattgaggctctgcactagcttgtagcagggggaggagagcattcggcccaaacccaaatgccaacactctccccagagaggttcagcatcctagaccaggcccctgccaggcccttcttacagggtagtggacaagagtccaaagtctaaggttgaaaagatcttccactccgtggcatctccccactgtgtgaccttgggcaagtgacttcacccctctgaacctcattcgcttggtctataaaatggaggtaattctagtatccacttcacagtgttgyacagaatgagacagtgtctgtttgcttttcattcattcacttattcatttaacaattgtttactaggtagctacaaggagccaagtgcttttctggtcaacccttatagaatttaccttggatggatgatacagaactcatcccacagtgcctggtacatagtagatgcttaagaaatggcaggggagtattgttgtttgtttttattcacattcttggtccctgcctcacctgcttctccgaggaatacattgttggggtcaaaactcatggattctgtggatggtgtgtgttccatccatggccaaggaacatggcytcttttgagtattgtaggtgggagcaccaagcgtgcagtttctttggtgtctcatgtctctgtgyctcttcttgaggtatcacatccattttatgttctattccataagagatctgttagtcccagtgtaaaaataatcttcctactgcatccctgagtaaaagcgtcccttgtgtaagacatttaaggtttctcctgtggctccagcacccagtgacccaagactgggaagccccaaatccagaaacacactggatttgaatacagtttataattagttctcagtaaactgggaagtagtcaggggtaggggtaaggaagagagactgttttgcccccaatttgcagatgagtgaaccagggctccaaaaactgaaggaacttgcccagggtcccacagccaggatttgaacgcaaatcgctccaatgccagatactgtgttcttagcggctgcctggcacagtccacccacccaccagggctcttcggagacaaacgcgggagcaccccctaggggaaggggaggagcccagggctatgagccaggagaccatctccttctgcactcctcagcactctcactccgtgcggctctggaagagtgctttttccctctctgagcttcaagttcccggctgggaaagtgacttagccctagaatgcctccagctctaaaatgtgtgaaagacgaaaaggttatgaaggtgataaggcaggggaggagttggasctgaggagggggtcagtcctgccttccttctctcagcccttcccctcaccrtcctgggcccaggatggccagctgtccatgactgcggggcagggccactccctgtgccagacccaaccgagctcagctggggccctttgtcacccaacgcttgctggggcctcggcctctggtgttgggtgtcrgggtggattggattctctcctggcagccccacagatgccgcactcctgtaagggtggccgggcgggcagggagaagccagagctcccacctcctcctgggctccagagagggacgggaagccgctgtccctggtgctggtccatagggacccccctccccctgccaggtgagggctccatggacctgaactcatactgggaccaagctctgggctcaatgacattcttgtgactatgtatgacctggcttctttggccaggccaagggcctcgattaatatggtgggggcctgtgggtgcaggtgggggctttctcccatccccatgcctatgagacctgagtggggagggatgtgggagaagagtgtattggtggacacaggtggcatgggtggagggaggatttgtaggggcggggaacctgggaaccgtgtatttgggggagagtgtcccagattatttgggcatggggcgtgtgtaaacatgttaaggrtagtgagagaaagagggaaatggagtctgggtgtgctcagagggcctgtgagcacagcaattcttgagggaaaggggtggggaggttaagttgtatggctcaaagctggtgcatggggcctgggtgttgacgtgtgtgtggcagtggcacaggacacaaggacatgccagaaggtatatgtcgggggatgtgtgtacacacagtgtgtgtgttgtgaagccagtgtgttccacagcacaacacacaaatagggagttagagtgtgttatggggctatgccttgagggtggcatatcgtggagtgcctgggttggcgctagtagcattggatttacagtgtgagctggtgtgttagggggcatgggtgtagtcagtgttgtttaggttgctgtgcgtgtgcctggggccttcctgagcacctgtcccatgtggcctccagtgcctggcctttgtcactcactctgtgcttgtcccacaggagccaccacccctgaccatgtagatgccagttccagggagcagcatgggccccactgaatggagactcctgggtctacagccctgagcccctccggcccctggacctcgtcccacaccggaggacacctcttggagctcaccaccactgtcaccagcccgcctcggccacccccaccccccgggacccggagtcggccgcctggtgccacagctgaccagtgagggtgtgctgaggacagccacaagcagccatcacccggcagcctcttgtccagcgctgacccttgggcccagcccgagcaaggaccgcagcaracatgggtgacatgaccaacagcgacttttactccaaaaaccaaagaaatgagtcgagccatgggggcgagttcgggtgcacaatggaggagctccgctccctcatggagctgcggggcactgaggctgtggtcaagatcaaggagacttatggggacaccgaagccatctgccggcgcctcaaaacctcacctgttgaaggtaagtgttcaagacttgaacccagggctgcagcctaggtggccaccatctraattggccacagggaccatattcataatatgtaacagcagggatgtgtcagagaaaggctgaaatgccagaatggccattgtagtgcattctagctgagtatcagcccctctggataggctggggagcagggcttcatcaggggttgggcatgacccaagccacctgcagagagaatggcaggaagaaagctgggtcaagactgtgttctggagacaaggagccccacagccgcagagtggcgagttcaacattctgttactatgggaggcactagtttctgaggcagaggcagaagggccactgggtagaacaaacatggaacctgcacccaggcccaggaggggcttttgctttccccgcttagcccacagtggatggatttgggggttccaaccatgcaggcccggtccttccttccccaggccccaggaattccctagtgtgggcttgagtgtggaaccatagcatgactaatgtgcagccaattccctgccactgggctggaatcaagtctgtctctcaaatccagactctggttggggatcgctggggctctggggcatcacagctctagggttgctgggcagacaaagcagtaggaagatggatgtgataggaagggtgacagatgtccttgtatgtcctgccttgagggtggagtggggctttcttgcaactgccaaaattgagcaggcctggaatctctacagtgtgtttcagctcctgggggcttttctggaagggaccaaagctgggtcctctgcctcaaaacagagacaagggaagtcagcccagcttgggtaccagacctcatggtttgggttacctgccacaagttaccttcagctcaccatggaaaggaagcattccctacgttaaccctacaggcatgtgtgtgaggctctgcagtgacactcccaatcctgaacatttgtgcaaagctgcaccgagcctcagttttcttctcctggaaaatgggccaatgcctacctgacaatgcctagtgcgtggctgggcatacagtaggtgctcaaagtggcagccatgattattctaaggagaagtggatgtcaagtccttccccagatatctaccaccacctgggaggcaggcagcatctgaactgttatccttcatgacagaaaaggagcctgtctcctctgtccagtcctctgagccctgggccctgctggactctagccctggcagcatttcctgcagggcttgcctggcagtccactggtcacatgtgcctacactccactacacccagcagctcccagctgtctgtgtccctctttgtctgctctcctggttcagaaagaaaagctaaaactggttcttcttcccacattgwctgttctcactgacattttgcccatcgcctgagcccaggcagaagtttagaaacaccttttctcactgggtgctatttttttgttttggcagggagggtgggaatagagaaagtaacctttcctcatagtgtgattctggcacgaggcttaaaaacagctgcttgtggccgtaaaatgggcatcggctttgcttggagacttctgggtcccagcttcttgtgctcacttatccctggcagaatggtccgtgctcccctccaccatcaggttggcacatgaggacgctggcaggcagggttgttcaagtggcctttgcctgttgattggggactgggagattgcctcaaatcaggaattcttaaatgtctctcagccccagtccctggggagaagctgatgggcactgtggcccctctctcagaaaatcagccaaccacacgcaacaggtgtggctcacactatttgtgggtttctagaccccctcaaagcagggttgtggaccctagttaagaaaaccacctaccactcccaccagaaaggctccccagagctgggaagttgagcagctcacggccaagttccagcaaccttgcagggccatttccggctggttcctgggagcccgctctgtactgctagagggagtattgcctagctgagacaggaaccctatctgctctctctgtacatcccatgcccaacctcatgcctggcacagatgaggacccggtaaaaccctgagacacagctactaagtcccagcctaaggtgggggagctctcagacagctgagtagcccaagctgcagataatcaagaccaagtgcagcaaggaccccaggactcagcactagtgaggctggtgggcagtgaaggtcagggaaggcttcatggaagggaaggtgtttggacttggctatggaggaaagagaagggaaagcatgtagtatggcctacagcagcatttcttagagggkatyccacagaataactggtatgctgcaagaagtgaggcttcaggtgaaaagtaaagaactctgttttctcatctgtaaaatggaaacaataatgacatctctattgctctgccacctgccagccgtgtgcctttgggccttttcgtctgacctctctgagccttggtctcctggtcattcatgagaacctaatgagatctctgatggccaagatctctgaggagaagggaagcccatcataggatttcctgcagctcctgccacattggtccctagaarcatctcccagggggctgggaggtacaggctggaagagatttggggagaggcagaagagcataatgccacagacccaaacttgggcatcccaggttcaaatcccagctttgccacttgcctgctgtgggactctgggcaagttactcaaactctttgtgcccccgtttcttcatctgtaaatcatggatagtaatagtgactacctcacagggctgggggaggacaaaatgaagtagcttagaacagtccctgacacacgggtagttctgtgtggtaggattcagccccagcaactaaacacctccatttccccatcaataaaataggctgtgaatattgaataaaatcaggtcaagtgcccagcatcgaagtgctcaataaatgtcagctcttgtcattgttttcatgatgagtatcatcactcgggaaaaagtgggcacgttctccggaaaggttggaatggtggccagtgtccacacatgagaaacactttgtacaaggctgttatgcatctctatgacacatgttcctggaaacgggtgctgttaccccattttatggagggggatatgagggctcgaggtcactgccacagttcaggtcagagcaggctttgaactcagccccatgctcagacctgagccaagcacggccacctgggaagaatcctctggcatccactgtaggacaaggcctgaatagggtggggccaagggacacttcctttactctgtctcatatggagcatttgtcccaccctgcttggccatcttctgatttagagaaatccttggcacagccccagccccagtttaaaagctccgtggtctgggctgtgccagctccagacacagggactcagtttgaccattcccgacaccccctwcccctaatctgctgacgagtagggagctggcctctgagtcacactgcaggaaatgctccaggccacgcataaattagccttcccattcaagttcagctaattttaggcaaaaagatctctgaaagtgacaaatggggtttgaggccacagggaatcagcgctcacccagggcacggctggcagccagctcagggtgtggctcccacagcccagcagtactggatgtcccacctggagaccctactttcctgacacctgttgggtaaacctgcccccctgtgaggctgtgaggccaagggcagcctctacccccatctaagctccactcctttcctcttccactgttggttctgttccattctaattaacgcctttatcttcttacctctactgttccctttccttccacactgtttcagccaaggacattaaaatcccagaaacctgagttccattcctgagtgtctttctcttcaagggacactgcgagagttcaatttaacctctctgaacctcaatgaacttatctgtgaagtgaggatagtaacagtacccacctcatgcaaatggtgtgaggattaaattagataagccactgtgcaaggcagaccctagacacctacagagtggtgtttattatcattgttattatactctagtgtttcttttaaaaacatgcatgggccccatccccttgaaagaattaggcagtcagacaagacactggcggtgcccaatgcagagttaacatgccatcagaggacatggaaagatgggcgactagtgccaggtggtccgggaggcctagaggcaggagctctgtgttattctccaccatgtctccaacacctgatgcattgcctgggagctcaagaaatatwcacggaaagaagaaaaggaagaagaaagaagaggcaggggatgtcccagtgcccctcctttcatgagacagaaggctgcaggcttggggacagacacaggacaccctgtgtcacccatggagcagatggctccagttccctgagcccagcgttgcgctgccctgagccattgcacacacagccctcattgctcacttcctgacacctgcacccacctcgggttgtcagaaagggtgacgatgatagcttgctgttgggtgtttgccacgtagcatgtttcctggcggggttgataagggggacaaagatggggcggcagcagggtggagtgggaactggatactgcagagtgctgtgaaacggaamctccggttaattttgtatgaatcccacagcctgcccaagtggaggagagagcggggctgagggaggacgagagagcagatcatgggagatggcgggtactttgtgctgcacgtgaatatgatattgaacgagaacgtccatggggctgccactagctgggcagcaggaggatgtggaggcaggggcaggggtcttccgtgtgttgttgccacattctagttccctctgtgttctgtcaacccaaggatcactgagaccctgagaggtcaacagggaagccaggggagccacagactcggcggaagcctgggcagggtcatgcgtgggggctccccagacacggagtcggcatggggaattcactgcctggccagagatgagtgggaaagccttgctgccccactccagcgccttcatgtgaagcggcccatgctccattctaaggcccaggactctgtcaggtatgaggccgagaggagaaaaactcctgagtatgcaagaggctgaggaaacacagctgccttctcaaataaatgcaggggtggaggggaagacatgatgactggtgaggtgtcccagcctcagctgtgtcactaagtatgtgggagacctcaggcaagatacttagtctccgacaacctcagttttctcatctgtgaaatgagaactgtactacttccactctctgccttttgtagaccgtgagttgaaagtgcttttacagaagaatctaggcccagtatttgctgagcatttttatccatgagggctccatctgacagaaacccatctcgaactggcttatgcacaaaaggagttttctggtttgtgcaactgaaaactccagggataggtctggcctccggcacggctggctccaggacctcaaatgctgtcaagaggactctgtccttccctctcctactttcacttccgctgtcctctgtgttggcttcattttcaggcgggttttagcacatgggggctccggcagcttcgggttaacatcctcccatcccggtcaatgcrgcagccaggcctttcctcataagccccgccccattaaaaatcccagactacgctctcactgggccacttatagtcacatggccattcctgagccaatccctgcagcttaaagatggagtgggctgatagatcagacctggtcacatgctcaaccagagggcacgggtcagtccaccaagaccccaaggagattggaagagggaaggaaaatggaggagaggctgtggacctgctgcagaatggaaggtctgtactgtgtgctggggaggaagatcagaaaggttccctgctcttgaggagagcatggcctggattgggagaaaacagaattgaggagacagctgaggagagaaggtaggattcagaaccacctgaaatataacatggctaaagattctaccagccaaaccacggcaccgttagtaattacaccagggtgctaggcatgagctgggaccgtccaggctgactgggtctatgactagtgtcacagtggggaagaggccaacttggtatcatggtgcaaatcctggcaccacttcttatccagctgtgggacgttggaccagttatctaactgtgcctcagtttcttcatctgtaacatgaggtcataacagtgcctctttcatagggtcgctgtaagcattaaagtaatatgtgcaaagcacttagtgcctggcacatggtaggtgttatttcagcattactgttattattctctgctgggaactctctgtgtggcttcaagggagacgttgggttttaattagtgaagaagagaaaggcagcttgtttggtagatcaatgggcttgagcaatgcatgtgagtcttggttaaaaaaaatgtcagccccatatttgatttgcaatgcttattatacacctccccccatcaccactaccatggggtaaaaaaaatccttcaaaagcacagtttaatgtgaagttccaatgaatcatgtgtggatgctttccagaatgctgcctgcatatccttctgaatcatcaataaaataaaccyacatgttaatcaatgcatgctatcgatggtcataggctggggtggtagagtctgctgggcaaataattctgcaggccacggggtggcagggagagcacgggacagatagataaagatcctgcccggcagctgactgaagggcttcccggtgattccagcaagactagggagtcttcatgtcccgtgagcgatgctgcttggctcactaggtgcttcccrtaatcaggcacccagagaggtggtagaagagatgggttgtaagggcagcatttccacggggcctcactttaggcagagcattaggcagacccaccatgcagaggcctgagtcccaaaactaccctggctctcatttactgtgagcgaactaagagccaggccttcccaacacattgttccctgggatcctcacagcagccccttgagtaggacacaaaggcttggagaggaagggggccctgattcttactatgaaggcattatcattttgcagaatcaatatgcactaatcactaagtgcctactatgtgcccagaaaagggaaggaatatggagaccattgactttgagtcccagcttcaccttctaagtccttaagtcatcccctcactctgaacctgtttccccacctgtaaatgatatgataataacacccacctcctagaactgatggaacatctccattgcttccccctgcttctaatatgccaagcagtgatggaggtggacacacatttatttattggacaaatatatgttatgcacctagtatgtgcaggcttgggccacatgtactcttctgggaagagacccagatctctcccatatgctttctcaggggcagtgtctgtgtgatgtggctacacacaggacaggtgggcagatggggacagggccggccttcaaggatatcccttcttggttcaagggggcagaggatgtcagacaggaaatgtcgggtgcagtggctcgcaccagtaatcccagcactttgggaggccaaggtaggtggatcacttgaggtcaggagttcgagaccagcctggccaacatggtggaaccccatctctactaaaaatacaaaaatgagctgggtgtgatggcgcacgcctgtaatcccagctacttgggaggctgagacacaagaatcacttgaacccgggaggcagaggttgcagtgagccgagatcagcctgggtgacagagtgagactctgtctcaaaaaaaacaaaaagacaggaaacaactccaggggcacagaggcaggcaggaatcaataggaaagatggcagccaagggcaggaagccaaggcctcagtgtagccagggggaggaaggaggaaccccttccagatccccttactctccaaagctccctatagattcccaggaaagggaggtgcaaaggtggattgtaaactgctcccgccttaagactgtcccagtctagctgtgctactagttactagccacgatgctagttatagctrtgatactagagaataattaacatgcattgaacactaacagcagccaggctccctgctgaggcttcacggcattttctcctataatcttcacatcacccctgtgaaacaggaactgtcatcatcccagcttacagatgaggaaattgaggctcagagcaccacgtctaacaagtgacctggccaggattggtgcctacactgtctggctcccaaatgtgcacacatgacctcctcggtctgctgctttctattgacaaaaataactactgcaagaggaaatgttctaaaggttgatgaaggaggagtgatccccacctgattggggacaaaatcaggagtagcttcctctgagtgaggcctgaaaggacagggcagaattgagtgtgcaaagatggggagggaagcacacgcagttaatggggcgtgagcaaaggccctgtgatgacaaccaggatgtgtacagggaacagtgaggaattcgctgtgcctggagcctagaacagatcgcaaagcacagaggactccagcccatgaactacagattcatttttgtagactctggtttttagtctgtttgttcatgctgtgtatgtagactgtcaggttggataatagtgtttatgtccctgtgagtgtgaaatgggcctccagctccataagatgaggccctgagtacagccttctccaggtgcatggagagccagtgaattcactgaatgcagggaaaccgaaggttggggaaatggttctcacactgggttccccagtgccttgaggttccacagaagtgccctacaggacaaggggatgctgaatggatgggactctggggcttctcacccaccaccatgaaccagagacagagacactccttttttttttttttttttttttttttttttagatagagtctcactctgttgcccaggctggagtgcggtggcacratcacaggtcactgcagcctcgacctcctgggctcagtgatcctcccacctcagcttcccaagtagctgggactacaggcatgtgccaccatgcccaggtaatttttttttttgtagaaacagggtttcaaaaattagccgggtgtggtggtacacgcttgtaatcccagctattcaggaggctaggcacaagaatcacttgaacccgggaggcaaagattgcagtgaaccaagctggtcttgaactcctggccttaagcgaacctcctgcctcagccttccaaagtgctgggatyacaggcatgagccactgtgcccggcctgatactcctttttaaatgctttgaagactttggttttttaacaaagtgttgaaaaaaagaaaaaaaaattgaaaacctctgatactggagaaaaatgctaaactagagtatccaaaagcctgggttggggcacagatcacataagttcttaatgcatcatttgttaaatctgtgaaatggagcagacactgtctggcttccaggrgccacactgactgtggattaaatgagagaacacacaatgtgcctggcccaggggtcttaggcgaagttggtctttgcgggggccccaaggggatgcatgtgactgtgcaggaaaagggtgctcagtccacccatgctgggcaggggcggagaccagcctgactttggcccttatcgactgagaccctctccaagctccctccaccctgttccatgcctcagcctccccatctggaaaataaagaaggttggtctagtagtctctgaggcttgtccaggctcagacattctactactgtgaaactgtctgccttgatgcccccattctgtagacatcagatgggtcaaagggtggctgactcacagccagactccaggcctctcttcacttgaaaattcgtgacctcaaaaccttggcccatcagtgcccaggccagggcagtgcccttggcccttggccctttgccccaggccttggcccagcagtccttttctaccaagcagcttcagggccctcccacgctggctcccaaaggtcgggtttagcgggggaccagaatttgggcatccctggcaacagttctstagctcccagaagcccaggggcctagaccccagtttccaattacttctcctccctgggtctcagtttcctcatctgtcacacgggcctaaggggtgagaaatgttgctgtataactgcaggcgggccgtctcgaatgctagtaggacctgagtcatccacccagcctgggtcccacaaacgcctcgagttcagctggagagatcctctgcctccaggcctgcctgtcatccgagaggcccagacagggcgggtaagttatttatacaggccctcctcaccccacaacgattatcttactcctcctggtgcaatccaggcccctgctgtggtttcagacccagagttatttatagtcagtggaaattagtgcctcagccgatggctccctaggacccacctgccctagcctccaccccaaagggagagagcaggcagcaggcaaagaagatgtcagaggtcggaggagagtgtcacatgcaggtacagtgtgatgagagtatctgacactggattggcaggcagttggacagagcagtcgcyaggaagtaggacgaaggagaaacggcccacactgaggagggcaggctgttgggtgagcccttgggaaagctctgctggaaagaacagcagaatggagtgttccctggggcctcccccttcagcacaccccagctcagtggggtcagagcagctggaataggagcctgagagactcatggacccatgagacaacaggtctggaagggccttcaaggaccatctgattcagtaatcccagggtgcacatggggagactgagacccaggagagaagggacttgcccagcacacagtgggtatgggccagggggcagagacacccgccacccccctccctgctctcccctgcaacctcctggctccctgcagagcctcagctcagccacgccatccaaagaccacagactgagtggcttaaatgacagaaattcattctctcacagttctggaggcttgtagatggccatcttctcccagtgtctgttcacattatcttcccactatgcatatctgtctctctgcccaaatttcctctttgtataygggtgtcaatcatagcatggattaggcccaccctaatggcctcatcttaatttagtatctgcagtgtccctatctctacaatgactctatctccaaataccaccacaattttaaggtactgagggttaggacttcaacatatggatttgggggagcatgattcagcccagaacactctgacatgggaaaaccacttcagtcctcagaactgaagctttcgcttctgtaaagtggggacatgaacaggacagcaagcggactgtaatgagggacacgctcactgctrtactgatgtgtctgtcccccaagcccgatgctcagtgggcgttaagaagtgggcgttaggaagtggcagtgtggtgagagagttaagaggcagacatcctgggtctgaaccccagctttgccacccactagctatgttgtgctgaggaaatgacatcacctctcagaatctgtttactcagtctgtgaaatcattcttattcctgggctgtgagaagtaataaatgagctgatgtgagtcaacacacttagcactgcccaggaaacccctggaagtggagaccatcatcattattattattactattactattatcattatcatcatcattatataggttaagaagctgaggcccagagagggaggcatcttgcgcagcctcacacagccatctggcacaaaactaaatgagaactcaggtctcccaatccacagtcccagatttttcaaccacgtctctatgtgacactaaaggggaaaagaagacaagtaattcctaagtgccccacattaggaaagtaactaagtaccttttagcttctccacgtgcctttgggacattatggaaaaagattgttacagagaatgcaaagccacgtggatgaggctcaagaaataatgtgatgttgaaaaagtgggtttagcatcgtatgtcctgacaatggcaacacctccacgaagacagatgcaaggggaaaggggctggcaggaaacatctagaatgtaccccatgttgtggctgaagggtgagactggggtgatggttctttcctcagcctgtttctgcctgtgtgccgatgtcgctccactaaggcacgtcggtcgtaaacaacagaagctgactgggcagcatagtggaggcaagagggcagcttaggagtgggctctccaagttggagcaaaggctggaaaacccagctcaattttccagaaggaaacggggacatgcagggatcagtggcacgactcactaagtaaatgtccctttggggaactgcaggttgggaaaaatccactacaaaagcttcttttggtccttgtatagctcaggattccaaagcagcctgtgctggtgaatgttaaccccagctctctagttgcgagggaatcctcttttgcagtgggtgctgatttccttggtgtaaataccaccacgttacccacrtgacatcattaaacacagagttgggacgagaggcgcagccgcacaccattatacggtatttctaccatgcagatacaatagactgtctactagagagaatagataatagtgaaatgtagtaaaataattaggaggtgataagtttggggtatttgttgccttttaaaatataatttatataattgtaggtttatataattgatttctaatgatggctataattaacaaccagctcacaaaatacctgaaattttagccatcagctctcacaagcaagtgtgagctggcaccagcaaatcactgattctacgtcccaggagacagcatccctgggaggtgattggcctagcttgatcacatgcccacgcttaggccaggaaggtggggacactttgactgatcgtcaccaagactcttcccagttggggagaccaaatcccctaaaggaaagcagaatgccactggacagccaaaactcaacacaggcctttgcttctcttcttgataatttctttaagctgtagttttttcttttataatatcttttttatttcttttttaaattcatagtgcttgaagtcccagagtcttttaaaaaggctccagggctcaattctgagaacagtgaactgaaggacccagccaggagaggtacggaggctcagagcagccatacccacctctacctcctcacttcccaacccctcccaccttctccagagtgtaagtaaatgagctaaacctcctgcccacctgtcaccctgcctgaaagtccacctttacaagtcccccaaaagaacataggcagcccaagttgagaagtatcttagggcagagtcttcacaaatacccgtaaggcagatgagggtgaatgggagcctcagaggtctggagtggcccagatactggagaagtgctcttgaaggcttaggcctcacctcaaaatggggacagggtggtcatcctaagcctagtgaattcatgattgactgcgaggcctgtggaccctccaggaagatgtaggagctcaggtggccagggtgaagaaccataccaccccctcartgagaacctcagacccccctgcttcctccttatttgggaccacctggtggccagcagaagaccaggggatctgatttaggatgggagccggagggaaagtgctgccccatgctccggtaatggtccggttggggggtgaccaccttgtgtcaacagctcaggccctgacgtgggagatgccactcctacccccattttgcatgtgaggaaaccraggcacagaggggttgacggactcgcccacgtcgcacagctgtgaaaggcaggcctggatgagaccagaccttgtgctcttaaccatttgtcaaagggaatgaagggtcattcctagaactctcttcccccrtagagggcacaggatgctggctcagaagcctgaaagttttcagttgctccaaaccacactggggctcaggcccaaatatgaggaagaggggccaggggaggggccaggaagatacctgatctgccaatggggcaactgagaatttgaccccaatttccaggcctcactcatctgcctccttctggccagtgacatcctcaagggcacctcggcctgggcctcatgggctataagtagataaatcaaaagtcccagacccaggggttggaggctgtcagccctggagctacttgacagggcctggccatggggcaccatgagactgggagtccagcattggctcctctgctcactcactgtgtggcctcaggtgaatcattttccctctctgagcctcagtttcttcatctgaaaaaggggtccagatatgcctacctacaaggttgttaggaaaattaaatgagaataatgtattacaagcccctcccttttttcttcctctcccatttatggccagagtaaacttaaatacaagtcaggttgtgccaccacctgctgaaaaccctgtggctcccactgctctcagaatgaaatcaaaactcctcactgtggcctgcaggcctggtatgatccagccataccctgttgcaggagggcctcagggacaggctgccagggccacaggagatcaaagtccccaatctgtagaaacccagagcttcctttgaaactacagatctttcccccgtctgctaatgtcatttgagattccataataagttaaagattgtaactgaaaataaatgatgatcatgtttaagttgtgccctgagastatagatgttctgcttcttactattctctgagaaattttggcacatcccctagtggggtatgccccaccccctagctgagaatcactgcattcatttactaattcaaataagctgctgcatttttttttttacactttaaagaacaatttattgggtaactacttggtgctagatgctgtcctaggagctaggtatatagcagtgagcaaaaccaacaaagatattcttcttcacaaagcttccaggggtccagaaaaaaaaatacagaataaattaatgaataacaaaatatcgagtggataagtgctttgagagtgactgagggaggggcagctttaggtgggcaatcaagacaggcttccttgtggaggtgacatttatcctgagcatcagctgacgtgctggrtgcctaggaactaccttccatggattgctgaaggtgggtaacagtggggcttctgctcttcagtattttcaaatcccctatgtccattccttgggttctcccaggcactctacaagaccctataaccttcatggtttcgtcttgtaacatagctgctcagggggacacacactttttacctcccatttatagtaaagaaactgaggctgagagagtgacttgtccagggtcacacagcgagggggtgacagagtcaggacttatctttgggtatcctaacattcccaatcctatcccccttctcccacctctttcctcactgggatgtatttggagaaatcacagtatcagaaatagcaccccctactctgttagagcctagagctgtcagctgrgcgaaagccaagtcccaagaggccactgagtgtccagtaaagaaaaggggtcacataactatggccaatccctgagaaaataggcatgtgggaaaatccctgggtgagccccattgcagaaaaaaaaaattcctacagaggcaaactgtagaatgcagagggtagcttttctattcccacacttcgcctcagcccataagtggctaaagggtttcccgtccacttgagagaggcagctggagcacatctggtggggagacaggcaccagcctgggcttttggattcctgaaccaagacagcttcactggcctctgaaaccccagccctagcagggattctaagtaaatgaaaacaggagcagatgcatgtgtgtggaggtgcctgtctgcatactgagagctcccccagcccatcccctaccccagccagagcccccagtccagctcaacttgggggccacagagacatcagagaatctaaccctggccaaagccaacagcaacctctccaccgcctccttatacacgccctggccaggcttccctgtcgttccctctgtccctaatgtagaaagccgcgtccctttgtcccctrtcaagagacaggtcccagggagacagccctaagcccagaggggctatgatctaagctagtgaagacatgcccctgccacctccttgccagcctcaaggacacgtgagtgagattcgcttctggcgtgaagccgccagcatcctcttgaagtcctgggagatctaattacctaggcgaggggaaagtgttgagcaagtgagcgctggggtttagaataatcagtttttcaaccgctgcagttaatgcgaggccaggccgcaaaactctccctctcrtgttctggctcctggaactgctgactgtttgatctngaactgccagcttttctgtcacccccactcccatacctgccccagggctttcctaarttgtctaacaagtaccatctctgggagcctgccaggcttcaggcctgtgcagcctcaatgtgggaggctgatggagatctcgcctgagtcaggggcaggtcccagccctggggtttaattctgagcactagaggaggaaggacatgccctttattatggcatctccttccggtattatcactgtcctacagatgaggaaactgaggcacagtgtgcccgaggccatgcactgacaggtgacagaggtgagatccaaaccagcgcctgcctggctcaagcccctgctctttgaatgtgttccagatgctttcagcttgtagatattttttcctctccctatttcatgtatttaaatttcagagcctctaggacctgtcattccagctctgtcctgaaattttgtccctgaaaagtgccgggagtgatgattttcttctaccatgctttcattaagagctatttttatcttttgctataaatagctttaaaagaattgcctccagtagatgccggatcaagcattgtggggtttcagggtgccagcccaccccctttttggaaaagcaaaacctaaaatgaaacaagagagctaaggcctctgaatacctaccaagcgccagacactgggaaatcctttttttttttttaagttattcattcagtagatgtttcttgagcacctactatgtgctagacacagttctaggccctggagataaaagggtagtgatcaaaaacaacaaaacaatgtctctgccctcatggggcttgcatattttggctttgtgtgtgcgtgtgacaagcaaaaaagcaagtataggcatccacctaggagataacgggggttccagaccactgcgataaggcaaatatcacaataaagtgagtcacacactcacaatgctaccaattgtctgagcccacagcaagtcgtcatttttttgccagttaagggtcttgcctcgatgttgatggctgctgactgatcagggtggcagttgctaaaggtggggtggcaatggcaatttctgaaaataaggcaaccatgaagtttgctgtgtagattgactctcttttcatgaaaggttactctagcatgcgatgctgtttgatagcattttacccacagtagaccactttcaaaattggagtcagtcctctcaracactgccgctgctcaatcaactaaggtatggaatattctaagtcctttgttgtcatttcaacaatgttcacagcatctttacccaaaatagattccagctcaagaaatcactttgctcattcataagaagcaactcctcatccattcaagtttgatcacaagattgcagcaattcactcatatcttcacgctccacttatctttgggtatcctaacattcccagtcctatatcccttctcccacctctttcctcactgggatgcatttggagagatctcagtatcagaaatagcaccccctactctgttagaacctggagctgtcagctgagtgagagccaagccccaagaggccaccaagtgtccagtaaaraaaaggggtcacagaactgtggccaaccccagggaaaataggcatgtcagaaaagccttattaaaaccctttctttactggacactcagtggcctcttgggacttggctctcgctcagctgacagctccaagttctaaccaagtagggggtgctatttctgatactgtgatttctccaaatgcatcctagtgaggaagaggtgggagaagggggatgggactgggaatgttaggatacccaaagataagtggagcatgaagaagtgagtgaattgctgcaatctcatgatcaaacttgaatggaggaggagttgcttcttatgaawgaacaagttaagaattctcattctcttgctattttcaccacatctgcagtgacctcctccactgaagtcttgaacccctcaaagttatccatgagggttggaatcaacttcctttaaactccttttcatgttgatattttcacctcctcttgtgaaccaccaatgttcytaatggcatctggagtggtgaatcctttccagaaggctttcagtttactctgcccagatccatcagaggaatcactatggatggcagctatcgccttatgagtgtattttttaaataagacttgaaagtttaaatgactccttgactcatgggctgcagaatagatattgtgttagcaggtgtgaaaacagcacttatctccttgcacatctccatgagagcacttgggtgaccaggtgcattgtcaatgagtagtaatatttcaaaaggaatcacttctgtggcactttcatgctacagaaatggcttattttcttaagccgcatgaaccaacctctgctagcttccaacttttcttctgcatcttcctcacttctctcagccttcatggaattgaagagagttagggcttctggattaggctttggcttaagggaatgttgtggctggtttgatcttctatccaaaccactcaaactttctccatttcagcaatacattttcactttcttatcattcaggtgttcacgggagtagcacttttaatttccttctagaacttttcctttgcattcacaacttggctaaccatttggcataagaggcctagctttcagcctatcttagtgagacatgccttcctcactaagcttaatcatttctagcttttgatttaaagtgatttggaggccatggtagagttattaattggtcaaacttcagtattgttgtgtctcagggaatagggaggcccaaggagatggagagacagggaacagccggttagtggagcagtcagaatgcatgcaacattgactgattaagttcaccatctgatatgggcatggtttgtggtgccccaaaacggttacaatagtgacatgaaagatcacaaatcaccacaacagatttaatcatcatgaaaaagtttgaaatactgcaagaattaacaaaatgtgatttagagaaatgaggtgagcatgtgctattggaaaaatggcacctatagacttgctcaatgcagggttgccgcaaaccttcaatttgtgaaaaaatgcactatctgtgaagcacaataaagtaggtgtgcctgtaaatgggaaaataatggagattttccactgtcttaaggactctggaggaaataagacaagggctgggtaggaaataacagagcggagcctctcagagcctgggatccggagacagaggagacccrgaggatgcaaagtggagaaggtgggcaaaggctgggaggtggggcctgagtggagattgggtgggagacgaagccaggggactgaatggggctggacaacaggaggctgcaggagcaccatgggttgtgtgggtttttcctctacagtgagggagtcagggagagacatgatgcatcatctcgtttcatttttgctaaagccctgccaagcaggtgctaaatcctcactctcacagctgagaagaggccagggatctgggaggagaaacagctggcccggtgaggctgtgacaagtccgctttaggaactcagacctgggygaaggcctctgtgacacctcacactgccctgggttgctcagcctgccagggtaggcgtggctggaaccccagcacagtctcctcacacagtgctctgtcctctgaacagcttggtgctttcttctgttcatcttgcttttttcactgagcctcaggctacacagaactcaatggactgtgatttgagggctcaatgggaacattgtgtctccccataaaatttcaagtggctgcggagatgttgctaggcaaccaggtgttggcccagtgaggggaggggttggtgattcttcccggacagaagtggttggtccagccacccttgcctcccctcgtcccctcatagcacaacgccacctggggaggcaagaggatccccggaactcacaggacggggatgaaatacaaggcaggagagggtaatagttccaaaccaacactgaatgaattcagccctaaaggaaaaatagaaaaaaagtgcctatttccaaaaacactggaaaagccttttatgaccatagttgtggctcacccttctaccacatgccaaacactgttctaagcacattaacaggcattactgactcatctcatcctcactataactcagcgagatgggttctagggttcgagtataatccccttttttcagatgggaatactgaggcacctggaggttaacatgcccaggccatacgcagcaaggccaggcagcctagccctgagcccagcatcaaggcaaatggatggatggcaggtctaggaaatcggattgggtgtcagtgaggagaaatagaacacatgaaggatttactttaaaactggagttgaatccattctactcttattggaggtctaccatgtgctggaccactgaccttatatagaaatgaggcagaacgctcaagctggcagaaaggggttacaggaaggtaggcagacccaaacagsccttcataacagttagcaatgtggtaggcaccacgagagagaaggaaacatggttaggagaggatggattgaggcagattccaagaggaggtgacagaccaggcctggaaaaagaactgaaggtggagggagaggtatttcaggtggaaaacatggacaaatttgtggccatcgattggaattaattgtttaggtgtctccctccaccttcaccatcccagactgtgtctttgtgtcctgaggagacaccacatacctgatattttggatgcagcaatctcaaaatgcctgtttaataaagattaaatgaaaaagaaaaggaaggggaatgaatgaatgaccaaggttaggcttaactgtcacacaatgggtgttagacattattagtaaagcatttcagagtgattagaacagcgtatattgtgggtcagaaggcagtgagcctcagaagagggagacccactaaggagccgttgtaggaatagccagatgggagatgccgagagtccgaattcgtgtgatgaccccaaaagtaaagaaaggtcaaatccaagaaaccccggggaggctgatcaatataatctgaaagaggaatagatttgaaggaaacaattagtttggtsttagacttgctgagttggagacgtagataatcaagtggagcttaccttgtggatcccatgaaatcctggaccagggattgaaagagagagaagatgggatgagagacactgcttatccctatttccttaacccacatctgttttgaagtttagatgtgcggccttgggttggttccctaacctccctaaaccacagtttcctcatctgcmatttgaacctcttaatgcaggccctgcagtcttgagactcagatgcaatcacagatgtgaatgcggtttctaaatcaactttcacgagggaccttctctcatggggtctcygtgggttttctgatttgcttcatcaccatctcatcaccatcttccccccacccccaccccaccctcctatcccccgcaaaattctttctccctgaggaggaatctatttctaggaaacggctcctgatcctcaaataagctctcttttttaagagcagggaggagccactgtcacagaaatgaaggcttccgctttcctggcgtttatttctgatactggatttcaccaacagctttttcgcccagtagtaacttcgcgcacctaaatggaaagttcaagtgacatcccaggctgaggcccaggctggagattgcatttccccaagtccttytgtggccttcatggccttgggggtctggctggaggcgcctccatccctcctgtcgacagcaaggacacgggagtccactgaggcgcttgctatgtggtctctggcacagaagggagtgactccaggagaccctgagtatctctccagctccccagtcttcagcctgaaaatgcctgtcttagagcagacgttgctttggagttaagcactgaccactcctcaccttccttcttcctgtgcaggtgtgtctaggagaggccacatgtttattgagtgttctcatggagcttagagtcagcaagggaatgaagcattaagaaaaaccaatttcattaataattattaaaataatgattaaaaggaaagggattttcagggagctatgagagcattccgaagggggtgtaacctatctaggaggggggttcagccaaaagaagtgctgaattaggtacagaggcagggggaagagcattccaagcagagggaacagcacagcaaaggccctaaggcaggaaagcacttgtgttgaagcctcaraaaagaggctggtgtcactggagcacaatgatgggaagggggaatgagactgcagaggagagcaggggccctctgtgcagggccttctggatcttctctaatggatttyctctgcctgcagtgggagccactcgagcattctgagcaagggcttgacatgagcacactgcactttacacatttgaaatgtccctctggctgcagggtagagtacgaattgagggtggtgggaacagggagacaggcaaggtggctgctgaggccatccaggtgagcaaggatggtggcctggaccagtgtgcagatggcagagggatgtggtcatatctgagatgtttttctygaattttgctggatggtgtaacaggtacaggaggcaggagtggactctgatggaagacagagacagtacatggaggaaaagaagagatgatgggggtacacattgaacacctaccgtgtgcccggcgcgtcacactcgttaccttattttaatcttcacagccaggccgtgggttaggaaccacagcttatggtacagaggaggtgaagtgactccctcagggatacacaggtagtaagtgaggcagctgagattttaacccaggaatgtttgtccccaaatccacttcatccaaaggttatatggaaacagacctttattttcttatagttcatattgacttcccctttaaagtctgaattatttaaataacattctcttggttaaaattaattttttttttgagacagcrtctcgctctgtcacccatgctggagtacagtggcacgatctcgactcactgcaacctccacctcctgggttcaagtgattctccttcctcagcctcctgagtagctgggactataggcgtgcacaaccacgcccagctaatttatatatatataygyrtatatatatatattttagtagagacrgagtttcatcatgttggctaggctggtctcaaactcctggccccagatgatccacctgcctcagcctcccaaagtgctgggattacaggtgtgagccaccgtgcccagccaaaattaaaatatttcagtcacagctagagtcccctaaaccactgcaactaatcatagtgccctttcccttccccagagataccaccttcatgagtttgagctgatccttacagacctcttgctacacatttacatatatatagtcataaaaaatagactattgttttgtagagttttctgttttacataagtggaataaaactatacacattgttctgcaacttgctttcttcactcagcagtttatcttggagagtcttctatgttagtacatataaatggatctcattttttaaatctgttgtgtagtattctttggaatagatgtaccaccgtttatttagcccactcgctttccaaagacagaaatgcatttttctataaatgatgtagcttttgaaggacttgtggattttttgcttttgaaatataagatttttatttatgctaatggaggaacccacaccacagtgacaacacaaatatttagcaacacccagtctggtgactaagttttcccaatttccttcaggtgcttggcatccctaggaactagctcttgtctattgccaagtctctgtttatagcaaaaggctgtctcaagagtaacaaggaaaatggcagagttgtcagctttgatttcagtgctgcatcctgaagcagacaacatgatagggtgtgaagacagtacagttcggagcctcagggacctgagttcaaatcctagctttagccgtatgaccctgagcaggcctctttatctctctgtgcctcagtccgtctgtccgtaaaatgaagtttaaaatccctatcttacagaatggccaggagaatggaaatgcaaggcccgtgtataaagtgatgatcatgtaggagcacatgtgctcatttcttgccggcctgtctgcagccccagccgagtggggcctatgagaggggcattggtcctgcatcattgaaggagccacttgagatcacagaacagtgagaagacaccagcatgccaccactgctgtcgatgcactgcggggggtaacatttgagctcaaagggattgggagagggatattccacccaggctctgggcgccagctgtgtgcccaccaccactgccctttgcactttctttcatctacctcagcaggcgaagctaggttgtccctctcccccagtttgtggataaagaaactgaggctcagggaaggggcaccacgtgcagaagctctcactaagtgtcagggtggagactggaactctgcatccactgcctctgaaaggcgtcctgggaggctacaggtagcagctctgcaaagcgtccccacctggagggacagggaagtgcttcttgtctgcgctcaaccatggaggcccctccccagaaggaggaataaggggcttttctggcctccattttcccaaagggctgagacaaagacctctcagagatcacctctgggcatgctgaaccagatctcttcagtgaggttgatacagagggaatatgaaatggccgtcatttgtgtgtgtagtaaggctccattcaagcaagccgagccgttgttcccttccctsgtgtctgtggggtgctgagagggcctgggccaggggtcagggtccagccccagggagctgaacctccctggacctggatcaagtcgcttccgcgtctctgggcctccattttcccaaccgtcaaatgggagggtaagagaggctggccaccggatgtggaggagaggggacagggagccttagggatgggtggccagattaacaaagaaaaatacagggcatccagggacattggaattgcaaataaacaataagtttgttaattttttaattagtagtaaatgatttgctgtttatctaaaattcagatttctctgggtatcctatattttatccagtaaacctttctcaggggccccagcttcastagatccccccattctttggtacagatcattgatgttttcacagcttctagatgagtcctggtcaccaccttccactcagatccccagcccccacacccacttccctgcccatgtgggaagtctggagccctgagtggagaagtttagtaaagaattcccacagtggagagaagagtgggaactcagcctgacttggagaaaaggcaggtgataggtttaaatcagtggaaacttgtgtccacacgtgtgttgaattacaggaacacagcctctgtgtgcccgttctgtgccatgtccacatgggtgcacataagcgaatggacattgcgtccacatgcttgcaaagaaaccacccagcgctgcactatgcacattcaaatccacaatctagtgccacatccacagttgtgtgccacatctgtgkgtgcatgtgcacgtctagatgtcaggtctgctatgagcacataactgtgaatgagctgggtgacaaatgctatcagggaggatcaggtaaatgctgccccctccacatgacagagactggattcataggaaaccccacctaggaccactaggtatcagagagacaccccttaccctgcaccttgcccatcaggaaccgtcaacaccgtgatgtgatcataaactctaggcattgcatacatgcctgcaatgcacaccagacgatagcagaccatcagactggttctgaacttaccttgacagcccatacagaccgatatcacagcagatgcccgcaacacaagctgttttcccacagaggcgttgtctctctgccccaagtctgttaagtggctcttacagggggcacgtggccacccatgtgtgcaggagcatctgggcaacctcagcacttacatccccatctctagtccccagagaggcaggagccaggggaggtttcctaaggacctgctgtgtgctggtggaagcagcctccctctaggggatggtggaatcagaaaccagaagacagtagtggcaaagggtgggtctcagttggtgtttgacccccagggccaaaacccagcacaggagagatgcacagtaaatgtgtgttagtgaataaatgagccaggtgacaaatgctgtcaggggaggatgaggacagattgttcttgctgaataaatcaaggaagcctttcaggaagtgatagtaaaygttcttctgggtctctcaagactaactaaataagtcgacagagggttgggcatcctgggttygaagccagatgtgccaagtcagaggcaaatgcccggcacatgcagacccgtggcttggtaggagagtgggataaatgtggcatggctagaggtgaggcaggaggagtcctttgggacaacctcacagagaggccactgtgagcccaggaactggatgattgtgaggacatggggagccatggaaggttgcggatcagggcagggatgctgtgacagccgaacttgaagaccagctcctggccccacactgcctcatctcctcttccagtctcctttttctcgccactcagcttctagtttctccttctccagccttctgcagccaccagtaggagacaaagggtcagagtgttctgtgtacctggggactcaagtctgggtctgtcagccacagcactcatgacctcctctgctgcaggaagagaggttgtgagcctgactgttggcagctttcagggaaggagaagggccctgtgggagctggcagcccctacagaagaaaaggaacagtcgacccaggctgagtgcaggctctgtcaccaccccactgtgtgacctggacaggcctcagcaataagccccatgtctcagggttgttggcgaggctcaaaggtgatgctgtgccgaaagcacctggcaagtattaggcttcctcctcaccctcctccctcaggctggtggctcttcaacctgagcctgtatccccattgccaaggacaatgcagctggccctgccccatccaagagtgtgtgactcagtaggtctgggtgggccctgagaatgtgcatttctaacaagtccmcaggtgatgctgaagccgccgctccagggaccactaagttttcatcccctgctgcacattgcaatccctggggagctcttctaactcccaaggtccgggccatgccccagcccaattcaactagaatctctagtttggggcttaggcattcatattttttaaagctccctggtgcctccagtgtacaaccaagttaggaactagtgccttggagaaagctcagtgatagcaacaacaatagcagctaatattagtcaaggccttcccatgtgccaggtgcccagatgcgacctcgtttaactctgtatggcaggcactatcattattctcaggctgcacgtgaaaaaaccaaggcccaggccgggcgtggtggctcayacctgtaatcccagcactttgggaggccaaggcgggtggatcacctgaggtcaggagttctagaccagcatggccaacatggtgaaaccccatctcaactaaaaatacaaaaattagccaggcatggtggcaggcacctgtaaccccagctactcggggggccgaggcaggagaatcacttgaagccgggaggcggaggttgcagtgagccaagatcacaccatcgcactccagcctggaggacaagagcgagacttcgtctcaaaaaaaaaaaaaaaaagtgaaaccaagacacagagaggggaagttacccgcccaaggtcacagagctggaaggagtctctagtgaggcccagacctagatccgctgtcccatttcattgctttgtcttgaagcggtatggcttcccacagtcccagcagtgatgcctgtgcaagctacccactctgtctgacctctgacaggatatgaagcacgtggtgccctcccccactcagcctgtgccacacacctttgtgtgcccgcgtctgcacactgactcagccacatcctcgggcacgcatgcatgcactgacagcctctcacaggcactaaggcccatgcctgccttctgggtgcctctcaggctacattttaaatatacgaagcagggccacgaggtcacccttgtggtttttccccagaaagcactcaccattcgttttatctgaaatttcctgagcaccccattgtcgcagggatcaagctggagtgaatcagcattcacattggcttcaccagatagggtcactgtggggcatttgcagaaagacacagcctacccccaactagatcaggctggaacagggcagggtggccgctgagctctgtggcaagaggcctggctcggctgccttcccagcagaagaaccctgtgcctcagtgtgtgcatctgcataatgggtgctcaacatagagcaactttaccatctacaaagcactgtcagagccttggttctgtgtgatcctcaagtgagacagcccaaggcccctcggagaggctgagtgatccactcaaggtcacataggaaggaaaggtagatgccaaccaggtctccmgatctaggtaggggcatgttatggctgtggtggtgttctgtgacacaagctaagacagcggcarcacagacagaaattcctgcaatgcatattccaggcccagagtaacattagtggtgtacrgtggtggtagtgacagctgcatctatcctttgtgaaggccagtatatgccaagcactatttccacacatcatattcccaatcctctgtcaaccccagactgcaggggatgccagagacagggcttttttcccacagaggcattgtctgtctgtcccaagtccattaagtggctcttacagggggcacgtggccacccgtggtgggaggggcttctggacaacctcagcacacacatccccatctctggtccccagaaaggcaggaggggagggaggtttcttgagggactgctgtgtgctggtgcacatttattcccatttcacagaggtgaacactgtggctctgagaagggaaatgatttgcccaagtcaccagcactgaaccaaagagctgctgggatttgaacccagggctgaggttacccattagcctgctgctgtcacacaccatgcagctcatcccagctgatggcccccggccctgcagacaaggcgcccagctcccagccccccactcctggaaacagttctgccctcgactgaattccaccccctcactgctaccccggtggcctgggtgactctgggggagcaatctgttttcacactagctctgagcagtggatggagagtttgggggacgtgattattgttgggtttttttcttgaaatcatttgctgaggctgcaggcaggtccgctcagccagacagtgcccctgaatatcagccagcctcagagggcagttagtgtattcctgctctcaccaggggcgaaaacaatctctggggtcmctttgctggaaataaagacgtgcagccccatggggcctcagaacaggggagaagaggtcagtggtcacctggatggcctggaaaactcaccttgagtccctcccagttgggctctacttttgatacagcccagcctytcagtgtgaggtgccccacacatgggaagagcagaaccctgccctgccctcaagtacagcactagagcagaaagtaagccatatgttaaatgtctgcattccttcatctcgccccttcattctgacctctaacccagcccctgctcctttacctacctcaatagccttttctttattctgattaattaaccatgttccactttataagtagcttataaaagttgtctcatacaaaatgactttaaatgccctaagttaggaaatccagacaaagagaggagaggagaaataggatggagatttgacagctcgatgcatgctgctgagtcctctggtgtagctcacagaggtgaactgcgtattcagtactgagctaccaagcaggcaaggggaagatggcaaaaagatgagttacaagagccagagtctccattagagaacactctcactctcaccccaaaggcctgtgtaagcctgaccccatgtggcatgctataaattcagtttctattcccagcctttcctggccactggggacaaagggtacaatagatgtgtcctcttccttgaggaccatctgacccctcttctgaggagcaaaccaggaatgcttcagccactctagcctttcccaagacctttggagtttctcttgccttttcacagcccttctccccacccatatcccttcatctgaycaaccctcactccttccaagctcacccaattacaactacacttctgccaggcgatccttcctgacactcctgtcttccttacagtagtgtccccaacatatagaacaaagtctggcttatagtaggtgctcaatcaaaattcggtgattgattgaatgagtaaatgaatgactggatgtgcactatttagtatgaccctaggtaccttttctagcttcagagggcctgagaagggtgggggaactcagacctccttaagataggaggatcttgagtcttgagtggggcctggcatctggtgcaggacacccattgtgggccgtccagcttctgtgtaaacatgytccctccctccttcccagaataatccatccatcctcagctcacccattagaaagtccttccctctcatagtgaggagcgcctctgcccggctgctgcaccatctgggatatgaggagcccctctgcccagcccctgccactgtctgggaagtgaggagcacctctgctcggcccccacactctctgggaagtgaggagtccctctgcccggccgccccactgtctgggaaattagaagcgcctctgcccagcttttgccccctctgggaagtgaggagtccctctgcctggccaccgccccatctgggaagtgaggggtccctctgcccggccacccaccttctgggaaatgaggagcccctctgcccgccccccsscsccgccgtctgggaagtgaggagcacctctgcctggctgccgccctatctgggaagtgaggagcccctctgcctggccactcaccatctgggaagtgaggagccgctctgccccgccacccaccatctgggaagtgagaagtgcctctgcccggctgccgccccatctgggaagtgaggagcgcctctgcctggccgctgtgcaactctccaagtgtgaaatcacagccttttgtgtgatctttctgccctccccgtttgcattttcgacattaaagtttactttctaattaaaaaaaaaaaaaagaaaaagaaaaagaaagtccttccctctcataaagccagaggcccctccttgtacctcttcctccaggtcgccagctctgtgctctggggccaaagcacaggctccctttgcccccaagagaaccactgtccctcgagctttgcttaacagagctgaggtggggctggagtttgtcagacggctctcaaacatgagttccaactctaataggtctgggcacatgcccttggtgagctagatgtcaagatttctatatgggaattgactttttaatgtttgtaacaaatttccatttttttwaaaacaccgggcagaccaaatgaaacctctttaatggcctgagactgcagtttgcaggagccagaattggctaaaaagagagaggaaggtaccccaagcaaaggaatgggaatggccagggcagaggtttagaggctggggaagagcccagtttgtatccaggacagctggatacagatgcactttgaggccaaggctcctcaaatacccactgacagcaagcagccgtgayagcagggagttcctatacagccagtccctcactttgcgccgtggctgtcttcttttacrtacatggtaggacacacagattctgcccacagttgaaaaatctgggagagtgttggagtgtttttttaccttcacagtaaaagtgcatgcctttacagtttagagagcttcacacacattcytctgtgcttgggtttccccagcctagaggttattttgttcccattttatgaatgagaaaactgagtctccgaggggtgaaactggcccaagctcactcacaagtcagtggtagaacaaagaccaaaacctggctcctcctctagtgctctgacctctgcttayaattacacagaaagaaaattgacatttgaaagcctacaaccccacatagcatctgtctggacatttgtgtttctgaattttcagggcctcgctgcctttgtccggtaatctttgacacactgtattaatttttaatatgcgaaatggtgagatgctctctaatctaaattgaatctcgaacgccattcatctctcacaccagcctctgttgtttctgctcccaaaaatatgtgtgttaattttcagcagaaaggaaargagaccacaagattcagctcctgggaagggcatgacaggtaggctggaccaggcaagctgttccacctgcaggtcctcaaaacccctgtctttggataccaagtaccagagccaccagccctagccttccaccagaccaatccttcatgtcacatgtggggaaactgaggcccagagaagagaagtggcttgtctgcagtcacaaggcccttccactgtgcctctcctcaccttgactgaccccttcctatcttgtcraaatcctgccagttcaaagtcttcctctccagaacgtctggcttaatctcccacctggcctaaaaactgggcggtaataatgacacagtacatctacccggtgccaggcacagcactacactccttacgtgagacatcgtgttgaagcctcaccctaaccctgtaaaatagacactgctgttgcctgcaaaaggagaaatgaaggcagtgagaggtgaagcacttaaccaaggtcacccagagctgggatttgaacgcaggccatccaagttcaaaccccacctgtgttcttggggcttggtttcctcagctccggcttggctgttcttccactgagaagaggggagtgagcgagacgtcatgaccacctccaccttctcagaggccccatgtgagcctcagtgcccagggttcccaccttggactttgattctgggatgctcgtagtggaaactgccatgggaacagtcctagcagagcacacaaatgtgtttatgccctgagttgttatttctgaagaacagagggcctctcggaagtctgtggggagtgggcaagggcgggggctggggaaggagctgcctggaagagggagggagggacagagaagctgctctgtgccgacccctcacccttccagccacatcgccctgtcccaatccatagccttgggggtctcaaactagcaacttaggggctgaatccagcccacagatatgttgttcttggccctggcatgtttttaatggggagattttacatcaaattccagatgtccagcttctcttagaagattggaagatctgccacactgggcccacattcccccacaggagctgagaagcagctgtcctcttcagaagggccaaggttcttcagtttgctccagtttctaccactccctaatgtctcccactcacctacttcactcattcacaaaacccacccaaccccyacacctattcaaatttgcagcccctgctctgtctgctgtcctgggactcaggatctcaatgcctggcctgtggattcccagcatgacagagccccagcatgatatggcctgacttccaaaatggaacacccacattatcaactatttacactgtggactccggaacttctgaatcgcagaactcagaaggttcagagactccccctctcttggaatcaatcaggcagggcccagaagtttggctggcctcacctactttttcttggcaaaaaccttaatttgcaccaaatcttatgaggagctccaaaatgtgaaamcagaccccaggaaaaccatttcagggcctgcagacctcagawcccctgggattctcaggacctacccatcttattgaacactcccattgttgaaatggggaaactgtagctcagagaagggaattggctggccaaagccacagcaaactgccataacaggccagtgttggctggtcatagcccctccctcagaggcccacggccctcttgaactctcccttctcccttgtcaaaactcattcccaggaaaaagcctgaatgaaactcattcacaccatggcatccagaactgatgatggcttcccctcccagaaagtctaaaggaattggagcttttaattaaaggaataaaggtcaagtagaggaattccaggtgttggctatgggtagaattggacaaaaggaggaagacagggaagcttcctgcggttcctggaatcgtgctacagtgtgccgtgcctgcacgctctgtacatggatctcccagatggccagcccagcacagaacagtggaggaagtgttcccacgcacttagatcaaggctaccctgggctctcagggcctaggagctgccccacagcagcagcttggtctcagggcagcctgtctccccatctgtgaaatgagcctaacctggctctgggttcattcgttctcactgcatgcaggacatgggatcccaagagcttgcctgcaccaacaagcaggctggcgtgaggtctcctagggagggagccatccctgggctcccccagtgggrgtgtctcagccagcctggcccttggaggctcctgatggagatctcatggtcagyatctgaggagactccgcatctagaacccaagacagactcccaaaccacaggctgctggactcccggaaccactgagctctgacatccacgggcagccaggtctgttgcatgcacatcacactccccagaacctggcaccaggctaggcccacagtgggggctccaggaatgcaaactgaatgaatgaatgggtgaatgaggcaatgaacaacagactgttagaaccctaaaaccatatattagaccatgaggtcccatcagccacatggtccagtcctgcaaccccagtgtgctgctagtgctgttcacaggagtagactgaaggccataggtttgatgaggggtgtgtgcccctccctgtccacccccatctgtcctcactaagacacaagaagagctagggtttgctgggtcaatgacaggactgtcgttgccccgctgcggggcccatttttgctgtactgtttgggccaggctgcacacctcgggccaggctcgtaacactcggacctgcatttagtgggtgggacaattgtaaggcttcaggtgccaggccctgagggacaggaatcagactggtctttgtccccaaggtccacggcccaagtaggacaggggtctggggaagtggtaagcctgctgcggggaagactgtggcaagtaaaggcagagggccactgtcctcctggggtggaggggaggctgctcagcccttgagaggggctcacagtgctgagtggaggaaaggctgttcccggtttgctgaacagcaggagcaaaggcctgggggtgtgacaggacacttgtcatggaaaaataaagtggcacaccagctacttggggcgacatggggcagcttgaaaggaaggctgaagcaaggagaagcaccggcctctgaggggcacagcagacagtggacagagggagtcttccccaccagagccacgcacctcctggtcacacgcctgaatttcctccatgagaggttcacccttccaggcccctcttccaaggtacaaatacacctggggtttgtcaactgtgggtcatccataccccagtaccagggagtttaggaggggatgtatagacaggcaaacagtggccagtgccagagcagggaagggcacagcatgggcacagtgtggcaggaggaaggcaaagtgctggcctggctctgctgggtggaagccacatggcaaaagccwaggctgcagacacaggttgcgggtcagaagagagggccagggtgccaggctgggaaacacgggctttattccaaagacagtgagcagcctcccaaggcctttgagcaggtgcgtgagagtggacttgcaagtctggaagaattatctggaaatgcagatggtgggtggaagtgggcccttaccactctgtccggtccccacatgatgaggggtgcacctggctacacctcactcccttgtccagaagaggagaaagtaccagtgtcagctgcatgtccaccaggcacgctccragcacgttgcaaggcatccacggtgagggccactcctaagtgggcmctcttctgtctggtgagctgctctgttccagtgtctgcaacagtgccaggcacttggtaggtgctcaataaatgctcatggaccacatgaatcacctcatgtgatattcacaaccacccatgggttaagtacaatcaccatccgcattacagtagagggtactgaggctcagagagcgagggccatcacgctgggattttaatcyaggcagtggcttctgattcttctctaaccactgcgcggcattcgacaggagggagagcggaaggagggtaccagcgcaaggcggctgtaggagtgtggattcgcttcccatggctgccacagcaaatgaccacagactgattgtggcttaaaacaagggaattttattctctcatgactcgaggccagaggtcagaaatcaggtgtcagcagggccacctccctctgaagaccagggaacaatccttccttgcctcttccagcgtctggtgccccyagacatttcctggcttatggctgcatcactccaaactctgcctctgtttttgcgtggccatcatccttctgtgtctgtgtctcttgtaaggacacctgtcattgcatttagggcccagacagataatcctggatgctctcatcgtgatatccttaacttaagtacaacaacaggactattttcccaaatgaggtcacattcacaggttccggggatcatgatgtggatatatattttggaggctgccattcaacccactgcacggtgtctctggcttttggcaggaaccaacttagggcccaaagcatgaagagatgttgggctcctgggccagccaccagcaagtttcttgctctgtttctccttttctgcccctagattcccagaacatgcctgcatctctcccaggcccccagccarcctctctgttctctgtccacaggtttgccgggcaccgctccagacctggaaaagagaaagcaaatttttgggcaaaactttatacctccaaagaagccaaaaaccttcctgcagctygtgtgggaggcgctgcaggacgtgacgctcatcatcctggagattgccgccatcatctccctggggctgtccttctaccacccgcccggcgagggcaacgaaggtaagatgggcctcagacccacgaaccgcccygcacacctggccaccgcatccacgctkgggggcactcayggctcacacaaataatcctctcctcccaggggaagaaaccgaggtccaaggggcagggccccacccatagccaacacagccaaagggtggccgagccaggcctcagccccgttttccctgtgtgaaatgcacaagggttggactggtgacagtaatcactttagtgagcatttttgagcacttacagtgtgctaagccctgggctgagatgtcgccctgacaaccccctgaggtagctgccatggtaatgcccattttaaagatgaggaaaccctgggttcagtatatactgcttgggtgatgggtgtaccaaattcccacaaatcaccactaaagaacttactcatgtarctaagtaccacctgttccccaaaaacctatggaaataaaaaatataaaaaaaagatgaggaaaccaaggcacagaaaagggggttaatctgctcgaggtcaccagctaataaagagtcctcagattttgctgtggagccttttgaaaacatcgttgtcaggccccatcctaagagagcctggttctttctctccagagtccagggatggctggattttaataagcacacaggtgagggcgaccctgacatctgtgcaggctgatctgttttataatctgctttttcagtcagtaggatattgtaaatacttttttgtgattcattgtgattcaacatttcctaatgaatgtgytgcataaatagataaccctactacaccttcagacaagcaaattaaaagttaatagcacataagaaataacattatgggcctcattttccctaaataagaaggtggtctctgaggtcccttgaatatctgttgtcctgccccctcccaagccaaagttgcccaagaaactgaataaccaagtctattaggccaactacctcaattttacacataataagttgatttcttacatgacctcttcccatagagggtttaaagayacaagagatacatctcacaggatgcggtcaaacagaaagccagccagaaaaggaatggaagcaaagaaaccagctgtaattgctgccatgattgagatttaaatctgacttgaggttcctggcagccaagacagaaagggaattagggtgatttgctggaatatactaaagagtactgaatttaaaaaataataataataaaacaaaaattttaaaatgaaaaataaaattaaaaactaaaaggtagatttgcatagctcaaattatcaacaaggaggaaaaatatttaggaagatgacatttctctttacgagaattctgggatcaactttcacataggacattataagaaatgcacaataggcagccttctttgaagaagttttataccaaatatgaaagaaggtagtacatgacgacttgaataagccttgaacaaagctaagagtgtaacacaaatgcataatgataatacttcttactatttttatagctaccactagttgggagctattatgatagaagtccatttaattatcagtcctcacaacaaccctatagataggtgctattattatccacgaaaccaaggccctgagacagcaaatcgcttgctaagggcacacagctagaaagtagcaaaaccatgactcagaccaaagcattctggctcctcggtcctgtccctcagctgcgtttcctcagagagggacaggactgaatcagctcggatacatggcctcatgcaacccaattcagtacaagattagaactcagatagcaggtggtggagggggtggaggggtaacatggaccgagcgcctcatgtgtgccaggaggagcttctcaccctctagacagatggctgcgatgttccatcttagagattcagaaaccaaggcccagagaggggaaggacttgcctgcggtcacaaagctacgttagactgtagggcaggattttcaacccgagtctgtctggccctttccaaggctcttccctgcctctggctggggcactagctcaggccgcccctggtccaaggcagcttcacacagtccagcttcactgggatcaaaagttcttgggctttgtgaccatcctaactccttctccggaagcccacgccctggcctgagatctgagctctgggccttccatgtttccagggctcctgtgccccaagtcaggctggggctccatcaatccccagccaccaagtgcaaaaacaaacaaacaaacaaacaaaaaaccctgagacagacatcagtttcaccagggaagttgacagggacagttatgtggccttcttggctcccttctccctgcacacagccttccagagactggggcccagctgtgactgagcacccagcacacgtggcactttatgtccgggttctcagtgaaccctcacacccatttcacagaccaggaactttcggtcaaagatccccaacagggccctccctgagcagccagtgttgaaattgtgccattgctatggtgctagtgagttttgtttgaaatcatgaaatgcacccaatttctttttgacaacagctgccacatcttggaaggcaccagagtccagtgatcagagcctaggcacagggcctggatctgcctgtctggccctggacccaggccggccctccatgtgctcagcttcagtgtcttcatccataaaagggggtgaatgatagcacttgccctgtggagatcttgtgatgattgaaggaaataatgcaaagcgcttatcatggagccctgagcaaacctcaggaagcaggtgtcactccccacrtggccgatcgctcctggtttctggaaaagtggccacgttcaacaccccacaattctagtatcctctacagcaacgcaggggtggacagtgtgagcatattagagccacaggttccaaagccccagcacctgtcactcttgcctccagcccctgccatgttgagtcctcagaggtccactgcccgcctccgccccaggtctaaagatccaggagttaaggcctgagccaggcagagagccttgcttctgagagggcgggcagccctgtgcacagaacagactcaggaagttctacagaaggagcaacgccggccctgtcagcagaaggaaggaaggagggagcgcaggccagagggaaggaggaaaaggaaaggaagaaggaaggcagggagggacttatttataacctggcacccataggaaagatggacgacttccaccaccggcttcaccagatccctggtgctcacattgtgtttgaactcattcagttttatttatcacttgccattttcttaagtgccttggaatggacatcctcagccctgagctctgatgctagccaggtacacagcatccccacccccaccccatctggcaggtgagggaactggagctccaagaggggagggtggggactcacccagagttgtggcctaggaccccaagtcaggcctcaggcttcccgcactggggagaaactcaagagccagggatgaaagacccgcaactggactccttccagggtcaggtctgggggcaggcaagaaatacaacatggtggcagcactacagggctgaccacccccaccagaagacacgtcttcccgagagggaggcctgctcttagcagatgacaaagcaggggctcgggacccagtgggatgtgggttcaaatccaggctcagcaactcccagcaagtgactgcccctgcccaggccttaccttctccctctgtaagacagggctggtcagtggcaatgttgatgggtggaattagagtcacacaygcaatgagtgtatgagtttctcrctgtgcctggcccattgtagatggttagtagatacagtcatgtgtcgcttaacgacagggacatgtcatgttctaaggcaatttcatcatcataccaacattgtagagtgtgcttacacatacctaggtggcacagcccgctacatacctgagctgtatggtgcagcccgttgctcctaggctacacacctacacagcatgtgaccagactgaatcctgtaggtagctgtaacacaatggtatttgtgtatctaaacatagagaaggtacagtagaaatgcagtattataatattatgagaccactgcggtaaatgcagtctgtcactgacagaaacggccttgcatggctcatgactatgtttgctgagtgaccacagggaccttgtccagccgtgacactgttgctatctgtacacagtgtctagttttacctaatgcctaactcctggggctctgccccacacttcatctcattcttttccctaaaaccactgggccaagctgggccagcctgggctggatgccccctgatgaacaggagtgagggggtataaaagcatccccaaacttaaagccaggagccctcgtttgagtcctggctatatcacttcctggtgtgtaaccttgggaaggtcttatctcatactcatcactgagaaagcagttggggcagggctatgrgtgctgcagaactctgcagcctgttagtcctctaccaacatcattttgtacatgaaggattacctggctcagagacctctaggcacttgtcctaggtcacacagcatgttcatggcagggctaggattggcacactcagtgcccctaaccccctgctggtgacagctcccccagtgccagagtgccaaaagagtgataggcacatagtaggtrtttagaaaatgtttatggctcaaccagttttgargatctttgttggataccaggccctggtagccatctgggaggcaggttcaccattgtactggtgaacatgcagacaggcccraagaggccaagcggattccccaagcttacacagacagggagaggccacaccctctatagccgcaggtccaggaagagcagttgcagttccctggaccctatggccactgtctccagatcctgtccctgccccagtccragggagccccagaggagacctcagcaggacccacccactcccctcttccctccccttcctattctcttctccctaattgctccaggggcagcaggagttgttcctagggtcggacagcttccaggtggccraatccctaccccagcgatctgcactcccactttctagtcatcccttggcaccgcgtgacgagcagacagttctctggagacaatagctaatcggcttttgctggcagagtgagtgccctccaaggcccagagggttccttggtattgagtcagcaagggcagcaggtagggctgggagttggaatrgggtgcatatcccactcagtcactgtgcccttggctttcagaggccagtccaaggaaaaaagctcatgaaaaggggagaggtctaacttttaccatgtatctatcatgtgccaggcccttagctcacaaatccrttgggttatcccacttcacagctgtctaatctgaggctcagagaggccaagtcacttacctaaagtcacacagcagaggttggacttgaactaggtctttccgattccagaacccgaaagcttgtcattgctctaagtgtccaaatgctccagtaactgctctaatgggggccccattgaggaagcacacagcaggggaaataacagccttcccatttccagagcacatagcaaggggcaggggataacaaaagtcttgtaaaatgcagcatggggctctgtaatcccactccttccccctccatgcctctaagccccaagaaaatgcgtttccatatactgggtttctgtttagcaaggttcacctgtgtctcccagtctttggagtctctattggtgtcattcatggtggtacaggaggcaccgttcaccatttcctctcctcccgtcatcatatgtcactcaaatccagcaggagctccttctgtaatgtgggcctcagggcttcataaagccaggctgtggaacttgaatgcaataatgctcacccacacactggaaagtaagaatcaccagctttaactgagcatttactgtgtgctcactgcagtgggtgttttacccgaaggctctctcttaatcctctcaaccaccttatgagagagcacctgccattttgcagatgagaaaaaccaaaacaaggcaggcacagtggttacatagcaagttcatgggcacacagcagttagcgcagctgggattcaaacttggttaccattaggacagctatgattaccattactccaaggctggtcctgctaaacagtttaaaattactggaagtctgaaactcccaagatggggagaaaggtggctttgggaaccccacatgatggcattgtttactggcccgaagggaacggctggttcagtgcaagacctggaattttccaggggtgcatgcagctgggccacagtgattccagacctggaattttccaggggtgcatgcagctgggccacagtgattccatatctccccaggcttgggccccacccttccaggagcccaatgcccataaacattccttgagtgtcacttggacttcttgtcatgttgcttctgacccctggctttccagaagcttccactggggtctcttgaagcttctgttctctgttccttgagacagactggatttccagatgctcagccatgaatctttggcaaacacatggcagagggggctgctaggctcagggagagtgaacaggccaggtctggtgtcagatcccagatctggatccaaaccccattatctgccatgtgaccccaggtgagtctctgcttctctctgaacaggtacccttctctcagccagcttgagggttaaagtggatgctgggtgcacagcaggccttgcagggtatccagtgccccacctggcccccgtggaggggaactgctctgagttttgcaggaaggatgatccgatgctgctggagattcctttccatggaaatggccgctccccaggtcccagaggaaatgaaggcctgggtgcgtcctggctgtggcacctcacctcctgggcctcyacctcttgctctcaggacccttgtggggatgagagaggggcgtggaagggccttaggcccagcactgcatgagtaggatctgcctttgggtctgatgccttcagatcagatgtgcctaggttcttccttttctgttcaccccgtgggcctggcagacctcgagagtttttggggcctagactgggaggctcagtggtgcaacggttgggatgcagggtcactgtaagtcagacaagcggcctgcagctcaagcctcagtgtcctcactgtggagggcggctcactcctcagctgacgtctgacaaggacggagttagagaacctcctgtgtgctgagctctggccaggagcttccaccttcctctccctgagtcctggaaggtggtctcagtgatccctattttgcagatgaggccactgaagccggggaagggcaatgacttacccaaaatcatgcagaggcagcagcaggattagaaccagctcatcttcccaacctgcctgggcaatgtaatgagactccaacagaagaagaggacagcggcaaactgccttttcagaccctaaagcaagtgtaatattggctgcctttgttctggaaaaaaaraaaaatacctcacttactctcttttctcatgaattagagaaaattccttgtcttttctcatcaattagagaaaattctcttttctctcctctgtgccttgtctgtgctgtagagtctgtgaactttaccacattaaatttcaactctgacaataggtccccgagatagagaatattcttacccagatgagaaaaaatgagtttcagaaagggagtcatttgcccaagatctcacagctagaaccaaggcagaaaactgaaggggctaagatggtgggctctgaagccagactgcctgggttcacattccagcttcctacttgcccttcattgcttgggcaagtcacctgacctctctgagaaacctcagcttccacatctgtgaaatgggcagcgggaataccctgtgagatgatctgcgtgaagcactttccacagggcttggtacccagacacactgagtaagtggataattatcatctgattcttaacacttgttactttgcagagctgagctgtaaatccaggcccatgaggcctctcctgtctggttgacctcactctgcctgcttctatctggtctttcaggatgtgcgacggcccagggtggggcagaggatgaaggagaggcagaggcaggttggatcgagggggccgccattctcctctcagttatctgtgtggtcctggtcacggccttcaatgactggagcaargagaaacagttccggggcctgcagagccgcatcgagcaggaacagaaatttaccgtggtccgggctggccaggtggtscagatccctgtggctgagatcgtggttggggacatagcccaggtcaaatatggtaagtgtcccagccacagagccaggttctaaagctggattccggcagaggtgggacaggccaggctgatgcaaagagattggctcaaggaaggggatgcattcctgaaggctgatcccaaaccaagatgtcttctgagatcctttaggaggtggaagggtacttcctggagggggtacaatcccagaatccatttaaatcagaaatgacaagtacatggcacatgtgctaccactctccaaacttccacccatagcagacattactaatcagtcacagctcagagcctggatacagccgcagaagccttctcagcacagcactccaacaatcactaatactcagaatgggtttattagatgaaacctatttcccatccctgatttgactgttaatggatgcttgttgggctagaggagatgttagaaagtgtgtaggtggataagtgaatattctgggcctgtgctactgccatggagaaaacgggcaggctggcaccaaagggagtttgagccagatatgtcctaggtaaggtgaggcagaaggtaggggagagattggagtgcccctcctcactctgccctaaaaggcacacatccccttgacgatgtgacttggttgcggtcttctaaacctagccaagagagactggttccttccaaaatatttcccctaaaccataackgagactacagaagaacgaattgttgggagacctgcactccaagttcaggcgaggtcaagagaaacactttgtaaagtacatgcccacttragcgagggttgcagggccccaacctcagccctccaggccttgtgctgtgtaccttagctccagtgttgagctgtacatgggccttctwtgggcaccatcttggttcctacaccctgggagctctaggcattctgtccctgatggcaaaccttccctggtaatcgcacctttaagggaatgttccagccctctagtcacctgagagcctgctgactcccctrcccttcctcttgccaggtgacctcctccctgccgacggcctcttcatccagggcaatgacctcaagattgatgaaagctccctaactggagagtctgaccaggtgcgcaagtccgtggacaaggaccccatgctgctgtcaggtgagcttcagcctgatgttgggcccattcccgtcgccatgcacaggggatgcctgtgtgtccccttcatgaggctgaagggactcagagactttrayccttggctctggtatctccagccagytcagccccaagtgagaactcccttccttttctctcacaaacacacattgagcctactgtgcactcagcaacccyagccctggggagactgcggcgaataaaatagacaaagcatccctgccctcatggcattggccttctagtgacttggtttactaaaaagctgaacaccgaagcccactctcatcagagatgagaaagaatcagtcaggtgataagcattctggccaccagctgtgtgccaggtactgggcccggcactaaggctgcagcagtgagtgaggcagggaaggcccagccctgaggagcttgtggcggagtgaggagcagggaggcgatgtgaaaattcctgagcagagaagtgtgtgaagaaaacaaacagggcaaaggtgtgctgagtgtgggtgatgaggaggagctggccttgtgactatctgaggaagaacacaccaggcagaggaaacagcaggggcaaaagcccagaagcaggactggctggaggctgcagtgaaatagagagagtggagaggccacaggtcaggmctcatgggccatggtcagcatttggaaattactcccagtgtgatgaggattctctgaaacggttttaagcagtgagctgatcatgtttacatttttacaagctcactcagctacaggggcagagaagaggtggggaaaccctgcaggggtgagacactagccaggtgaggccccttttcacagggacgcccaaaaggccttattgtccagcagtgctcagcaaacaccctctgcaaagctactctgggtgctcaggccaagtgctgggactatctccacccccaacccaccagtgattcaggcccagcccctgcccatgggagcccctagcctgaatgtccttgggrattcaggcctaccaacagctaatcccacagtagacgtgtgaggaaggtgttgtgagaaagccaaggaaggagcagagctccctggaggaggtggcgttgagctgggttttgaaggatgaataggagctttccaagtccaattgtagagaacgggccctcctagcagagggaaccatgtacaaaggcacagaggtctgaaggagtgtgsaatgtcctggaaatacaaacaggtctgcaggacaggatggtaggagtgagaatagaggtgggggcatttatttatccagcatttattcaaccaacaattgttaagcacatactgtgtgccactggttaaggaaacaaacaaggtccctgctgtcctggagcttagaatttagtaaaggagagaaccaataaagtaataagcaagcaaatatgcaaggtaacttcagataatggtaagtcagatgaagatgttccaccattgtagtgagrtatagagacctgcaggaaaggcacaggaatctgagttcatcagggaagccctgtctgaaaaggttgcatttgacctaaaatcagaacagtgagaagaaaaaagtattccaggcagagagatagcaagtgcaaagcccccggggtctcactgagagaccgtggaatgccccaaatgacctcttagaacatagggccacatgagatttcaataaattgttacagccctgtggccctggtcctgccctccgggatgaagtggttgacagacagagcatccttgggggcagtggccaggtatgtcctctggatatgtggaagcccggggcaggcatgggcctaagaagatggaaacttcagacagtttggggaagagggaaaaggggaggatgctggcaggaagctggagagagaatgttcagaatcactggcctgacagcatcacaaaccagccaaggaggagggcacaggtgcagagagaccctggaaaagatacgacgggcagagatggatgggaagccaaccagccagcctggagtgagtcatagggtggccgggtctcggagcaggggcaggagggcccagagggaacagaggtgccaaaaataagacgatgctgaaggcagaggatgggagcaggagatttcaggacaagaagcataaggggagagtgaggaggtgctttggggagcttggggagctctctggctgtgtgtgccaactctctgtcaagaagcctcaaaacttggagaggccggtgtgtctccagggaggccagaagtcccaggagaccaagagatcctccaggagagctgaggcctgcaggcccttggagactcagaagggagctcaccccttagtggggaaggacaaggggactggggacagacagaaggcattccatgtctcagcagggatcccagtgagtcccgtgaagcctgggctgctggggtcagyattggttttggcaggattcccagtcatcttggaatggtggcctgtgagcactgagatgagaaaggggtgactgcaaaaagccactacaggccctctgagcccaagctgaaccagcggccttggtctccatctggctggaagcctgggttgatggaagacgcctggggcgtctagatgtcaggagacatcagccaaggtctccaggatgtccttgtgggcaggaaggagaggggcatgcgggaacctggagatctcagtgggttcgtgctggttcttgggtcgctggtaatctggtggatggtttctagtggccttccctggagctctatcctgttgcaatgtgcaaagtgttcccatcagtctctcagagcccacaagcacaagggagtggcaaaaagaaagcaagtgtcaggatccagaaagatgatcacaggacacaggatgaaccagatggaagaaagtgaagctccttggcaagcctgaagccctggcatcagaaatgcaattgcgtgggagtcagcagggcaaaggagtgtggctcagctcaaactcatagggagaaagtgataaaggggcatagctggctccatagaaagcagtataattggaaagagaattctgtaacagttgggaccattatcagacaaaagaggctgcctgtaagagagtgagttccccgtcaccgactgtctatgagcaggatgtagacaggctgcaggtggggatgttggagggtgacctactgaatgggcaccgcattcagcgcccctcccagccctgagagtacattcaccatgccctgtctgccactctgcccccaccatctactgatccaccttgtcttgctcccttcaatctgcctctgctgaggctgtcctctcttcccagtctcatttcttcctctttgcccacttaacttttttccatctgctcaagccccacctcctccatgaaggcttccctgaccaccactgccctgtggcagtcaccccctgaccacctgggacccacttttagcctgtgacactccactttgtgcttgacccaaacagacacagcctcgtcatggtgtttgagttttgcactgcacaaaccatctcaaataaaatgaagaacaaaatttgtcgaccatcccaccacccaaccggatctcactggtctcacttttataggccctgctgtccttggccacatgcagatagacgacactactatgtagtgtcatttctgcaacaatcctcttgcccacgcaggtctgagcagccgggagctctgaactggaagctctcaggaggttgtgcccagctcacccctgggccctgcagaccttaggctctgtcctccagaggcagtggggagaagctgagcagagtgtcaggctgagctgaacaggacctgagctctcaagcgaacttgctgtgtggcctcaggcacatggcttcacttctctgagcccatttccctgggaggacaataggagtgtcattcatgatatgatgtaagtggatcccctagcacagtgctgcacagggaggctcaacatragttggttcccttccccattccttgggtgaggcctggacttgggggtgaaacagactgggttccaatcccaactctactccttagccagggacycccaacaagcttccccccctttctgattatagccccagctcatgaggttgtgttgaaatctggaacctccagaaatgtccatttcgccctctcatccttcatctcaaatgtctcccctttcccacctctctgggctacccccttcctcttcatcatccaactcctccctaccttcagcctgcagcagcctgcctcccccagggggtgttccttgattagtttcttccccagtgttctgaactccctgcataacagccatttggatgctcatttttatgcacaaccagacaccatgggccctttacatcagcggggaggccttgctgggccttccagtctgatgatccttgaggaacaacacagagagaccaggctgggggcatttgtggtgtcgttatggtggttgagaaagccctagtgtcatctcatgcactgtttcagcttagaagagggcaggaaacactccgctctggtcagttggtccaaccatgcttggcctgtgaccctggacaggtcccttcacctctctgagcctctgtgtctgtgtcagtgcaatggggaagctggtgaggcctccactgcctgccccacagggctgttgtggggaccacaggcatgcacacgtgtgactgtcctttgcaaacaaaccctgcggttgtgaggtgctgtatgrtgtggaaggaatgtggcatctggaggcagaatgcccaggttccagccctccaacagctcccactgtggcctctgcccctcagaacctcagtttccccatctgacaagtgagggcagaccagccttcagaaagactcaaatgacctcaacactcagggcaccaaggaaatcatcaaaaccaggcaggtttcccctaccttcctaccctccagggacggacaggcagacacgagcccatgtctggtgtatcttcaaacgggacagagtaaaaatattcagaaattgcaaactcatatgtctgcagggccaggtagggagagcacaggtgccaaacccaaaccacagctgcttcctgttgctgcctgcagaagcgccagcccaatctgacctcagtgctcactttgcaagaggagccagaaatccagatttccctgtaccagctctcaatgtttaagtattggcaagaaattcccacattttaaggtccctatgggtcaagccacatatgggtgggacctagagtgcaaactctgacctaggcctattttttagctttgtattttaagataatttcaaactttcagaaaagttgcaaggatggcrcaaagaatacgggcatgcccttcactctgattcggctgttgctaaccttttgccgtctttgctctctgacaaatctcactctcctcctcatcatgcagatgtgatggccttctcccgctagacactgcaggtgtgtctcccaagagcaagggtattctcatgcataaccacaacacagccatcaattcaggaaacttgacattgattcggtactgttacctgctgtgccatccatattcacattctgccaattgtgcctgcagcgttctccaggccaggatccatgtggggtcctgcatgccacttggatgtcctgcctctttggtctcctgcatggagcagcgcctcatcttttcattgtcttcatggaaagccagtgttttttaaaccctcctaggtcatgaacttccgtgagagttccactaaagcagtgacccctcttataaggaacagatgcccagactcctcatcttgcaacatttcaggggattcaatgatccctagaggaccctggtcctatcccaatttgcagctggggaaactgagacccagagcagaagtgtaaggccccacagagggcaggggcagggcggaagccagaccccagctctgggctcttcctgtagcccccatgcaggagcctgcctccttgtagtaacttccactgggaaatgcaggactagactagatgccatcartgtggcagtggaaggggctggagccagggggccaggatggcggggctgtcttcaaaaaacagcaaggcctggctccagcaggcccgatggctcaacccccgcgagaccccgacacaccctcctcccttccccctgccagccagagcactaacagcatgaggtcatgcaggacatcggtaaaccctcttgggactctgcccacatcccaggacctgctgcccaccccaccaagcagaaggccaggcatgggagagccggacctgccaccactgccaccgtctccagggagcctaggacgacaccgtgactgcagaaggcccagtctgctactcggcccgcactctctccattacactaccctgcctcttctccatgagaggcagcggggtgtagtggatagagcacgggttcaagtcccggctccaccactcacagctgtgtgaccctgggccatcactcaagctctctgagccagaaagtggtgggtggaggggctggggattgaacttgcgccaaaacctacctcagggggctgttgtgagggggacactttgcctactgcctcrtgctctgtgagcgtgtgttattaactgcattaataacaataataatggaargactgtgtctgggctgggaatcgtwttggctttgtttagtgcttgtgcctggaggcagataatagcccccagaaatagcctccatcccttcttcacagcctctccccrctgaaggaacccttttagaagagatgaactctcccctctccctatccagggagaggcctaaaaggtcacacgcaagakatcaaggaaccctaggtccagcccctactgtcctacaccctctgcaacttcagtcattcgccttatctgggctcagaaaccccattttgtaaaaggaggcttcccagttctgctacctatggctcagsataccccacaagccacagcagaaggctttgactccgagactgccaccatctagaccagctcagggcaagggaaagccacctcctgctgttcaggacaggcccaaggccaggatgggctttgagcctgcagctgggaaggtcctggccactctctgctgccasgtcagagaccaaggaacatcccctccacaggaccaggacagggacagaagcttgggcaggacaggacagacagtaccatccacggaaaccacagtgttccctgagcctgggctcccatttcctcccactcatgggatagctggcagctccccaccaygctctggcccccctttctctccttggggctgccccagacagctctcccaccaactttgtccacaaggtggaaaaagcacaagattggagccacagaccagctcccatcccagctctgccttcctgggctgaatgcagaggtgaccccctgagctgmtgccctatctgtgaaatggggtgaggctgaccacctcacagactgtgacagctgagcgaaaagtggctcagatggaacttggcacatcatgaatgctcaaaagatattctcttccttcctccccctccacccaaaaatactctcagcrgcttcctattgaacaccaagcaaagactccactctgtcaccctccactcaggcaccttctcccttcgtgggcgctgagctttggcccrgcccgcccgctaccatcacactggaccacctcccacctttgcctggctgtgtcccttccggcccgccatgtccttggcttggttttgtcttgcattgctctggatctgtgtgcctatctgctctccttgaccccagctagactgtgagctcctggagggcagggaccacagggggacctctctcagacccgagagcctggcatggagttgacaccccaccatgtctgtccgtcaagtgaaggactgtggagctggggaaggggggcgccatctggtcattctgtccacacgggcctctgccggcctctccacaccctcttcttcccgagatgtagctgtccaccctacccaggacatgccctaggctggtctcccttagacagtgtcaagacactattgctgagatatggggcctaagccagctccctccccactctacagatgacaaaaytgaggtccagagaggagaggggctggccccaaggtcacatagcaatcagaattagacaccatgtcccaggtgccctcttctgggtccagggctctctctctacccctccccgtgcttgtattctgaagggctctgtgggcagttagaggaggtgggggctacagagtgctgcccaagggactgtggacagtgaggtcccacaaggccctatcagggcctccatccccaagaggttcccacctctgcccctgtggtcgtcctttgaraggtttagcccactgcgctttgacttggatgtctgttgctctgccattaattgcttctgccatggtgttaagcattgccctctgcaggggactcgtggagctgaaggggaacggtctagggaatgccccagtcctttggagtcttcccctggcaggagggcctgggagaggacagggcacagcccagtgaggtgtggcaggagggggcacagctgggatgaatgtgaccctctgcaaaacataaagatgatttattagggacattggtattcccaattataaatgtaatacatacccaccctggaaagttcaaaatagtacaaaaaattgtgctggagttgcagctccaaaccaggctgtgcgggggaggcccagaggacactcccactcagacactgccttcaaggggctcatggtcaggttgaggagccaggcctggaagcacccccagaggagacttcaggtgattcagaggagacagatgaagtcccctagtgggagtcaggagggctacccaaggagaagggcattcatcctgtggaggaggttgtgagcaagaggtgagggaaaggcattcaggtgatcactgtgagcaaaggccagggaggtagacaccaaggcccagtgaactgtgcacactccaaaggcagaggccacgagacaggactcagtgtccagggccaagaaggcagaggtctcatccaggggacactgactgagtggtttggacctcagggagccctccaaaccctcgaagaagggattggaactggagggagacaggtaagagcagaggcttggggataccggaggacagagggagggaggactggggattgtagatgccccrtctcccctgccctkgctattgctcagctctggaggacaccctggggcatctccagggctgggcggggagcgcactatgcctaagcccctccctgacgtcctcctgccacctccctgcctccggatgtgggtgtagagctgccagctccctgctgcgatgggagtgattagattagaaggtgatttgggagtctgattatcgtgggtggaaattggccccctgcatctttttccatcctgtcttgggttgggaggtggggagcagcctcttggttgccacctaagccagagaaccaatgccttcatttccagcgaacctttctactcagascagaatgtgtctcagaccagaatgtgagggccttgcccctggaggctaagtggaaggtaacaaagacaacaggctcagggacagcagagagttcaagtccaggctctgcccctcacctgcagagtgactcggcagtccacccctccactctgagcctcagtttcctccagtttgaggactagatgagatcattgagcgtggagggcagcatgtgccctgcacacagtaggtgttctacagaggtcagcttgggtggctgttactgctttctgtgccctatgaatgcagcgtagtgttccttcctctcctttgaagagtctccagtgatacccgccatgagaccccagtttcttatctgtctaatgctgatatgtaacagcycctcctcctagcaccctaacaagccgagctggtgcccacggaggcatcttgtcagcaagttattataatgaacaaggccctgttactggccctcagcagggtgacagagcagggtggggtgctccagggtctgcctgtgatgagaagccaccaggcctgggctgctcagcctagagccaatgtctgagctcattctgtggtccccactgtgccctgccaagggggaaaaaaagcactgtccttctgtcctgggaatggccaaagagcttgccatctgagaatctgggttccgcacaccccctctgtgagccttcatgacttggtttctgcatctgtgcagggagaggctggcatttacgtgcctgaaaggaatcactggagagtgtctgtctctctgtaaagcactttgagatcytgagaccccagagaccaagaggctagattgttgcaagcgcacacacacacacacacacacacacaaaagcatgcacgcacacacacacaggcacacacacacacaacatcgggatatcactcagatcctacaaggaaagggacaaggtgggtgataccacttaaaaagtgaaaacagataccttgcttaaggcaagctctttaggtctgacccagaacccctcaacccttattttagatacaattctaatgagtttcctgacatagacttcaaatctgaggcaaaccaaaacacagtgagagataagttatgctgaaaacaggaagaagtggcacctagtctcgaggggacagaaaagagaactctgaaaagcagaagtgagttccagaagcaaggcatggcatgtcggagagtcactgtcatggctgtcaaggcctctgtgacactgtccagccaggccagggtggaattcttactcccccatctgagaaggtagtgtgtcctgcatcatatacagctttctacccagagtagcaaaaaaataaaaacaggaaaaaaaaatgtgtgcctggagagccaaccttccagcatccagattcttccagcaccaatcaaaggacaaaggaccagcagtgccgcattccctcgctgctagaactgggtgggcatagctgctgtctacttcccagactgggtcccagctgtcctcctggggtcacctttgcttccccagtgaggccatggcttcagggggcttttttttccaatttttaaaattatattaatagtaaaatacacataacatagaatttaccattttaaccacttgtaagtgtacagttcaatggcattaagcaccttcacgtttttgtgcaaccatcaccaccatccatccacagaactcttttcatattcccaaactgaagctctgcacccattaaacactaactttcatttcccttccccagcccctggcacccaccattctactttctatctctgaagctgatgactcaggggacctcatgcaggtggaatcatayagtatttatggtccttttgtggctggctggctcacttacttactgcagtatcctcaaggttcatccatgttgtagcctgtgttcaagtttctttctctttaaggctgaataatattccattgagtgtrtagaccatatttctcccctctcttcagcttatcctccctctgaagcccttgcttgctgttggacaagttgctctctgagcctgcatggtggagaggctgcctgcaagcagcaacaaggctctctcatgaaacaatagctgacactgaagccccaaagataaaacaaataaaagtagagccatcctgaccaaaggcctccttcacccaccatagctacacttccagcccctggaaagaatgtcagggtcctttggaacccagtttgagaaatctaaagttctaggaaagtggttcttaacctttcttgcagcatagacccctggagtagtctggtatcatcatgtgccacacctattccaaataaagccttgaaatgcataaaatgaaatgcatgaggtcccacaagatcccactgaggtcacaaaggaaaccaattatattggcataaagtagaaaaaaaatatgtggtatagtaatgagtgtactttattagaacactgaataacaagatctagcaagcagttgcataaccactttatttataaaatagagatgagcaccaacaatgctgcaatagctgtaaagtgatatgaaaaaatctgtgatttttgtaatgtgtgtagtggcatcatggacactgataacactcctggagtttgatgtctacatctgtaagggtggtagaggagtggggagaaggagacagaaggaggaagtgaccctccagggcaggtagtaggtggtgggcctggagatgtttggggtacctgagaactgataggtagcagtgtttccaccccagcactgtcctgaggtgaaagcatcttgaaagagcccaccacayacacagtgtgaatcttaaccataggtgatgccccatgacctctgcaggcaaagagccaggagctgactgagaccacattttttcactcctttggggagacggcttcaaccatgcaatggtaacttggcttttgtcccctttcccaggaacccacgtgatggagggctcaggacggatgttggtgactgctgtgggtgtgaactctcagactggcatcatctttaccctcctgggggctggtggtgaagaggaagagaagaaagacaaaaaaggtaagcctaatccccttgcagaccaggagaggagctcttaaggccacattttttttttgtttatttgttcactcaacaaaatagttattgagtgccttctacgtccgcaccctgtgctgacagccacctcctgcatccttaaggcctgcatgggccaggtaggctctgtctgttccatctccaggtcttgtcccagtctctgtcttgtccaatcatgtcatggaggcccctccttcccctccgggccaggccaaggatgctgaccatgttgttgagtctccagcctcaagtggtggaaacagccagcatcaattggtcccatcatcactccagtattgagtagaaatccccacccattggaagcatattccttccaatattgtcaactccactgagcagaaatgaaaatccacccagcatagattcatccaagacatgggcagaggagattctgggaaaggtagccagatgcatggctccaaatcaaccattatgagtttactctccagtgctcccagacctaccatcttgtctgagttctgattcttcctcctccttgaaaataarattccttattcactgggctctcctcaatgcagcgagctgaccacccaggctaaaactgtctctcagaacagagggaaagatgctcaaacaaaaagctcaagtctcttcaggccaggcccaaatccaaaggcccaggcttctggtcccagcacagctgactccttacctgtccccacacttgatctcaaagatagcccccctttcacattttcagtcttttgtctccttcctcaagcacaaagggaggatctgtgacattcagaacttctagaaccccagaagggaaatgagaggacagatgcctcccccactgagttttaggggcagccctgctccctccagctctcagaggctaatcaggcacagagcttaggtcgagactgaagattacttgttcctgaaggcaaaatccattttctagggggtcccctaagattatggtggcccctccagcaggacaatggggctgagctgtgttctgggaaattagaaggctggagagagtaaaggggtgctgaggctgaaactgaggaaagagtcgtgactaagagtcccagaggacataaggagagtgtgcacatgctgggtttgaatctgtggtaggatggctgagccctattccacaatgatagcagttaggcagatctaagcaggtaggcaggatgcagcagcctgtactcattgtcttcacctcactgaggcttgagtgaggggaagacgcccccagactcttctatgggccagatctgtggtttttaaaatgctagcagggccagatctgtgstttttaaatgccagtaggaagacaagtgtcaactgccccagaagcacagttcagggtccttcgctgagcatgcacctgcactcctgtgagatggagatgtcagaaaaatagcctcatgtagaaggaagatggggaatgtggaagggatgtggcagaggaagcctgggggagcagtccagcatctcaggccaccatgagcagcatggcctcagctgggycccctctgccctcccatcccatcacctccactaggaacattgcttagagcccrccacatgtccccatttcaggatgaccctaggtgtatggccatgtgtgtatgcacatgtgtgtttgtgtgtgtgcgygygygcatgggcagatgaggctgtgtgcttctccttcattaacatgtctcaaaaatcatcacacaggtgtgaagaagggggatggccttcagctaccaggtacagtaagacaccctcagggtagatgggctttyagaaatagcagcaggctttggtcattgggccctgcccctagaccaccagcacacagctggaggaggccacaygcctgtgggyggctccaccccccagaccctcctttgtgccctcctgtgatgccagccctgtgggacaagccaacaccccactccaccctcttgcccttacagtgcctcaccctaccagccaatgccaagtggtaccacccccatctctacaccacccttagccctgcgtaccagcatgcaaagcttgctcaccatcataggaccctcccctcaggccctgctctccccaccagcacccctggggagcccatgccctcacgcaacagtgtgcttcacccagtggggcctcttcctgcccatagaacactattccctacccacaagaaagagcaaaaggtgtgaatttagccatctcatatcacttttaatttctaaattaagaaaaattcactagtgccttttccatcccatatacaaaatgcaacatgcttgatgtcaccttttaaatttggggggcatctcacatgggagttcccaaagcagtctctggaatgccagttaaggaaggaggcaatggcctgaatcaagggcatgaatccagttaagtcaaagtcatcaccattagcaaatgttcttccagaacaccctgatgcacagagatggtggtcatggagaatactcaytctgagtggtccgtgcccacgctgcactgcctagtgaatatttttccactcctggcccccaatgggcagccagatctcctcatttcatggagccctctcttccaggggactctcttgactggttggaccagcagggtccagacctcagcacagaccagcaccatcccagctaaccaccctggtcatccaccatgctttayttgaaagaccctccatgtctgagtttctcccctcaacctctgcrgcatctctatggaacatttcacccccaccccaaatttgagtttcttggtttccaaaggataatttttttttttaagaatagagtcatgttatctccccrcaagttggttcatgtctttgtcgttgttgcttttctccattgtgacactgcattttccatccctcccacccccctgcagcagcagacggtgcrgcagcttcaaatgctgcagatagtgcgaatgccagcctagtcaatggtatgtctcccacggcgagctcctggtcatggttggatgggcgtctctcacccccaccccaactttgggctttctttccttgttctggactgcacagatctcggatgtgcatgggccgctgggacagtcaccttctcacatggggcaggcgcttaagacaggagccacagccgggggagtcagctctgcaacctgtcagcctcacagctgccaaaaaggtgctggctcctgtcgagcccttgactccccatggagcccagataagagacgagactttggcttcagattggctcccaagaaggagcgtcccacctggcatggccctctcctaagtgtattcctggccctggctttgggaagaaggcctgggatcagggcttgggctgaagctggcatctgggtccccagcaaaggctctagtcctcgactctaaaatttcctcgaggcaaggggacccaggccgggattcagctccttggccctgtcctgtagcatggctgagccagcagtaaacagtttttcctcttctctttcacggagccaacgggcagggggttcgcttgggctcgggcctggttctgtccttcggatgtggactggtgtttcttgctgttgcctgtgctggagcgtttgtcctgggtcacaggggtggagggtsggggagaggggctggcactgtgtactggtgtctgcatcttaatctccttacacgcaagcaagaaggagttccattcacttgcccccaaagcctttagaagatttcggatttctatccccttctggcttcagagcaacagacarggcttttgtttactcagataccacccctatccccaaataaagtgacataatagtcccccaggctactcctgaactgttgagagccattagggctccatcatgaaaacattgccccagaggagctgagggcaggggaaaatctttttcccaccgtctctgcataccaggcactgggctgtgggtttctcatccattatatcatatcattcacttctcaccactcctgcaaaatatggagacttgttccccgcagcctcccatcccctgccctagacctctccccaagccacctgcattcaaagtgcccaaagatggaagcacctagtaggtgtcggggctgagtaaggcacttctgcgagcagtgccttgccaagaaggactaattctggtatggctctatttcaggcacaggaggaggaaggatgacagcttggggagtgggaggtgtcatgcctcagggaggggtggctgagggtgacaaggagaacccatgtgggcaaacccatggctgagagagaaggaacctagagggggcacccacttcaccccggcagtgagcctgctgagctttgtgaacatacagaccccatccaggctggccagtctcagaaaaaagggcagctttacttccagactgcagcagaaaaccccaaatatcccaagagaaactgtaggaaacgttcatttcttgaccacctactgtataccaggcactgctgaaagcatttcatattcaccatctcatttaatcctcatgacacccccatgatacaggttttattgtccccactttaaagatgaggagactgaggctcaaggagaccaagacactagcctaaggtcacagagctagaaagtagcagagctgggatttgaacccagaacccagacctggctggctctaaagtgtgtgcttctcctcctgatccaggatttcccagtggagtgtgtcttgtaagtttcacaaggatgttaagagggctttaccccaagaaaaggattctgtggtcaaagatgtttgagaaccactggattgaattgatctcttcctggttacagaattagtcctggttacaggactgctcagagccttgaatatgctggtgtgtagcggagagttacagagtcacatagagtttcctaggctgatttgactgcaagacctttcctggctgaatcctgtggaattggtctgccccataatatactctgggaaataatgctctaagccattgctattcaaaatgtgatcacaggacccaaagcctgcacatcacctgggagctccttagaaatgcagaatctcagttttttattttattattattatactttaagttttagggtgcacacgtaccctaaaacttaaagtataataataataaaataaaaattaaaattaaaaaattaaaaaaaaagaaatgcagaatctcagaccccaccccagaccaactgaaggagaatctgcattttaacaggctttccagactccaggtgagagcacattacaggtggagaggcacaaggtggaaccttgccgattgagagagaattaagtgttctttcccctccttcctctgagccagatcacaatgacttggatatggaaaaaaaaaattagggtgataatttttccctttgaccctgctcccccaagcccccaactgaaaaatgggtgtggtccattcatcttggaagcattatgattgccattattatttagttatttttcttttacattactagtgtgtcactatgtaatacatgacctgtaatcatggttataatcacagttaattatacatcatgaggccgggcgcaatgactcatgcctgaaatcccagcactttgggaggccaaggcaggtggattgcttgaggtcaggagttggagaccagcctgggcaacatggtgaaactctgtctctactaaaaatacaaaaaaaaaaaaaaattagccggtcatggtagtgggcacctgtaatcccagctacttaggaggatgaggcaggagaattgcttgaacccaggaagtggaggttgcagtgagctgagatcatgccactgcactccagcctaggagacagagtgagactctgtctcaaaaaagaaaaaaaaaattatacatcatgggctgggtacagtgcttcatgcctataatcccaacactttgggaggccgaagcaggagaatcacttgaggtcaagagtttgagaccagcctagacatcatagtgagaccacatctctacaaaaaaaaaaaaaaaaaaatttaattagctgggtatagtggcacacatctatattcccagcaactcaggaagctgaagtaggaggattgcttgagcccaggagttcaacgttgcagtgaaccaagatcaygccactgcactccagcctgggcaacaataataataacacattactactaactcccaacgtttacacagtgattttccagtgcctttcataaacatcaccttagttgatatcagcccatttcacagaggagaaaatggaggcacagggaagagaagtggtatttcccaagtctcccaggtagtggtctctctccccagagcttgtgtatcaggtcagcttaccaggaatcctcccaatccatgcacttcacacccatgccctttgtgatgcacagagagaatagacccatttggaaaaggtgcatctgactccagatacagagaagggcctctgagaccccacctgagggctcagtcttggaccccattcctagctctcctgaaatacagcccatctccagatcccacatggggccaaagctggctgttccaccatagttcagggccaggcgagcaccagtttggccaggagagccccaaataagtccctcrcttctgagaaaccaggccatctgtgcctcagcactcccagaacatccttcccttcctccagcatatgcattggtgattatttttctgatcacgtgttcactctggaaataaaagaggaaagtgctagctgggcttaatgagtgcacacaccggctattgcatctgataatatgcaatgcaaataaaggcccctttgagccttctaaaaccaactattgaagtggagtcccctggtgcccctgagcccagtcagtaaaattattttagaaaataaaaataatygttgttattcattcctgcttactctaaaaagcttttttctcttgtgttttttaatccagtagaaagaattttacagtagagmcacagggggtctttcactttaaagcccaggatgggcaactgatcctttgccatgggaggccatggggacagctctgcacttacccttgaacagacagtgctgggcgaggttcggggaagccacttctyccctctgagtcacccagaaagtgggcacagtgacagtgatgaactaatcctgcagccatggggctattccgaggatgctcctaaattcaggctgcctctgaacttcccttggcctcagtttccccatctataaaatgagagtgatgaaaawccctcctgccccrccttgcagggatactgggaagactgacaagagatgacacttgcaaaagccctttgaaactgcaaaaggctgaaccgtgcaagtgattatgatgaaggtaactgggacactctgggaggtgaatgtctcatcctgttttatgaaagtggaagcttgatgagattgggagatagaaagccagcagctagttggtggtgaaatgaagacttcaggaaccctgtcscagcagtgccacctcaacttccctcccctgggctcagaggggctgaggggtgtccatggtctccctgacggcagcttctggagaagcaatggcaggacggaagtaggcacgcactttggggccagctctccatttacccattgagacccaagcagctcatctccctctctgagcctcagtttctcatccataaatgggtataatacaagcacacccttcataggtgaggctgtggcgaggattagatggaatctcagagcttatgtgtgtgcccagcacatggtggtggactgtcctggaatgtgagctgtgagaatcaccattgcagccatcatccaagggtggccaaccttctcagacccctcccaagggggcgaggcctgttggcagagcaggcagagctctgggtgagcgtgcaggcccagtagatgggagggtgctggcgaaggcaggtgtgctaggcaagagacagaggcctccattgcccacattgcacacccagcccacaagctcctggccaaggctggagtgggggcctcccaggcagctctgatgagtcggtggggggcagccagatgcagcaccaggccctggtatggaaggggatgcccacggacactacttagcctgctgctgtagcctgagccatacccctaccaaggggtcagcacccccattggggaccagagcacttcatcaagaacccggccacacttgaggtccctcgtataccaccatggggacccctgatcactctttgttctggtcactctcaggggcattgggcaaggggtcatccttgggtggcttcacactcttcagagtgtgaaggagaaagatcatccctcttgaaggccaaaactaaggaacacattgacctcagtgccttgtccaaactcctctccattctagaaacactctctcctctctctcygtctctctttctctctctctccccctctcccctctctctactgcatgttttcttttgtgggaaaatgaaaaggacgtaactgaacaagcttccctttgccttctctcaacccagaaaacaccaaatcggtcacaaaaagcttggtgtgggggcctgagtgcttctctgctgcctcctccagcagactctaatcccctgcaccctctgatacttccctttgatctgtaacacrctcaaggccaaaagtattccagcagaaacctccctcctgagtcccctggagaatcaagagttgcccggctggcaggccccacagctaaggtgcggccaggcctgctcctgcttcagggccctccccaacccgyatccccacacagagggatgcagtcagcacggcccgcccttcatctgtgacattaatgtctgtggcctgttgcgtcttcgtgatgaccgaccatgtgttgtctgttctctgttgtctgttaaaattctttgtcgtgtaggtaaaatgcaggatggcaatgtggacgccagccagagcaaaggtaacccttttgttttaaccggcgtttgtcgtccctgaggcccctccccayyggctctgacagtcacaccagagacagagactggcaagggccagaggcagacacatccactcctacaggtgtctgacgaccttgggggtgtagctgtgatttgcatggtgccaggccaaataaagaggtgtccaccggtgaggagggggatacccatgggccagcatctccctagcctttgaactctgcgccccattcagctgaagactttgagatccttagaggttgaggggtagggagtttggctcagtctctgtccaaaagggtcacgggccctccagtccatcctgcatgaagaggccaygccaactgggatagtgacttggctcccatggctgccctcttttacgttctaagcctccttttttgtccctcctgtcgagtggctacttaatatcccacaacaggtcccaaggaccagctgggtagagcccaagcctgtctgtcttgtctgaatgtgggaaaggacaagggaccacctagggtaggactcacaggcttgttcaggccgagagggggatccagggtaacagcatcmgtccctgctgtgtcccagattccaggtctgaggcagcgagtaccactgggatccatagctccggctggaagaggcaggcccccatcacaggacttctgcaccagccatgcggggctcagtccaggcagtcagcacctaccctgggcaggcaggggtgggtgccagcgtctccaccctgtgggctgacctgcatgtgtgtctatgtgtctgtgtgtatgcacgtgygtgatctgccccctgcagccaaacarcaggacggggcagccgccatggagatgcagcccctcaagagtgccgagggcggcgacgctgacgacaggaagaaggccagcatgcacaagaaggagaagtccgtgctgcagggcaagctcaccaagctggctgtgcagatcgggaaggcgggtgagtgcagcaggtgggaggcaggggacagggctcacagggggaccccaggcagagccctgccccatgctcggcctcasttacctcatctgcaaagtggggggcttgaatgagtgcctgaagcccacctttctctaccacagcacccagtctgagtcctgtgtacagaaggcactccattagcactcagtgatacagaagagtgaagctcgagcaaatccaaggctctggtagcagacggcctgccttcttgtccggcaatggctgtgagaacttgggaaagtaacttctagctctgagcctctgtatcctcatctgtaaaatgaggataatagttgtccccacttcacagactgctgtgggagttaaaggagactctgcatacaaagcattagcacttggcaggtgcagcagctggagagggtgcagggcctgaagttccaagcaacacagactttatcctgaggacagtgggagccatggaagagacttgagcagaggaagacaagaatgggtttgggctttatcatgaccaccctggccacagtgcagaggaaaaactgaagaggttgaaggacattgccaagagcccagggagaaacccatggtctgagcccccgcacaacaaactgggcatcccaactaaagtggtaactgcaggtgatggctggtgacagccccgctggcccagctgcaaagtgagcccccgaccctctggcacggcctaggcttcccctcccgggtaaggaggtagcaaatgccraggccttcccacctggctgctcgatcctttgtggctgtctccccagctctaattatagacaccacagcatggggaagggaagcagattacaggcttggctgtctaaatttaaacttgggggcctggtgacagctcccggctagctgggagcttggcttccagcccctccgactgtcagacagggatggagccggctctgaggctccgcagctggaggtgggggtggagagctatgggcccagggatttcctctatcctctataccgccatcgccaccgccacaggcagaagactctatggaaacatggcactgacagggccgggaackaagcgatgagaacaaccccatggccttcaaagtcctcactcctctccctcctgcacctcggccctgccaagaatggagttcacagtcaagcactcctgggttcacagcccatctctgcctctctctttggctgaattccctgagatgggtaggcaggggatctattgacagggtgctctcaggtgagacctgcaaggggcacaggtccacgctagggaagaagccgggggcagctgagatttccagagaactcccagcctctcccgatcccatgggagctcyggagcaacccaaatccatccctgccctcctctgctcaracctcctccgtgactcccactgtcttcaggataaagtccatggctgcccagaactctagggtctgtcctacctcaaagcagatggctgggctttgggactaacacgtcagccactggatgttggccatcaggttaagatgggagtgcattcccaggcacttcccaacaaggggacccagtcacctgagcaggctcttcctctgtcagagtctgcgggtgtgagcagtctccgcagcacctgcagtagcacctgtagcagatgggggatgggcatgctaaactgaagaggaagccccaggggatcaggatgggtccccagctgcgttcctaccgttacagcatttctcttgcctgtggctgcaagcaagtcacttcccctatctgagcctcagtttcctcatccaaaaaaaagccacctgctgtttcctctacatggaatgttcttccctaggtcaccatgcgactggtgtctgctcaaataccaccycctccaagaagccttccctggccaccctagctaaagtaaccactccctacccctgtcccccatgtcactttctatcacatcatcctggcctttttcttcacaatgtgtcrccatatctgaaactgtcttgttcatgtattcgtttttttgtttcttgtcttcctcctcctctagaatgtctgctcctcaagggcaggaactcttgtcttctttactgctgtgtcctagttcccaaactaggaactaagatgtgcctggcgtgtcataggtgctcaaaaggtatttgtcgaataaatgaataaataaatgataccaacttcacgtcattattgtgtgaaagctcaatgcaaaccattcctcctttattcacacagtcactcggcacacatctcttgagcacctactatgtgtcgagcacatactattgccgagcactatgctgggcactttgcatgcgttattaccacatttgagccttacaaaatcttggggaggaagtatgcatccccattgtacagagcaggagactgaggctcggtgaggatcaaggtctcaagaacttgccacaggtcataaagcaaggagtggcagagctgggaggtgagctggggtcagcctgacccggagctctttcagccaaagatttggtccacaccacccccagcctccacttcctggaaccccccaagcatgtgtccctcacattgcaggcttggtgatgtcagccatcacggtgatcatcctggtgctctacttcactgtggacaccttcgtggtcaacaagaagccgtggctgcctgagtgcacgcccgtctacgtgcagtactttgtcaagttcttcatcattggcgtgacggtgctggtggtcgccgtgccmgaggggctccctctggccgtcaccatctcgttggcctattcggtgaaggtgagaggggaggagagcaggaccagccggctgatgcagctgcagctgagggcctgggggaatcactggggctggtgctggggttgggagatgaacgaagaagccccatagaccccctaggagcttggaagaagaatgtatgcaggaccccaaaactctgacgctttcatagagtccaggggcctgtagcaaaccagagagccataccctggctgaagaggcagctgttattcagcccagccacacgccgccttgcaggggtgcaggcccagcattgccacattgtcacctttttccaagagaagccagaaatctggacttaatgtagactctcgtgatttttagacattgataatcaactcaaaaattttaaaaaaataataaagacatcaccgtgcaagccagaattcatccttaccccaccaaatttacgtagaagtctggcggtctcagtcgtaggccccgcgggcaactgtagcgcttgtaaaactcatcacagaggtggctccctgaagtgtgaggggtaagccaaaaacaaaaaggaagtctgatttcatagaagcctcctccccttgggaaagaggctaaaaatataagaaattttaaagcagttaaatgaagagcwggggtcatgaatgttttccggggaagcttggtctgggacctttctaagcgctaccctgatggcagagctgcacctccacctgcacccaggccatgactgtctgcagtgcccagtcactgcgagtctgaccctactgggtcacccccaggttctcacacccgggtctcattttcttccctttgccccatgttttctccacctygaagggccgggcgtagggcttctgtttcccagtgccccatgccagaatgtccctgcaagggyggaggcgtggccatgtttataaacgaggcattcactctgagaaattggcagagcctccagarggcatggtgagcatcagtttccaagctggaatttgggctgggctctccgatgtaatttcatacagaaaagagatctctagacagacgccagaaagtggcagttctgtgtaacaaatacggcccttatcgtcttcctgttttaaggttcttgaggaaactccatccccacaaaccaaagcccaaacaggccacaacaagaggctactttgggacccagggccagcagagggtgactgttatagagccacgagtagggggcctccacagccacttcactgagcccggggatgtccttgaaagttgcacagagctggtttgggagaatcatatacagatgcttttaggcctctgcgccttctgcagttcgtatctctggcaccygctaccttcgctcatcttaggtagtgttaaagttaggtacttttacagtcacttgataaacttaggagagcaccccaacacaggagaggcagactgtgccctctctgagcctggacctgggagccaccatcaagagcacagagatgactgaccacttagatcagcactgcccaaaaagagacagaatgtgagccacgtgtgcaattttaagtttcctagtagcagccagacgtggtgactcatgcctgtaatccccagcactttcagaggccgaggcaagaggatcgcttgagcccggaagttcaagatcagcttgggcaaatagtgagaccccatctctacaaaataaaataattttttaaaaaagaagaaaaaattcctagtagctacattattttaaaaaaggaaaaagaaaccagtgaagttaattttaataatgtacttaacccagtatgtcaaatccaacaytattatccaacttattatcaatccaatgtgtgatcactataaaaattataaatgaactactacttttacattttttcaaaatatcctctaaatctgatgtrtattttgcactcacagcacatttcacttcagaatagccacatttcaagtgctcagtaccctataggtgtagtcacaatacatgtgactaccgtrttggatagtaaggacttaaagattcttgagcccaacagacaaaccctsttcaaagagtacaggtgggctgaggcccaatagaaaggtccaggctgtgaggttaaacggaggtaggttcaaatcccagctttaaacccctccgggtgtgtgatcctggtcaggtcactttgcctagatttcttcagttgccaaaatggattaccagaatcytttcctgtgccacagaattcttaaaacatcggacaagaagtaattcacaacaaggctttgcaaactgtaacatgttgcaaattcaagttgctgttgatcattcaacgtgcgtttattattactattatcacaagttatagtaggagaaactgccagagaatataatcctactaatactcatttttagtaacataaagctctattaaaattattattcttttttaccctggttataaagagttataatgaggagcaaaaataaaggaaatcaaattcctaggcacagcctagaactccatctgattcagctactatgtcaggagggcctgcatgaagaacagtatttccttgagaattacttcatttgcattacttgtttgagagcctagaagaaggtatgagtgtggagttgggccagagagaaaagaaggcagatagaagaaaatattgtgtataggaatattccatttttgttataaatttcaaaaaaaaaggatgttgatatacaagatgtacctagttctggatggtagctaatagttgatatgttttctttttcccttttgtgtatttttttaaagaaatgtgtggtttttattatgcaagtgatatatgttagtcatagaaaagacaaaaatctgtaattctatcacttagcaataatgacattaatactttgatatttttccagatattttcctgtatcctaatttatttacttttggtaaaattaaaatgagaatgaaagccaggcgccagtgaaagataataggtttgagaaaattcatgaccaaataaggaatagttacttatgttagtctataagagaaaaatacttaaagtactcagagagggaaccaaccttatttatctttcccccttcttcccgtaaagaatgtagattacttctgtaatccaaattaataaattcaattaactgagtcctttaaatggttcagatactaacagagaaaggaaagggccacgcgcagacaaaagaagcccaggtataggaggcagcagcaaccaagatcctttacaagtgccggaagcaaaggggcaggctgtggtggctctgccttatttactgcatgtttacccagtgcctccaggcaccccatgctccccagcccctctcctcactgttgccctctcacctgccccttctcccagaaaatgatgaaggacaacaayctggtacgccacctggatgcctgtgagaccatgggcaatgccacagccatctgctcagacaagacaggcacgctgaccaccaatcgcatgacagtggtacaggcctatgtcggygacgtccactataaagagatccccgaccccagctccatcaacaccaagaccatggagctgctgatcaatgccatygccatcaacagcgcctacaccaccaagattctggtaagtgtggaccaggcacatccaccacctggagcaacatccatgggatggtacagaggtactgggcaggttgagcaatgtgattcatagtctcaaatcctrctaatatattttggtatggtcagatagtaagcaacatgtttctgtttgasttaatatactattaatattgctacaatgtttgtgtgacaaagaaacctttattgttaattatgctttttaaatcctgtcgttgaacccccactccccctgcccacacacagacaaacattcattagtgtgcttttgctgcatarcaaactactccaaaacttagtggcttgaaacaaacctgtgtatttcactcaaagtcytgtgagtcagcaattcaagctgggttcagctggatggttcttctggtctcagctaggcttcctcctgcatctgtgggggttcatgtggacatctcctctgatcttggcagaactgtaggctgacttggcatggcctcagctgggctggctcatccctgccctgtgtggtctcacctcctccagcaggctagcctgggcttgttcacatggcgacaacaggcctttgagagaggacagaagtgtgcaagtctcttgaggcctgaaccgccacgttatcactttttgctgcattctcttggccagtgtaagtcaggaggccagcccagattcacacagtggtaaaataaacttcacctcttgatgagaggtgctgtaaggacatggattcagaaaggagaataattgtggccattttcacagtctaccactgatgatgttgttgttgctaatagtagtaatattattcattttgataagaaaaactctcaacctactgtctcagctaagctgtctagactcaccatgctgtaaaccctatctggtttagaagcacaggttgcctcagcactagatgaagagaaacccaaacttcatccatccagatgtccatcagctcccagatgtagaacgtttctgccttgagagcatctgggtgatcagctaagcttttttgtttaccctcccaatgtgctgagccctgacctcctcctccttctgcccctgagccagctgcaaccttctcgatcaggctgggtttgtaggagctgctagcagctttatcgaaatggggaagagagcgtgagtcagcagcaaagagccaagggctggtaggggaaggaggaggaggcggctcctgcaccctccacagcagctgagcagccacccgcatcatcctggagcagcaggctaagggaggcagaactgacaacggggaaagtaggtcagaggacccatgcagacagtgatagagaaccctggcggtgatgccaaacatgacgacgtttttgtcttcttcccccaccccacccaatttgggaatcaagggagatcagcgatgctttattctgctccccaggacttcctaaaataactgggatgctgataatgatctcctcctgcagacctggcagagaggggaacagggcgattcccagaacgggcttcagccatgtgggcacagccctgtggggtgggcttggattgagatgtgtgtaatgcaattatagtcaaaaagaattcttgggatctgccaggaaggctgaggaaacctctccacagtgatgagtctcaattaagcagtgctttttagcacyggaggcaaagctgaaatgtcatttccagatgttggtggattgagtcttttcaggtggcataaaggacaggggtcagtcggtccatctgaggaggtcagggacctgggaactggggtccttggtttgtaacccaggccagatcccttacctctcagacaccagagtcccctctgtgcctggaaccctggcatcatagatacctgcgcctgtctttctgggtctttcttgtaagttccctggccacattattctctttgctgggagctgacagccrtcgatgtgggaaggacagcagagcctctgtgtgactgggtagtggttaaaacttggactctgsagccagactgccttcgttcaaatccctcaccagctgtatgaatataaacaaattatttaacctcttggtgcctcagtttcctaggggagggggagaatcttggattgttgtgaggataaagtgagttagttaatggaaagtgctcrgcacacagcactcagtatgactagtattgttgttattcagcaataaaatcacccaccgaaagaggattccatttgtagcaatgcagaggttaacaaataaagagagcagagacatcagggctagagagggaaaggctattgcccaaaaccattcagccaattagcagcaaaactgacccatggatgccctaaagctagctgctgagtctgatgtccagactaggtttttggtcatagataccaaccctgcagcacctctagcctacggtctgcttgggaagaaaggtctggggtccagaaggtgagattcacagccagggcctgccagccatgtggggcaaaaagcctctcaggggctcccctttctaggttcagatgaagactgagaagaggcccaagctgctctgctcagggcagacatccggccaccctccaaaccaggacaggaaatctagattgcaggacattctgaacccatacaagaggagacagggcaggaagggcatgcaatgtccaccagcttcactacccatcagctttaattgggaaatgagcctagactgggaaaataagaccctgggcagggctgggctcccatatgctgtatttccccctccacaaggaggccagttcctctgtgtcttcttgctgtctgatgccaggctgtgggctttttaagagcaggagacagctgagtcttctctcatcccccttggatagacttttgggaagtgctgggtggatgggtgatgtaagtgaatggactgatggataaatgtgttgatgagcaatcaatgagatgagggataggtagggagaaggggggatggatggatgagtggtgggtaggtagatggatgggtggatggatgaatgagtggatggatggattgatggatgaatgcatggatgggtgtatggatgagtgggtggatgaatagatgggtggatgggtggatggacagatggatggcggttaggtggatggatgggtggatggatgaatagatggatggatgggtggatgtgatggttggtaaatggatggatggatgtgttcattggcggatggatgagtggatgcatggatatattggctggtaggtggatgggtggatggatgggatgggatgggtagatgtgttgattgcttgatggaatggaatggtggatgaatagatggatggatgaatggacgaatggatggatgaatatgtgaatgggtggatgggtgactatgaatttataggagtcttaaggcaggactgatgtctctaccttctaattttttgttcttgtatggcagcaagaggcaggaagttggccttggatccagtcccatggcccataccagtgctctctcactacctccagcttgttgagctggtctcttccacaactaccctcagccatccaggcagcattgatccatagacctcccaattagccgatgtcttttactgaaaaaaaaaaagagtatttgcaaggatagattgcaaggtctacaagactcacaaaccgtagagaccacctagttcagccccctcagtttactctgagaaatgggaagggatttgtcccaagtcaccccatgggttagtgacgttagaatccaggtgttccaatacctagctcaggaagcaatggttaagaggtttggctctaaagtccgacagaccaggttcatatcccagccccaacactcatcacctgtgtgatcctgagccagttacttaacctctctgagcctctgtttttcagtctataaagtgagcatatcattattgctaacatttacttagctaggctcaatgctgagtgctttccctaccttgctttgtatgacaacccacagagtgggtgacaccacaccccaatgcgtagataaggaccctgcagttggagcagttaagccacatgccgagagtacccgagcagatctgaggccaagccaggattggaacccagatctgtacaatcccaagcccaggcccaggtccctgccactcagggcagagccacacctctgccatgaggctgtttgtccgagggctgttgtgaagcttagacgaactgaggtgtgtacagcaccctgcacagtacttgacacagagcaggcaggtgctcatccatggcagtcattactctgtttccctctgctgctctttctgagctttcccctctgtagtttgctatgccagccactgtctttcttgaccctcaacatccccttcagatcagctggccaaataggaccattcccatctcgcagctaggaaaaccgcgctgcagaaacagaagggaacctaccagggtcgctgctcaccaccaagtggcagagctgggcccagagaattctggaggaattcaccaagcaggcagggggcaagagtattccaggcagggggcacaaccctgcaaaggcccagagatcttaagatgtgtagctcacttaggaaacatggtgatttgtggcctgggcatttctgcagggccagaatgacaagaggtgaggctgggagaaatggggggagccagtggtagcaaataagcccctaatgggctttctcctcccagcgctcagaagaaccaccccaggcacgggtggaggagggtggtgtgagggctgaggctgcaggctgggaggcctctcaggggcccagccccaccctgtgccccatcctttctgagaatggcagagccttttttctttccattcttatttctaatcatcagtaactaaacttgccctctgagggaagctgtgtgaatcatcttttagtcagaaattgcttccctgcctcagaaaccctggcacaccctcagattccctttgtggtctgcggtgctttgtacgtcaagacttccactagcagctctggctgtcctgctgctcctccgagccacagctgagctttcagatggaaatagctctttcctcgacctctggaggcaccacgcttccttgggaaaacatccccctgttctgcccatrtctgttctgtgtactggaaccacccgagcggacttacattttctacttcactagacctcttttagaggaggttgatactgcagttgacatttgaactattaaactgaggatgggcacttgcggagctgaactgttgggagtttatggcgtatttctgaaacataagctattgagagaaaaacaaatctccctggagcccccgaagtggttctgaaggaaggattccccctgcaggatggttttcctgaatagataagccaagcttcgcctggtgaagccccaggtccccagtacaccccattctacatggaggtggccacgaggccaataaccccagaaggsaggagggttggctgtgctgtatttcccataaatcttaaaacctagcagatagtagggagggccgaggagaaaggggaaggggggaagcagagacagcccttgaattcagatctcctgagaccaaacccagggctcgatctaatattcgagtgagcctcaaagtccccctaagccaggccataccctgagactgggctcctgccaagccaagagggtcagaaggtgtggaagatactggaagggacttagcagggcactgaggtccggaggtgggccctggggtatgtgaaacagcaggggcctgggtgtcgaattcaacaagggttttgcttttggtttttttggcgaacaccgtctctggaagaagagtttaaaggaaatcactccagatggggaattccagttttgaacagagctgttagtcctttcaccctgatatgcacacagtgacacatacacacacaccacacatacaccacccatcatgcacatacaacacacacacagcacatacaacacatacactatacacagtacgtaccatacacatacagcgcacaacacacctgccacacaaacgcacaccatgcaccacacacacaccaaacataccacagacacacagaccaaacacatcatatacacacacacacaccacacacataccaagtacactacacatatacacacaccacagacacacaccccatgcatcacacacacacacacacactctgcactggtgagctggggaaggctcctggggtctactctcccggagtgcagcgcctctgcattccagggggcttctgtcgtcccggacacccgcacccacctcctgccctcccccactctggggaagaccccagggctcactggccctgcacagccacctcactctcctcaaaagccaggcctttagaggatgattctgggaaccaagttctgccaaaatttcrtgscacctggggtcctgttggcagcaccccacacacaaacacaaaattattcattgattcactggacagatgttcactggaggccctatggcattggtggggtggggatgtgggcatgaatgaggccaactgccctgccctggtgactctgagccagtggtctctgccagggagagaggcaggcttctgggagaggtgctctgcgggctcagggcccagaccccctgcttcggctcctagccaagtagacctttccttgccatgcagccttgcctctcccggcctcagttgtgcatgactctaaaatgagagaaagagcagcccctgccttgtaggcagctgtgagcctatgataaggtgatgcacgtgaagaactcagcagagtggtgagcgcagagaaggcatttggggaaacgggcatggctacagctgttgaggttgggcctccaggcatcaggggagacgtcattgctgatgcctgtccttaaaggatactggctaggtcaccagagacagccaattagcataaagttgttttctaatggcctcttagaaaaatcatcacattgcagttactgccgtttaccatgctatggggttcgtttgggagcttttttatttttttatttttattattattattttttttccccaagatggagtcttgctctgacrcccaggctggagtgcagtggcacaattttggctcactgcaacctccgcctcccgggtttgtgtgattctcctgcctcagcttctcgagtaactgggattacaggggcctgccaccactcctggctaatttttgtatttttagtagagacggggttttgacatcttggccagactggtctcaaactcccaacctcaagtgatcctcccacctcagcttcccaaagtgctgggattacagatgtgagccaccacacctggcctgtttaggagctttttaagttattttttattttaaaaatttgcataaaatatatataccataaaatttacaaacttgaccattttcaagtatatagtagtattaagtacattcacattgttgtacaactcatctccagaactcttttcaggttgcaaaactaaaactctgtacccattaaatggtaagtttccattcccctctcctcccatgtctggcacccaccattctcctttctgtctgtaaatctgactgctccagtaactcataaaagttgagtcatacagtttctgtccttttgtgactggtttatttcacttagcataatgtcctcaagattccttcatgtggtagcatgtatcagaatttccctcctttttaaggttgagtaatagtccattgyatggataaatgacattttgtttatccattcatctgttgatggacacgttggttgtgtccaactcttagactttgtgattaatgctgctttgaacatgagtatacaaatatttctttgagtacctgttttcaattatttggggcatattccccagaatcagactttctggatcatatagtaatttcatgtttaattttttgaggaactaccatactgttttccatagtggctgtaccattttagattcccaccaatagtgcacaggagttcctgtttctccacatcctcaccaacattattttttgtttcttttttttttaacagtagccatcttaatgggtgatatatgctatggtttttcttaatcccatttttgcaaatgttatccrtaacgtgtagytcttcaagtcatcattcattgatcttagctccattcacttcccagcatcccaaaacaagagcacgaattgtcctctcaaaggtacgaccatggctgcacccagcattccctaaaggcccaacaccatgccaagaaatgtgctggaccaagctggaactggaatcaggggctctggggcagtcccaggcctgaccctctgcaggtccctgactaggagcaagtgccttttctccccagggcctgttctccgtccctcaaaacaggaacaataccaatgccttaactcccttacagagttggagccctggagataaaaaggctcgtggaaattttacagcaggagcaaaacttctgggtttgtcaggatctcaaaaagccagaagagaaaaggggagggtccctgattcttagtaatgcacgtaggcaatttcagagctcaagttcatggaaacaaactgaattacggaggaggcagctctgccatttgcaaccacggattgtttgaaatccttttagaggaaaattaaaatatttcacagagggtaataaaatcctgagtgttttgcaggcakgactgctcagctctcttgggcaaataagtaattaggcatttttatttaagtcctctgtgtcgtcattttctttcattagtagagggagaaaaaactgttatggaaaatacataaaactctggaaatcaacagaaagttaattataaaattgcaaatatatatgtgtgtgtgagatatatatatatatgtatatgtatatatatgtatagcacacaataacagcatactgcagagagaaagggaagatcttagaacttattttcccaaacttcagacatgggaagctgtgtcaaatattcctctgcttcttagtaaaacctatcaaagagcttgggagtggggcatttttcaaggcacaggatgccttaggtcagtatggccatgggagccggggaggtgctctgagccttgctccctatccacggcccccgtaccatccaccaagggacctgcagttcttcctcactctaccctccctcaccacatccactttaaggagagggttgatatttctctgagctagaaagcatgtgctccagcctctccatcttacagatggggaaactgaggacctggtttaggttcaaaggctcttttttttcctatgcatccccaggtctcaggaccactgcgtgtcaatgcctgtattccccccatgtgaatcgggtctgctctttgggcccgagccctagctgcagaagagggaagaataggccagggatacatccagttgctgacagagggtcctccctgtccctgcacagccagtccatgctgacatcttcctgagtccaccttcttcctgtctgggctgctcttttgggtaatatgagggagactgaggacgaggatgcagagggctccttgtgagaggttcatctggtacttcagggggacacaggcgtgttcatagctatttcgtcttcagaatctctctagagtttgggtttatctctgttgtctttcagcacccctgaagccagctccacctgagtcacctgtctcaatgttattaagtggcatgagtgggtgtgtgcattggggttggggggtgcacatgggagccacctgcaaatctgcactttcacagcctcctgtgaatccaacatcagtgcccatatggaggcatctcgtccttaccattaaccagtctcccccaccactcyggtctgcattaagccatctagcaaacagttaataagcacctgctgtgtgctgggctttgcactgaccctgagaacccagagaggaatagaattcagcttgtttacacaggggaagaaagacccacatggcagttttcaaaaacaaggagatatttgagctggtccttaaaggacaagaggaagtttgcctggcagggaagggagagggacccacctgggaggagcagcagaggtgaaggcacagaggcatgaaacagcccgtgttcgggcagccatgtgaggaagtgacaggtgctggggagatgcagctggtgttctgggagtctccaggacaggagctaatggtgttcacacggccctgcggcgggcacagggccagcatgaagcaggtgccaaagactgtgtgtctaatgtgtgaaggggagaaggaaataagggaggcactcagggaagggataagtctttgcagcatattcatatcatggcatctatagagcagttaaaaaggaacacactagagccataaacatgaatgaatctcagaaacagtgttacaaccgggcgcagttacagcygggcatggtggcttacacctgtaatcccagcactgtgggaggccaaggcaggtggattacttgaggtcaggagtctcattaggttaaactgcatgaacttgcccatatttgaccatttttgacattcaaaaatagcagtttccattggttcaacctaattgaactcatgagggacagtctgtctgtcccatgaaataccactcagcaatcaaaaggaacagattatcagcacgtacagcagcttgcttggatctcagggggattctgctgagcaaagaagccaagctccgaaagttacagactgtatgattccatttatataacaggctggaaatgatgaaagcttggaaacggggaacagattagtggttgccatggccagggagtcrggggaagagagaggtgaccatagctttaaaaaaagggtagtacaaggacccttgtgatgaactgtcctgaatcttgacagtggtggtggccacattaactcacatgtggtgccattgcatagaaaatacacacgcacacccacacacaagctcatgtaaagccrgtgaactctccacaagttcggcttccttgcgtcagcatctccatctcagttgtggtacttgtgttaatactatggtgatgacattgggggaaactggatgaagggtatacggcatctctgtattgtttcttattgcatgtgaattacaattatctcggaattaacagttaaatacacacatggtaatgattaatgctaaatttaagacagaagttgtttctgggacaaggagtgaattatgcagatggggagaggtttgcggaggggattcaactttatctgtaatgttttacttcttaaaatagaaaaatctgaggcaagtacggcataatgttaagatgytacaaagctggatgataggcacgtaactttgttacatcattctctttttcatgtttgaaataattcataatttttttaaaagctaatcttgcttcactcctttcacccggagtcaggactggacctgggatgcagagccctgagggtgcrggggatgggccaagggctccctgagggctcagcccccagcccagagaccacctaagtggcagtcccagagcctcagtggcagccagggcagaggctmccgacacaggccccaccaggtgccagccgctccttcctctctctgcagcccccagagaaggagggcgccctgcctcggcaggtgggcaacaagacggagtgcggcctgctgggcttcgtgctggacctgaagcaggactacgagcccgtgcgcagccagatgccagaggagaagttgtacaaagtgtacaccttcaactccgtgcgcaagtccatgagcactgtcatcaagctgcccgacgagagcttccgcatgtacagcaagggggcttctgagatcrtgctcaagaagtaagcgctgggcagggcaccggggctgagggctgtgccctggtgcagggagctggggatgtcagggtcatatagcactggccgccatccaggccaggctcagcagcctgcccggctggagtggccgtctagcacccagagccacagagggccctgcccaaggtcacccagcaagactcatcttcacttgcatgccccttggccactgtgttttccactatatcctcttaaacatttctatagccagagtcctcccccttctcctcyctaagccgctggttcatcaggaagttctactcattgtcacacttagatctctcttatttcatttcctttagcgtagagttggttgatggtagctattttcattattagccacactcctctgactccagaggagtgctggaaataagcctggtgaactaagcaaatcccttcccctctctggcctcagtttccccacttgtacattgaggcaattagtctagcccccagtggttctcagccctgggtacacattggaatcactctgaggagtgtttaaaaaaacattgattcctggattcaccccagacaaattgaactggaacctctggggcaaggctcrcacgtgggtatttattaaaggctcctccaagcaattctaatgtgcaggcagggtcaagaactactagcctgagttttatgtgctttgtaaaccatttcagctgtgggagtgttatttcagatgaatcttgtgagtatataatacatcaaagtggggctccgcttgctgagtggcctgggcaaaaattgcaggacgaatgcttgatttcaccctgcctgggggatgaactagatgggcactggatgaccagccacagctagctgggcatcacgagggtggggaggtggtctctaagcctttcagaaggagcattccytgggctccccatctcccttccatcctcccctaggtgctgcaaaatcctcaatggggcgggagagcctcgtgtcttccggccccgcgaccgggacgagatggtaaagaaggtgattgagcccatggcttgcgatgggctccgcactatctgcgtggcctaccgcgacttccccagcagcccggagccggactgggacaatgagaatgacatcctcaacgaactcacctgcatctgcgtggtgggcatcgaggacccggtgcggccagaggtaggccccagggccagcgagctcagggaaaggggatgaggctgggaggccagccaccagggtgacctggagtaagtcacttcacctctttgagtctcagtttccacayartgcccatgggratttccttccttgatcctcatragaggattgcccatgagaaacagtgtagaccacatgtggcatgggtcggcccagaaggacacagaacccacaggttgccagcaggyattgctctgccatgggggcagtcctcgagctgtccagccagccaccatgagctcttccctctggtcccccaagggacaggtgtaggggctgccctgccttagaaacctcttgccctgcaggagccaggatctcctgtaacaaatccacaaacatggattccagggtccctacaaaggacacacccaatagcaagggcattgcactcaggagaacccgaagtgtggtgtccctgtcagtatttatagttctcccagtgcagatgcagtttaccagccagtttaccccagcaagctggcctaggaacacagctgagagtctacttttatcagattcccaggggaacagagctagaaagttaaggtcacattctccagcagaagggaagggggctgacagcacccacttcacaaggatcaagggaggcgatgcctatcagtacacctagtggggtgctcagcacacagtaggtcttcattctcctttagctgaatctgcacctgaagggggaagaccaagaactcagtgctggagctgccggggtcaggggaggatgggatgtgtgtggtctgtggtgcttcccaggctgaagaaaggctgtggggaacagaggaagctgtcctgaatctccaaaacggtgcatggcaggcggagtgagtcagctcacactgtgaggccccaggggagcaccatgggcatgaggcagcgtgcaggaggggctggcttccacttcctcccaggactcactcagctgctaggtccagaccggatgccctggccaggccctggctgggtccagattggccttggctgtaagatttggtgctgatgctttgagggcccacctcctccactccttaatggacctaccctgacactgttctctgggggtctctggccatttgctactcctctctgagcctcagtttccctctctttaaggtaaaagggatagacaagatgacctccaagttcctggccctgatgttataagattctgcattccaaagaaaaatgaaactaggaggtcacaggcatttcacattttaggcagcagggagagggttcaaagtgtgagctcagacatcagacagatctgtgatcctgagtgccggcacagctggctgtgtgacgttgaaccagttacataacctctctgagcctcatctgcatactggggatrataatagtatcacacacaccccctctgggatatcatgaaggctcagatcatgcatctaygagcaacaagcagagtatctggtacaagataggcggcctacatacgtgggtccccttccttcatgccctcttcagtagatttcattaccctagatccagggacacgtaacagccctagacatacagcctagcctgccaaaggtgttcaatgagtgtttgcggaatgaatgaataagaatgaatgggactggaaccccaatcttccacaccatgcctagtgctcctctctctctctctctctctctctctctctctcatacacacacaccctccttgggggtgtcattgtggcttcctcactcctatcaagatcctaaaacagcaaagacaattaatgcccctggagcttggcagtggagcccacacgtgctttcctgcaaacctctctctccatggacagacaggccgtttatcagcctccctgtgggacacctgctcattaccagccactaatgggttcaggcctcactgtgatgtgttatctcgttactgaaaactcttcatccttgcacagcacttgaggctggcctgcctacaccctgtggctcccctgtccttcccaaccccacagcctcccccttcccgggccctcccagagctcctggctcaccaccctgccttggaaacatcccttaggtgaatggaagacacaggcaggcccaaactgttatttgaccatgacgcacaataagaaatgtattttatgtcatgactcagtaaacacacacatttcaccaaagcaagaatttcacaaaataatgggatgcacttacctattttctgttcttctatttctttgtttcttttttaaaatgttggtcaccacccactaaacaaatttcacgtcactaacagggcatgacttgaggtttgagtgactgatctagtccaaacaccttcccgcacaaaccccaatttccagaagaaaacaccgaagcccaaagggggacagtgatgtgcccaaagtggctgagtgaacccagattagaacaggttttctgcctccctgcctcagggcctttgcctggttgccacacacacacacacacacacacacacacacacrcacacacgcacaaaggaaaggacaagtagttctaagtcaagaggatgagcagacgaggacaaggatgagagctccccatgcccagggcctgagggggcagagctgggttcctggcattttctgttgacagcatggtcatccagagaagttagctgcaggcacagactctgggaaaggggggcctggagccaacccccaaccccgactttgccgctaacgagccacttccctctctgagcctcagtgttctcagctatgaaatgggaggtcagcccaggtgccccttgggtccctcccaagctctgacgtccccagagagagcgatagttgactggaagacttaccctcccatcttccctcacttccttcagtcagggcatccacatgggccacgctctctcctgttggctcacccctgggrtgtctatataggagtcataaactgtctcacagcagcaacttactcaagtgacacagcagactcaagggacatgggttctarttctgcccctgccactccctcacagatggcctcagtttccccacttgaaaactgagagaatcagactgtccagcattcacagtgagggacacagcagggttacaggtgacaccacgtgcaagcataagagctcagacgtgttgattcagcacctccgagtggggcgggatggatgcaggacccaaggagacgggtgggtatggctttgtttatttgtttgttttttaggtaggycattcctgccccctctagccccctggttcccacctcagaggtaaccactatccccagattttaggggcgaccttcagggaacgtgtgtgcttatggtggccgtgtttttgtcaagcaccccagagctctgtcctcctggactcgtccctttatgcagaattatttgtcaccctctgtaaatctcacaggtgaactcccttcctggtgcctccagcctaggaggctcagccagagggaaaacctcagcccgggccatctctagggtcctgcagacacattaagattcattttgcaactgcaagaaaacaatctttacctccctcrgtttccctggctgtcaaggggttgaatctccacattgccttcctcccacgagaagcccaaagggtagaacagatcaagacacccttgccagagcaccccactgccagcccttacagtgggtacattttccaaggctgattgaagtcagtgctgataaagccatcaggagagcagcggtctgggatttgccgggttatccgggggtgtttgaagccctcggagtcacagacaacggctgtcaccagaaacaacagatgtttaaaagcctttatttaatgaaaacaggaagcacccatttcctggctgctttccctcagtgagaaatatctaggataattttagcgaragaagtcattttttcccaaacttatttatttatttttaatttcacagtaattttatygatgtgggaagcatatttcaactggatcgatgcctctggggtttgagtcgtaatcatctccggatcctcagtgtccagagcagttagatgcgccagmgctgtttgtccaataagtaaatgagtgagcaacaaaattaagtcctgagagcagcttaagaaaacatcctgttggggtgcaggaatcaggaatggcttcaggaatagagagcatttcatttataagatgggaaagacttgacacacagaggctaagggaggaagggcattccaggcagaggggacagaatgagcagggcaagaaggcaggaagggatgcagagtggctggggcctcgtgaatgccctgttgcatttatgagagaaaagggaattggaaaaggtgtgcacgtgcccatcctgtgcgtgggctctgtgtgccctgtcatagagttcctcccagccttgctgaagggtggatactattgtacccattttacagatgaggaaaccagggctcatgtgagaccctagagcagagcccagcccagcccgttggtccccaagccctctctccactgcayagaagaaagtatagggtccgtaaaaattagcttcatttttctcatgaagccagcttgcttggagaggcccagaagatggctgattttggctctgggagacagtcttgaaagtgagagtatttctaaaacgcagcaccaatcacctcattcctggctcagaacttcccacagttcccagtgcctgaaggagcatatccctggtccagaaccttctgcccctctccaaattcatggtctccagtccctaccccacatcttccctcagcccctccagatcacctgcagcgtggccctcaggcccgttcatacctcaggccttctctgccagtgcagagtggacagttccctgcggccaggactaatctgtgttcatctgtgtagcctcagccctggcacaatgccaggaaccagagcctcagttggcagctcaaacatcccctcccccaggaagtcctccttgatttctcctccccacccactttcttctaaagcaacagtgccctctgtgctccttcagtagcacaaagggcactgaagcagcacaaaacccccttatactcagcagcacaaaacccccttctgtgttcccagagtcttttgtatagacctgtgccaaagaccctgcctccaaacagagtacaggtctgacacagggtgatgctctgctatctgaaaaaagaaaggttgtgttaaaaaatcagctagacttgttccacagtggagcagtgggcattagagggagggagcaccctgtcatcgggtgtgcaagcagaggctgaccagcccatctgttgaggacacctgggaacggatctagggaatgggcagagggtcaaagtcaatgacccaaaaccctttccaactccaagtcctccagcgtctttgaaaccaagaacctaaattcctccttttggaggcaggagccagataaggtgtgcgttcccaggaaacagcagctctttgctgttctcaggggcaggagacagcagggggccacagcccagtttacagccatcatgaggatgttagtaagttatataaacaagatcttggacattccacattcccactccctccagccctgtaagaatgaggtcacgtttgcttatgtgattagccgctgtggcacgaggcaggggccttgctcayktrgcccccaaaccccgagtgggcactggaaggcttctccccaggccctggaagtaagccccagaggaggctggtggtcagctggccctgctctaacccttcaacaacggggagatcactacctgccaccacagagccggtctcttagacaactccagtagctagagaggcctccttactgggaccctgcccctctagagcatccgttcctcacgccacaagacagccacgctcagaactgcgggtttcctcttgaaggcatcagggtggaacccctgaaagagagcagccccacaggctgacactcaggcaggtcactggtggccagggtaaggaaagaggggccaggcagtgccctctgcacagggtacacagggagggtagtgccctccccatggcccctgccctcctgcccagaggcaggctgggcaatgacccagcttgagacgatggtggtgggggctgaaggagtggcaggtgctgtgaatggggtggatacaggcgagatagtcaaggccgattccttgtttttaccattgctgaaggcagaaaggagaccccaggcaggagctgtcccagtcaggcttggccccaccttctaactctttgtactagttttctagggctgccgtatcaaagtcacacaaactgastggctcaagagcagtttgctgtctcacagtcctgaaggctgtacatctgtttgagaccaaggtgtcagcagggctggctctttccagtgacgayagggaggagctgtctctgcctctctctcagcttccagtggcttgctggccacctttggcctccttggagtgtagaagcagcaccccgatttctgcatggcatctcctttgcatatctttgtgtcgaaatttcctctttataaggacaccattcctgttggattagggcttaccgtgatgcgctcattttagctggatttaccactataatgaccctatctctaagcaaggtcacatacacaggtactggggcttagggctccagtctgtcttttggggggaatacaactcaatccatagtcttccaactccctcagcagtggcttggcaggtggatgctggagtgcgctcctggtcactgtggggtgtgcagggagggaacgtcagactgagcccttccaggctggagattctaacaggctgtggtcctcccaaacaactggatttcctgcccttgacatgttctctcccactgaaagacrttctgcagcaaatattattttattatttgtcactgccctcgggtaagaatcactcgttccattgatttctgttgtgtataaaggggtgccccagctccaggctggtttcctcggggaaaccctcagctctgctcagggccagctgctggggtagggtggggcggggctgggaagccttgtgccttctgattggctggctctgatccggcctgattgtcccagatatccgtctgtcattacagtcagagaggacagaacctatccttattattgcagagaaatggcgtattttacctgaagcataatcctttatacatattctaaatccgtgtcacattctgtaagtaaaatgcccccaaatgcaaatgtccccccaagaaactgaaaatacacaaatagatytgtcaagtttgcaggaactatgtatgtggatgaggcaaagagaagttcacctggccaagcttacctggggccagatctgaggaggcrttcatggaagtctttccaaagtcttcgcccaggtcgagacagccaatggttctgtctcaggatggaccgtcatggtcaataggtggtagcgacctgggactctgtgatgagaaccacatcagggtttaatcaaaggatgtgtgattgattaacaatgcctgccgttggcacaggaagggaggctgtggcccatatgccatgtgcgtcatcagcatctcatagtcatctagtcccctttcagtagagctgcctgtgagaagggctcctctggaatccatgaaggcagggggagtctgcctgaggtggtgccctcccccatggcccctgccctcctgcccaggtcccagaagccatccgcaagtgccagcgggcaggcatcacggtccgcatggtcactggcgacaatatcaacacggctcgggccatcgccatcaagtgtggcatcatccatcctggggaggactttctgtgcctcgagggcaaggagttcaacaggaggatccgcaacgagaagggggaggtgcgtgtcccaacgtaaagcatcctcaggggaacgcgctcagatgggagctgggaggtagggtgctgcatgattgtacagaagccagccagtgtgctgctaagagcccagtgactctgggcatgtcccctcccttctccaggcctcagtttctctccccgaccccaccgacccgcccccttccccatccctctccagattgagcaggagcgaattgacaagatctggccaaagctgcgggtgctggctcgctcctccccaacggacaagcataccctggttaaaggtaagacttgggcgggcacgggcaatcctgaagcccagcaccaggccagaagctgggccctcctctcctggcacttgcagcttcttcccagaagggaagggcccctcgcccctgactctccacacctgggcacagccttatgtcacccccttttcagccccaggagcctgcaaggggccagaaggagatggggctaagtcttctctgtgggcctccaactcccctaggaagcaatggacctgggcctgtgtggggtcccaaactcctggctcagcgctgaatggggcccacagacgtgttctatgtggccggtacagcgcctttttaaatgatggatttgaaagactacgcagaccctgctctctcaccyttgacatagtccttactgctgcttgttgtctgatactcagcctacttcactcgttctcagtctggtctcagagctttaagtctcttggtctgtctggtccctgaggcccccaaccaacgtttgtgaccaggacctcagggatgcgctctcctgggaatagccacctgagggatgagaccaaaagccaaagtcttgctcctccctccagagggagggcacaccacttgctgagcctaggtggccaggtcctgggcactttttatttttatttttattttattttatttgagacagggtctccctctgtcacccaagctagagtgcagtggtgtgatcatagctcactgcaacctcaaacacctaggctcaagccatcctcctgcctcagcctcccaagtagctaggactacaggcatgtgtcaacgtgcctggataattttttttaattctttatagagacagggtctcactatattgcccaggctggttgcaaactcctggcctcaagcagtcctcctgccttggcatcccaaagtgctgggattacaggtaggagccactgtgcccagccaactgggtatttttagagtcacgtggtcctggctttgccactgacctgctctgtggccttgggcaaatcccactctgggactcagtttcctcatttgtaaaatggctatgggagcagggctccactggagatcagccctagaacatcttggattcctctttcaaaggtgctgcccaaggacattaatggaagcagatctggcctggggagagaaacccagaaccccagaaccacaagggagcagaaggcgcycagcccatccttattcttattcattcactcattctctccataactgtttactgaggtcctgccaggtgccagccctgctcaggacaggcctggtcctgcccacgtggaattcatgggccaggctgcacgcagcaggcattgaataagtggtccctgcatagagcaaaaggctgcactgctggcatggggtgctctggacccaacactgcctctaacttggactagggaggctttaggtcacaggccatggaaggtgggatgggctccagggttggtagggcctgtgcttgaggcaaggcagggaactgctctgcaaagggctagaggcagaagatccccagatgccttcaaggatctgggccaggacctcggggtgggagagggaagctacaggagactggagcaggtgggagggcagcagatcctgcagggccgccartgcccaccacgagcaccccgtcatggcctgcaccgtgtcaccaggcacaggaacatgggagggtttagagggtagaagcatcattttagaaaacttaccctgcagtgcagagcacggcctggcagtggagggacctgtaggattgtcctgcttaagagttgtcacctgcccacagtggtgacacctcaagtggagctgccaggtgcgggtctgagaaagtttgggtagtggaggggtctgggctgggtggtggtttgcatgtcatggagggatgaggagcaggagggtctgggatcccatcagtctatacctgttggagaagagcattggacatcgagcgaggagggagagcaggcctgagacagagtcctgggtggcacatgtgggtggggagagaggagctgcagaagccaagagctgccsgagtgatggtgcaggctgagaacctacagaggaggccaaggggaggaggctagaggggcaggaggatggtcagtggggagtggtgccgggaagacaaggaaggaggcctgtggaggaggaaggtgtggtccatggtggaaatagttgctgagaggtctgcggggacagaacagaaatgtgaccataggaagcagccacagggaggcccctggtgactgcacacagtcaggccaccccaggactggaggcagggaggcgtctagggagmggtttcctcccagctttccgcacagcttgagctacncaacggtccgcaccacctgggagccacagggcagaaatttgacccgtccctgccttggaggagcccccaggctgactgagggaactatggaaactcaggcctaatgtcccaaggggacaagcttggggaggctgagtccaggacggtggaactgaggggtcaccgacagctgggtgggagcagcccagaacgattcccagaacacacggcactgcagctgggcctgaaagagggtagagctgcaagggagcaggttgggggcacagtgccccaggttatggaactcagcgcctcattccacaggctgctgccgtctgctaggcacagagcagagagatgcgcaaggatggagcagcacatagagttacatggatctgattaagggcaggcagggatcctcagagggtcagaaaggcttcctgggaaaagcagcctctgagccaaaaatacagtacaggtgggtgacaggagtacctccagccaagggaacagcctgcccagacacagggccagtgagagctagctctgtgggacygtaagcacagattgggggtggccaggggatgagagaagagaagaggtcaggatgtgagtgaggcctggtcacagaggacttcataagtggagctaagaacatggatgttatcctgagrccaaggggggaagcaggaaaaygacattccggggatggctgggggacggaactggttcagacatgggtgttagagagatcctgaggttgctgtggggaagcaagttggagggggagtccagagtcagtgagaggaaacaaagtgatgctggtggcagagggtggagacagagaaaaggaagggtttcagtgggattttggagccagaattggcaggccttggtgatacattcaatgtgcagaatgagagacccatggatgctgatacccaaattcctgtcgtgcccatggacatccctgctcgcaagccccatgaatgaggagtcccacaaactccacaggtccccaccgatgacatccttcacccacccttttccactggccccagctcagtgactggggccacatgtcatttgttcattctgttattcgttgaatgttttattgaagatgaatgtctggagggaggtcagggccagaatggtggggcagaggtcactggcaaatgacaaagccaaggcctcctcagcaagcctggactccccagggagaaagtgctggctagtggtgtcgggaggaacagatggtgaggtcctgctgaaaccctgggagccctgctgaggcagagggggccctgagcacagttagaggatacagtgtttctggttaggatggatgccaatgtggccacaggttgcagacagcaaagagggggctggagaggtgagcagggcccgggccacagggggccccaagtcggcaccagcccagtaaggagcccactgtaacctgctggcagctataggccagcctggagctgggaagagcctggatggagggggcggctggacagggaccagagaggaagccatgcccagccaggcccctcccgaggaccagggctggcccaggctgcctcccacctgagtggcccagggcctgagcacactcctgccccaacaggcatcatcgacagcacacacactgagcagcggcaggtggtggccgtgacgggggacgggaccaacgacgggcctgcactcaagaaggccgacgtgggcttcgccatggtaggaacggcccacagagggcctggggtggtgggggctggggagattggactacacaaccttgggctggctactcaggagccccagttcacacttggcccacccgccatctgccgtgggtgcccacccttctcgagactcagcctgaccccgaggtcttcctggaaaggcataggatgcttcttgctctgggggagctgtgtgaaggggggcacttgcaggctgaggaggaagataacagagggggagagggggccagggtgaggcttcctgagggtgaagggagctgggtctgtgaggagcgtgaagagtggggtgtccctgtgtggtctggctgtgctgggcccactgggagttgtgtaggactgaggaagtggagggagtgaggatggtgatgctagaagtggtcacctcccccggccaccccacccagcctcctgtccctgtccccacagggcatcgcaggcactgacgtggccaaggaggcctcagacatcatcctgacagacgacaatttcagcagcatcgtcaaggcagtgatgtggggccgcaacgtctatgacagcatctccaaattcttgcagttccagctcaccgtcaacgtggtggccgtgattgtggccttcacaggcgcctgcatcacgcaggtgggtcckcaggagaccacaccaaagcctgggggagggcggagaccccccacagaggctcgggggccttagggtactccaggttgtccctgtcagaacagccggggatgaggcacccatcgatggagcacctgctgggggccaggaactgcatcacagagctcaggtgcaggcactggccccaggggagtcgaggacatgaggctcagagaggtggcgtgacttgttcaaggtcacccagcaaatgggagctgtcaggctcacagcctgrccctcactgcaggaggcaggagagggaatcctcaagagaaggcagggcccttggccaccacgagggcagagggaggcagggaggggcaggccagggcccaagggggatcaggcatccaggtgaggacaaagagccagtgggggccctggggccctggctctggactggagtgtggagtgccttaggaggtgctaggtggggataactggagggagtcggggatcttgctcactgggaaggtcacagaggagtctggccagataccacgactgggtctggagcagccctatgcactgagcctggcaggcaggccccagatgtctgcagactgactgcttcttcatgcagctccatgaggtgggaactgtgatgatcctcattttacagaggcagaaactgaggctcagaggatggactggccagggacctgccattgttcttgcagtctcctgatactccccacaggggctgaccagcctggccagggaggcaagaatgggtctcccttagccccaggggatccccaaggcccaacactcccagtagccacctgggcagacaagcccatgcccacaggagcccccagaggcccagagtgcagcactgccccaagagctgtgtggcgctggaacactgctcccctctgttgcttcctgcgctgggggaatataggtggcagctccggctaccccagccctgagaatcggagccttgggagggtggctgggggcttccttttgctcagaagggccctctttcctggcctgtggatgagacactccctctagtggcagcttgaggaacactcctgcggccccagcaacttggaaaccagaaggtcttgatgccagatagggaaactgagattctgagaccactatcagtttgcctgaggtctttgattgagttggtggcgaggccatgcagcattgataagaagacgggcacacttgaccctgaggtatatggaattagagaaagcccggggtggggaggacgggggcaaggggagcgaggctgaggcaaggaggaggtgagagagaaagccaggagcaggggctgtgatgaaacctgggaggtgatgagtggaagggatgcaggtatatggggctttgggagagaacagaggtgggaagagcatcgggtttgggctgttgagcttacagggtctgggggcttcctggaggaggtgttccacaggccactagacggatgtaactaaagccacaggacgaggaggagaatggggctgaggcaggaacacagatttaaaaggaagggaggacgacgaccaggagagtggggtcaggattacaagtgggagtgcaggggcgaggtcagtgacatctggccgagaagaggtcctgcaactcgtggcacagaaggtgctggtgacgtgggcggagggcattctgggaacgtggaggggccaaagtctggctgctgtggacwagatacgtgggggtgtgaggaaggatggggacagaagaaccagctcctctcagccaaagagacaggtctgaaagggtccctcccagaacctggacagtggtgacctaaaagtggtgaggtccttgacaagttttagttgcttttgctattcctcatttgccaatatttcctaccttgaaatgtattaatttttgagtcatagatacgcacaataattttttaaggtaaggcgggataagaggggaggagacattgggggggtgggggacgggcactgtttgtaggatagaaagcccgagggggaggaggcagtggggggaggaggtaggagcccatgccggaggcggtgggaatggtcttggcctcagccaggagagaccccctcctcgggggctggaggggagaggggaagatggtgagatgcagctgaatttaccagaaggcagggagctggtggccattgggcctggggggactcacttatctcctggcagggaagatgtggctgaggtgggcaggtctgcactgttctccagagaaggcatcagagaacaactccatgcctgctggggagccaaggggcaggtcggactccagcctccagcaggagcctgcggacactacaccatgagcccgcccagcacttcacagcagcaggtgggcgcacaggtgacagccctctcctgcccgtccccaggactcccctctgaaggccgtgcagatgctctgggtgaacctcatcatggacacgtttgcctcgctggcactggccactgagccgcccacggagaccctgctgctgaggaagccgtacggccgcaacaagccgctcatctccaggaccatgatgaagaacatcctgggccatgctgtctaccagcttgccctcatcttcaccctgctctttgttggtgagcgcctygcccacccacgcctctcccaggcggggtcatcaccttctgggtgcaccatggctctcacccagcattctcgagtcacaaccccctcctgttttgctaatggggaaattgaggcccagggaggtcaagtaagttgcccaaggtcacaccagcaagtcttgaacagggcctggccctgtcccagctctggctaaccctaaagccatcagtggctttctccactggtgacagctcctggcaacaagtacagaccgtgcaaggccctgaccgggtgctgaagcactgcatggcagccccagaggcacctgaggctgggaggggagtgactcaccccttctctgacccattccagcaccttatcctggccccgtggaagggaccctcagcaaggcttcctggggcagggcatacacgctcacaccaccaccgaytctcacaatgcttccacttgggctgcctggttgggtcttccactcagtgaggcaagcacatttgcctccaccccacattacaaacgagggcaccaaggctcagagaggtgaggtgacttgcccaagggcacacagccagtctgaggaagagtctgggcacagaaccaggtctggctggggccaagactggcctggtttccacagatgcttcggaggcaatcccaacaaagcctatccccaggtcacagatggggaaacagaggcccagagaggggaagggtctggcccgcagtcccacatggaatcagggccagttctctccttacaggagcctcccggagctggcctttcacttgtcctcaaagcccagagtgtgatggaggtgggcatggatccattcctcaaaggcagttagttgccttttataaattttgaaagtagtgtgttgtcaggacacattttactgttgtaaaacttaycatgaaaaagcttagaggaagccacttatatgcagaactagaagagactcagaggaggtggaggggttggagaggagaggagagcgggggtcctggtcggcttgctggcttgaccacttgagcagcacctaccctgggtagtcttgggacatctcacacccagaaarctccacaagcctcctggcaccactttactcagctgtgcaaaaggacacaggacttggccaggtgcagtggctcatgcctgtaatcccagcactttgggaggccgaggcgggtggatcacttgaggtcaggaattcgagaccagcatggccaacatggagaaaccccatctctactaaaaatacaaaaattagccgggcgtgatggtgcgcacctgtaatcccagctacttgagaggctaaagcaggagaatcacttgaacccaggaggcgggtgttgcagtgagctgagatcacgycactgtcctccagcctgggcaacaacgagactccatctcaaaaacaaaacaaaacaaaacaaaaaggatasaggactgcatcagacaccctatcagcagcgtctacacagcagtgccctgccatgtgacagctcaggtgttagaatgaagccacatgggagggtccagagccagcctagcccagaagtcctgggctccatataggaattggcatctctagtaacagccccatgagcttgtagaggtctcagcaagggacatgctcaggaacaagaagcagcactctcggggcagcgcaaaacctcccgcaggtatcctgtcctcgcagtccagaatgagttttccagtctgaggtcactttttagaagccatgtcgcccacctttaacacagccggccgtccacctttatcgggtytccacagaaaaagtggaagacagttgcccaaggcctttcttccccagaggagaaagggctttgctgacccttcagtcctagtctctgaccagctgacagcmcagccctggccccccactgtccaagcatgccttgatgtcttggggattcacgtcactgctcagaagaggcccccacgaaaggccaggcatctcccctctgattcccccaccactgccttcagcccagccccactctctcacttggcaggcgagaagatgttccagatcgacagcgggaggaacgcgcccctgcattcrccaccctcagaacattacaccatcatcttcaacaccttcgtcatgatgcarctcttcaacgagatcaacgcccgcaagatccacggcgagcgcaatgtctttgacggcatcttccggaaccccatcttctgcaccatcgtgctgggcacctttgccatccaggtagtgaggcccccaccctaaccaggccyggggtgggcagcaagcggctggagcccctgggcaggrccctgagagcccagccctctgtgctggtccctgatggcctctctctctctctttctctgctcccctgtgacctccagatagtgatcgtgcagtttggagggaagccattcagctgctctccactgcagctggaccagtggatgtggtgcatattcattgggttaggagagctcgtttggggccaggtaagttcctggtaggtcgcaggaggtgcctgttagcagggcaagggagacagcactggatggagaatccaggacccccaggaatgggctgccagaccccaggcaagctcctccctatctctggacatctgagcaagggggyttgtcccaggtcctatactggtcgtctgggtactactgctctgatttttgccttatatctatctaccactgctcctgttgtttatgtaatattttctctcaatcacgtcagcttttttaacttaaatttgtttttaaaggcaacgtcctgttactaagacaactgaaaaatcagtatcacttgtcataaatggaagctaacaaaaacattaatgtaatgagaatgacattattaaactccagctagaagccatggcctgccagggattcaaggctggagcagcttgttaggaagggagatgaatcagtggtctgcgggcgctggtggccggctggcgtcaatcaggatcctttagagcactcagagggaacgcaagcaggacacactctgccacattgcggtgttactcagtgctgtgcctgtggccatctgtggcctcagtgctgtgcctgccccagctctggggctccttgggctggatgctctttaggggcccttccagctttgtcccagaatattctcccaccaattcgtttttctacgtttgcccaagttccagaccctgtcacagctctgagagcatgcagcccaaaggctcctgacccaggacacagggcttgggaggagggcccagaaccaactmagggcctaaggggcctgattcccaaggtgctcacacatccaggcagtgggaccccatgggtgggaggcatwtttcttgccttcaagctgtctgcaggctagagtgagaagctacgggggcaaaaattaactaaaagataaataagaaagtttagtttcatccaaaaggacttcctgtaacctttggggctgctttggagagtgataaacccctgggcaccctgggggccaggccatctttatcccactggggcccaccccctacaggaggctcttgggggctgggcccagtaactgagggaaggattcagaggacaaaggttaatgccagcgggcagtgctgactttacactcccagggagccccctgaggctgcattcatgccagcgcctgactgctcctacaggaaatggaaggggcctctgatatctgccaccgcagctttcctgtagggcctgcgtctgggtcctcagccccatggacaagccttttggggaagattaggaatgaaggcatagctctttcccattctgccttcccagtccaggattggctgccttcagggtccagtgacctcaggaggaataagggacagaggaataagtaaccccaggagaaccgagggccagccacgggccaggctcatgcaggacgagttagaccctccaccgtgcccagttctcaccatgcccagagcggcccccactttacagctaggaaaaccaaagctcggtgaggttaaatgacttgcccgaggccacaggaccagggttgtctggggtattcaaagccacatctgtccaactcctagaggccaagattgtccactatgtaccctgactctgaatgaatgaattaaaaagcaaattgcactccagcctgggcaacaagagtgaaactccatctcaaaaaaaaaaaaaaaaaaaaaaaagrcattgtcaaagactgggctgaggaacaggtgaggtgggtgaaggagtagattgatcacatgcctgggtgagcgggtaggaggagggaggtagaggagcgggtgtcagggagagaaggccactgggaaggacagccccaccgtcctgacagacagggtcccttgcaggtcatcgccaccatcccgaccagcagactcaarttcctcaaggaggcaggcaggctcacacagaaggaggagatcccggaggaggagctcaaygaggacgtggaggagatcgaccacgcrgagcgggagctgcggcggggccagatcctgtggttccgaggcctgaatcggatccagacacaggtacaggaggctcttgggggctgggcccaggcctggccggggcgggccaggggatggaggtgagtgtgcttgtgctgccccccagggcccagctctggtgctgagggagggtggctacagaggggtcccggccagctctcaccagccacttgcacacccactcctgtggctgctaaggaacagcacggcctcctcagagaggtcccattgtgccctctcagggcagcacggggaagyggtaggggtcacacccaccrtggtctccagggggatttccctgagagggtggggaagggtggctctgagggcagaggtgagtgaggggactgtcgctcagggctgggggcacccacccacaggggccgtgtgaggctggacagaagctgcaggccaggtcgcccagggtcccccarggcstggtggtcagggggtccgccgcctccacgggggcttcagttgctctccccagcttcccctagggggtggagaggctstggggagcaaaggtcagtcatcctcaagyacacacagacacacatgcacacaccaagcacaccaggggagcacaggtgcagggcgtagccagccagaagcaggtttcttccccagagcagagagagcatggctgccacgtggcacacgacacacctgcrcgcctccccccgaccccccacacacataccacatgctctcacatggtccccttatgcctggagcaggtgttgtagctcacaagtgctgtcacagccctgcgaggggagggtcagaagggactctgtgggtctcttgcccagaccatctggggagctggagtgggagctcctccatgccccagcatgcttgggcgaagtgcagtgtagaagcagccacctggccaccatcctgccagctgtggcccagcacctcatttccatccgatgtagcagagagctcacctgggtcacctcccacccctctgtaccctgtcccaaacctcacctcatgtgaccttcacagccctgggaggtagatgtgactcccccagttttagaggttaccaaggtccaggagatggccccttctactgagctggcacagctggggtggggactggaagccggtttcagacccggaggtgcctgacacgggcctgggctcaccctccctggttagggccccgcagccacccctcccagcctgcccccacctcctgggaggtccaggacaactcagtgaatatgtccctggtgctgtcactgccctggcggcaaagccacgcaggggtctccagattacgggaggaagcaaggactgcgatttcttgagtgggcaggggcgcctgtcttgcctgcctcttgcggaatgctaacacgggtcaggtgctttgccacttacagataaccctgccaggcaggtggcattgacccttcttaagaacaagaaactcgactcagagaggtggcttgcccaaggtcagctagctagtaagtgacagagctggaatttaggccaagctctgtccacctcaggacccccaccacaccctctacctccacgcctgtacctgagggaggctgaacactgctctcttccctccagataccatgtttaatcactgcctcccccactggccagcccactggcccctgagccactagcacaggacaaaggccggaccccctgtgtcctcccggggaccctggggcctgcaggtgggcccagagctgagcagacgtttttcagagccttggagtgtgtctggtatttttgttttgatttaagtgacattgtcgttgttgccgtggctgcggctgttcttgtgacgttgccctgtcagtcatgtagccgttgtgctcgttcttctcgcaacttgtctcgttctctcctccgttgcagattgaagtagtcaatactttcaagagcggggcctcctttcagggggccctgcggagacagtcctcggtcaccagccagagccaggatgtagccaatctctctagccctagtcgcgtgtcgttgtccaatgctctttcctctccgaccagccttcctcctgctgcagccgggcgtgagtgtgactccttactgcctccggctggcactgcccacgccagctcccaggcgggcaggggctggggcaccagaggacatggggggcagccggtcacaatcaggcccagggggatgaagggtcccagccaccgaagagggtcccgttggtcaggagagcrtagccagtcatgcggtggcagtcactcagtggaccagggtcagtcagagggtcattagggtcccaagtggccaaaaagtctggttcagtcaaggggtcacccttggtcaagaggacatcagtgaccaaatggtcccaayccaccacagggtcccggcagccagagggggacagacatggaggggacacagagtgtcccactggcctagggtcatatgtggtcaggaaaagccyggaccaccaaggcaagggttggagttggacaagaggtcccagtcttgcagtcaaagtcagcagaagggtcactgtgggtcaaggggagcaagccccttagggtcmcagtcagtcacattgggatccacccaggagagggtcacgtcaaccagactttcccagttggtcagggggcacccacagtaatgagggtcatggtcaagggggacagttgagccaagaggtcactgcaggtcagaggtcatagtcagccagggatcccaggccacctaggagctcacagcctagacgctgcaccccagcagttcagagtctctgcccgcttcctgtcactcctccccttgcacttttgactgcatcagctgccctgcagacacctttccctgtggctgagcttggaacttgctgaagttctaagcccttcctggaaaggacaaggtccctggcccattcagcttgacccctggtagaaaatggtgggtcgagcctcacatcttgcctgggtgccagcaggcccagagggacctgatatgcccttcagcatcctgccctcctttatctgagagatagcctgggactgtggcccctccttcatctccctcctgccaagctcatctcctcatgccaccacttctgatctagatcactcattgctggctttgtctagctctttcccggacccatggcttcgggccccayrgggaacaagtctgtctttcctcccatcgccctgctatgtttccagtcaggcgcttctgatctgcaggggagcccctggttctggtcttctccaattggcatagtgtcagtcttagcctccagcttctttgatgagaagtagactccagctcaccccttgaaactttataaagggcctctacccccatccaaaaccagaacacccacaacacaaccccctgcagccaagcaggtaacccggtgtgctggtgggagcgcctccctcagtgcctccagtaggaggcgcgggccacagggagcctgttgatggcaaatgtccacgacccatagcggcaggacagaagcagaaagcagggaaggagcctctcagtgctcattcgtcagcacagaaacgcagtgctggggaggaccggggagccaagatgaaatggagatgcatttcagcagatggtggctgagtcacatttccatgagataccgtcactaggcagtcactgccaggatttctcggggaaggcaacacyggtcccatcctcctcccctttagaccrgagagctctcaccttagcagcagcctagccagctgacctcccagctcctttctgcaccaactcagctctggccttgctcagcacccccacctatcctgaggtgcggtaaccaagtgtcccggcagggagagctacatggggaagaatccacttctgttctgccacccctcccgatgactcctgcggccctcyggctggggctgcctgctagcagtctggcttctgggtgaaggcccagttctttgtccatcccagytgagcctctttcttgaagggcagcacttcaccctggccacgacggagcacacctgacatcgctgggcagscccactgcctttggaagtcgtccycgagtcagcccctcatcttagctttcacagcctggaagctagagctgtccgctcaaacctcagccacttctttctcagcttttcttctgcctcayttgcaaagccattcaatagggcccgtccgggaacaacacttctttgcagaaatgcccttttcttcatttctgcagaaatgcttagacaggaatgtgtctacactgacctccttcgaggccagatcagtcccctgtagcccgtggttaccccaactttggaacagtcttggaaaagaagcccaggcagaggctcagccaaagccaacttgacagtccttgccctgacccctcattctctcaggggacccggcagggttggccagggcctccccaccctgctcaccatcttgcctctccctcttcatgcctcctggagaatctcgcattccccctctgtgacagaatccagcctgtaattctgggtscctcctgagacccttcctgagcctatagtcttaaaaagagcckgaccaaacccctgcctgagggcactggttcccagacaggatcacagcctctgtggtttcagtacacacatttggacaacacagcctcgtgcctcctttgcttgagtagtgtctacaacagtgctgcctcctctggtctccaaggactctgaggaccctctaaacaccagccaaggtccctgcagaagccagtgtgctttcctcccacagggaggtttaaacaggtggccaggaagtgacagaagggccccaatttgatgggatgaggaagtgggccgccccactwccccacaactccttcacccccaccgcaccccaccagccttctragggggatctgcttcctggggactccccagcagaggaggctgcccatgtgcctgctgaggcaaaaacacctgcagccagtgtgccctggaaggagtcaatccactgtcccctgggttatgaagagttgaccacaaaggcctgggacagggcctgacttctgacctgggacactggagtgaggaaaacccctgaacacatcgcaggccctcccctccccacggcaccaccgcaagatgaaggcctcagcagacagacgcacatggtaagcctgaccgcagtcacaaggcacatggcacgaggatgctcgggagggaatgaattggtgcactcttctgactaactcaaaaacgaggttgtttttgccccggaaacttaatggcacgtccctattgccttatacctgagccccactcaacatttccagagcagttccccactccctttacttcacagatgcctcaccactgaattgtgggaggggaggacctgccaacacatccatttcgcagagaaagacactgatgaggccagggtgaccacagcaagggcgtggcaagaggtcagactccggagtccctcattcttcccactagtcacaccgcttcccaggaggcccacagacctggagccacagaggctgaacttccattccggaaccagtgcccacgccyacagcctcatatcgtgaaaaggagtcagtcctccagggaaggccagggaagctgtttctcagcttgaacttctaccagcgtggccaagactggggagaagggcaccttcccactggtgrtcaaggacaagattagcatcccacacttcgatccaaggcaaagccgcacagcctctctttctcattgcctcaaattcctaactcatctcaaaccatctttgtgcttagcaagtctgtagcaggctccgtgtttatcagtggaagtcctgctctttcaaaccacccaagccaagagccagccccataagccaggtccaagccacattctggacgccgtaccttgctagacagataaggcacctcctgctcccacttcccctgcagattcctggttctgacgactcctagggcaaggagtttgcactgttagggggagaaatgaagacaacaaaaagggaagaaagctggacttctcattagcgttttggtaactaatttagtgcaaccttgggttggcgagaaaatggcttgctttgtggggggaaccctagacctctccactgtctgaatattccatgtgtttgtttccctagagggctagagaaccctggacacagagttcagcaagagagagtgaaattaaaagaggttgtgagtctttaaccttgagcctgaaatgaatgtgaatcaatcccagactcttggcttccttgaagccgggtaaacattcgagtatgtagaacccatctcagaccagggcctgtgcgttttctcagagccctctgacaacgggcatgggtctccctgttccctttgtgctgacgaaaccaaaacatctgaaaccccgctcaccaggtcccttcctctccttcccctcacccccacgcccaaatgcagcttatgccaaaaaaaaaaaaattcctacctttagggtaggcagggaggggagatggaagagcctttttttttttcccatagttttttccatttcagcctcggagagaaccgaagtggagacttgagatggccgtggcggggtgtcccaaaaagtctcgtccccacagtcttgtccagagcagttcattttttctgttgtctccatgccacggggagggcggaggggcctcatctcattgtgtgtcatcccctctgcgttgtcagtcacatgacagggtcctgccaccatccccctgccccacacatacactaggtgttccagtcagcatctgaattgcacttcaacctcagaacacactgagcaccaggctaggcagctacagccttgatgctattcccattctacaaacaagaaagctgaggcctgcagcgccttctttgttttcagttaatcaaggtgtaacggctcacttttcaggagatcagaatatgaaccatctctgcagagccacaaagagggactccagggggaaagagctcagagcagccacagtggccatgatggagcaccagcatraaggccgtgtctggctggctcttatttggcacttgttgcctcttatttaaagcacaattccagcaagtggggtaccctggagtcccagctcacagtatgcaaggtgaaaggacagaggtgcttttcagaaaacagaaaagtcagcactaactagtaagcgatgactgacagcaagggagaaaaaacaagacaatccatggggtcttacctaagaccaagaaggataattgacaaagcttatgttaaattcttctctgtgcactctaaattagaagtcagaggagcgtatgacatgctttagaaagaattccctctgcaacagtaaaacaaaccttcagcgatgacacttaaaatcatcaaccacagtcacctagaaactccacttccataaaagagggctttccccaccakggtttcacaaaggagctacccctgggttccgctgagagctcaagtcctgggacttcaggggcctccccacgaccgtctcgtccagtcccctgcctccccgcaggcctgtggtgcagggcagccactgctctgcaggtgggtgccacttggcctgcacacagcagccgactaaggctctgtcctggaggcgccaacgccrccttgttttctccacctctgactccactccgagttggggctgggacgagaggaggaggcacctttgtcccaagtcccatcagactcttgagatgacaggcactgctgcccctcccaggagtccagagaagggacacctctcttccaagtgagggtcccgtccctctgcaccctgtgaggcaggacagaggacaaccagagagctagtgtggcttgtccacagtcaaggcaccagatgtggcagagccaggatgcaagttgggtctttctgcctccaagtccagtgctctttccactagccttgaagactcaatgaccagcctcctcccattcttcagcggaggaaactgaggccccaggacgtgtggttcacaactgagacagaaaatgaaagaacttgctgttttgtgactcagttccacacaccccagaatcccactggggctgggtttggccatctgattccagcctcgttttttggttttgtgttttcaaagcacaaataaagaaataaacaaaatcccccaggaaataagagaccccaaagcaagctccaataactggccggccagggctttgagtctatactcgagtgtttacctcccaaatgcatgaaggaaagaaacgctgggtacaaacgacctccgttcacattgtccaggcttccaagtgtagccgtgtgtctgtctgtgtgtgccatgtggctcccggcctccccgtggcatgcagcccgcccccgaatgtcatctgtccgccagctcccatgtgctttctggctgcctctgctctgcacctcagaaagccctgggttggctttggtttgctttgctgcctttggtttgatgttcccgttctgtttggccctcatgtgtctctctcatcccaactcatccaaccgtctctcctttctgtgccttttctgtttgtgacacgtaacatgttccatgttgtatggtttcttaactgtgtgtggttttcctaagatgaatttttttaatagcctctcctctttcctacttgattcccacctggtcctcctccctgtctgcatggttgaacctctgctttaaagtgaacaaggctcagtctctcactaggtgtgggtgcccgcaggagtcgactgtgcttcctttaaccactgttccccatcatctctttgatggtgcttggtgattcctcctgtcctaacactagtttctaccaaaaccaaagagatttttaaaaaccagctcaaggatgcctataacctgagccccctttttcactctcccccatcctgtcaatgctaataacacccagcgactatggattccagccacctgctttgccctaacccttctcccacccgcccctcctgtgagccccccgagcctggctgtggtccctgggcagtgctcctgacccctgtgcttcccttgcagatccgcgtcgtgaaggcgttccgtagctctctctatgaaggtttagaaaagcctgaatctcgaacctccatccataacttcatggctcatcctgaattccggatcgaagattcccagccccacatccccctcattgatgacaccgacctggaagaagatgccgcgctcaagcagaactcgagcccgccgtcatccctcaacaagaacaacagcgccatcgacagtgggatcaacctgacgaccgacacaagcaaatcagctacctcttcaagtccagggagccccatccacagcctggagacgtcgctttagctgaggaccctstcgcctgcccgcccgccctcatggaccccgctgccacccgctttccgggcacccatccatccaggcacccaactcacccaagcagcaacgagcaacaatcggaaaccaaatactggagagaaaaccaacgtttccacccacagaccctttctctggctgcgatgctgtttgaactctttttcacttcaaggcaaggggcgggatctccactgggggcttacgggagtgagcggttttcccaaaacaagcccttcctggctcccacccagacatggaccagccatgcacccgcccagccaccacgtcccccgcatgaatgtactgtacactttcaatcctccccttgtttggtttttgggggttggggaggggtttttgtttgtttgtttgttttcttaggcgggaactgcaaacagactcttttctgagactatttatccaatccactggtctgtgagtttttgaaatgcttgcacagcatggtctcagttgtatagattaatttaataactttttgaaattgcagagcttaactcgcctagtagatttgcaccaatggaaccgaagaacttcatagacactcacaaggttatatccatttctttgtatctatatcaacgtatacttttccgagactgtatacgtccatatagataggtagatatatatatatatatataaatatatatacatggatatataaagtttctttgccggcatgttgccttgtttccgcttaaattgctctattttaacttatttatgtcctaaaagaagaatgtaatttgtttacaaacctgtagataacgtctttggctatttgtatggtttaagaacactggtggctgagatgctataaaaacagctcggcccaacagacacttcccctgggttgcatcctggatgttttatgatagccatgctctgatttttgcctgctatttccgttcaataatgtcactaccgtgagaggctcaggcagaagccaaatgctaccgagttgccatcctgaggggtttaacaacatgctccgtagacgaagggagaggaggagagaaggcttcctgggtttgcaacactaacggccatccggcccaaggatgccaggatctgcaaagcactgctcgaagacttttctctcaatgaaactcgcttgagtttactaagagcatttcaaaaataggttctctttggcactgtctgtacagagattgaggtagtgttgaaatattataaatggtattgtgttgatttttttttttatttagtaacttacaggtttgtttccttattaatggcagcatcygagctgttggcatattggatgaggatcagtatggcttgctgcttttatttttatttttgaagaagaatagcctttttctctgcactatttagatccgaatgaaccttatgatgtgtatattgagatgtactcagtgtgattttaaaccaaattgtcttcctgtagtcacaatatatactgtagccttttaacagcaagtcttgctttcccaaacagaaagccattctgaaaycctacagtatcacaggtgagaaaaggtggttattttttccccaagacaacagcactagtaatcccacttaataagagcttatttaattggatgtcagcctcttaactgctaagcactttgtgggtctcagcgtttttcataaaagaacttttgtatttaatacaaagtttgctttgagacttttcagcatatgatcttttttccataaacttgtacagtgcaaaagacattttgaataccatgatcgatgatgtcccatgcttcgaggaaaaccaaacactttccgcctctcttgcaaaatccattcctcatgctgaccctcctcacgatggctgtgtcagcccagccccttcccttctccaggcccagakaactcttccacaaacaagatgagagccactcgggaaaagagccatagtcaactgggagggcctacatctggatggcggtggaaaaacttgagggtttggggttcaaagtcagcccatcccacctggcaaaatcctcctggaaggaggaccttcaagagcgcatcacctgaatgtcgtgaagaagtatctctgaatgtatccaggagaggaactgcataaccaaaggggtgaccagccctcagatgtgcttattggattccagtacaaacgccaccaaagccagcccactgctctcctacaaggaaggaaagatctgcacgtgtaaaacatggggcagccttggaacatggtgttttttggagtttcctttctcacagttttccatctccccacttctttgatcagtcatgtgtccgtgacctcgttccatgacatcaggatagctgtgtttgcacaccatgctscatgttcattyggagccaggaggggttctcagtggagcctggcttagggaacagggagcgatggaagaatgccaacattagcgttggtcttctcttgtcaggaatgaaggatgcttgcacacatgcaccccctcactctcacacttgcacacatacacacacacacacacgaaatggttggtttgtcaaaactcactgtagtacataaagcttgcactctgygtcctatatctagcagcatggggtacgtttggcagttcactccattagggggtaaataatttatgaccattcatctgtttttatgaatttttttatctagacaataattgtaaataaagaactcaccatctctgttcatttaatactatgcaatggttatgctttcaatcgctggctcttctgactcgtgcagtgtggttctgaaatgtttgtggtttaaaaaaaaaagcaaaaaacaacatcaaacagaacatagtaaatatatctgtaatgtatacttttttctactttgggactgcatcatccacatagcttcttttctgtcctctagacaagggctccaggagtaagtggcagatttggttctgagagctaagctcaccaacttgtctccccctcaacagatgagggaagggcagggagcccgttcagtgactcctggcgctgcagaatcactcatctttggaggtgagcagagagagctctgaggagtttccttcttgcaactcaggcggagctttctttaactcaggagcagcctccattgctcccgccaacccctcaccatggccccttgtccccttgtcccaaccatagcatagagatgacaagagagaggcagtcctatttctgagactggaccaattaaaatgactgcactggctcaaggactctgaacctgtcttgtcctgggtcctccagttgttggaagccactcttttccccaaccatgctgaaatgccacctttaccacacactgatgtcttacatagacttagatctatttctggaacttctcttctcttcgcttacttgggtgtctcatctggcaccagccatacaattttaactattgtcaatttctaatgtcttattatgtggtgggatgagtcccttcactcttcttttacaaaatttcctagttattctctcacatctattcttccacataaactttaaattgtgcccagtcctccaccccctgtcccattcccacccccaaattctgggctctgtcattccctgtgccatcatcttccccccattgtaattactgtccactcagggctgtgaaatagactatgttctataaagagggacaaaaagggcatcctgatcttgagagaagcctgctgttcctcccatcatttcacctgccccctaagcccaggagttgtcatgagaggtcaccaggcccccactcaatctcagcttgggaaccaaagtcacccaccttggttgtgttggggtggacccgccatctgtccctggtccagacgagaaagaggagtctctcctaggcctggagctgggaaagaatgtgtggcccagttgtctgcacttctaattctcatcatggagaaacctttattcctatctccctttcctgaactggttttttgttgtttttgtttcattttgttttggggggatagtttcttgctctttaatttggagtctccagtacctttgggatgcaggcagttcttgcctgggccttctcggaaccctcactcccctagcccactcttgcgctacctgcaggaggctgccaacctggtgcattctgacaagcctcccacccaaatctctctcctgccattgtgtccaaaatcccaccattagaggctcttgtagggaagagcgtttcttgaaggcttttaggccttccagagccaggagggaagtcagacaatagcaggaagtccccaggccttttcaaagttccaaaccaagctctcctgattttaatgtagagatcataccaacccaggtgggggaggagggtccccagccccaggcagcagccatcaccccctccactgaaaacaatattggaggctgctttgggactgcccttctcagccccctaagtctgttttgtaatgcctgtggtgctctccctcctggacctttcctctcgggggtcaccacactttgctaactcttgtgtgcacatattttataatagagtagcgagggaatggtgccgcctccagcttccgtaagctgcccgggctctggggggctctgggacaatcggggctgggaagtgactgtgctcttattgtacactctttatttctstgtatctttggcttgtgctctttgtaattaatgggatttgtctgccttttcaacactatactgagcaataacaataaatgcacacgtggaaatgcagacacggtacacatcacaaggcctttttctgaaggacagctgggtccccgcccttcgtggagttgaactcagggggaaactgagtccctgggagggaaatgcactttgcccaagggcccacagctcagcgggcagtctctctccttccactagatcacaccttttgaacacccaccatttgagggagacaggctcaccctgccatgagccattaacctatgaggaatggttgaccatctcatagaagaagactggggaacggggcctcaggacgaagcggaggaggtttgggggcaaggggtgggggggcaaaaatcagggaaagttggcctgatttggggtctggattaaccagagggaggagatgcggaatacagacactggatctaggtggcacccccctactggggagaggggtaaggcagagggaagcctggcacctgaggagtctggacttcacaaacctctgctgaacattggcagagaaagagaatatgcccagaccaacaagtaatccctaaggttggcccaagggttgagagttacacacacactcacacactcacacagctcttcttaggttgaactgatccccaaatcaagcgccataggcccatctgacttccatacgcagtttcatatccaagggttcatttaatcccaatatcaaccttcagaggaggtattattataattctcactcaaaagagcaggagacagcatctcaaagaggtgaagagcatgcccacctggtaagcaggagatccagcactgatacctagcagtcttgatgccagcatctgtactctaaactgccatattacagcgccttatgggccaaataccttacagcaaataccttaatgaataagatacagttctgttgcttgtcacaaatccccaatctcttcaacatcagtgtctacacaaggaaattcttttaatcacaattatgcctgatgcattatatttacatctaatatgcccttgtcctcattttccactcaaagaaagtgaggctcagagaaaagtgacttggccttatcacctagaaagtcagtggtgcagctatagagccaaggccagagcctgttccttgaagaacaggagatctggcaggacgcagcggctcacacctgtaatcccagcactttgagaggccgaggagagtagatcaccagaggtcaggagtttgagaccagcctggccaacatggtgaaaccccatctctactaaaactacaaaaattagccaggcatggtggcacatgcctgtaatcccagctactcaggaggctgaggcaggagaattgcttgaacccgggaggtagaggttgcagtgagccaagatcataccactggactccagcctgggcaacagagctagagtccatctccaaaaaaaaaaaaacaaaaaaaacaacaggagatccaagagatcccctgaaacctgcctttgttccctgctctaacctaaccaccaccccctcacacccctgcaacaatttctccactagagggcaataaaaaatcttgaaagctgcagtggggtagaagagttgcccagaggcctggcccttaattctaacaccctactcccctggcctcccctccaaagctccttgacagtttgggtctatcacattctctgagccttaacatcttccttcaagcagtgaccatctccagctagggtccttactcccagtttcagcagaggaaactgaaggactgtgacttgcccaaggggagccaaggcctcccccagctcatctgcctccttaatgtcacaaggggcccagggctagaccatatgtggctgaggcggggagcccaggctctgtcctccagtgtggcattctcactgcgcttgtggggagccttcagctgccctaccttgtgaagccagagacctggggttggggaccctgaggattaggtctggggctctagctgcaggagcctggctgagatccttcattgcctaggggggtctccttgatgggacttactcaggaccccaggggatcggtttggaaggggcagtcctatataggggttagggatggcagggccagaggtcccagcctctggcgaggggcattccctggcctcctctgccctggtcccagtccttgggtactgagagggagactacaacaaggaagcactaggacagtctacttactcctaagatgtcactcatcctacaacattcatcataagaccagtcgcacccagagccgtagtgaggcgggtgaagctgcagatagatagatgatagatagatagatagatagatagatagatagatagatagatagatagatttttttcttttttacaagagtgtctctctgttgcccaggctggagtgcaatggtgcagtcacggctcactgtaacctccacctcccgggttccagcgattctcctgcctcagcctgtagctgggactacaggcgcgcgccactatgcccggctaatttttgtatttttggtagagacggggtttcaccatgttggccaggctggtctcgaactcctgacctcaggtgatccaccccccagctcagcctcccaaagttctgggattacaggcatgagccaccgcgcccggccgatagttatattaatcctttctttcatttatggatctcaggaaaagggcagacttggtcgggagagtagacccaccagagcttcagattccaaagccctccgggtcagggtaactgcggcaaccagagccccagccctctggtctcgcacgtcactggaggataggggctgggccacgggagggcggggcgcgccctctggaaggcgcggaactgctgtgcgagccgagcgcgttgctgcccggaggctcctacgccacggcccgtcgggcccggcgccggaagtgagctgttccgaggcgccgccgggagctgccacgtccgagacctggagcagccaccgccgcaatcatggtgagtgttggtactgaggaggcctagcagggtgaaggccacggtcgcggccttcacgggttcctcggccgtcctgagtcccaaatcccaagctggagccgttcagctcccctccaccgcttagagatttggggggctctggccccgtccttgcggaccattccgaggggagtccagaggtgaggccgaggaacctccctgactttgcggggcgcgccgctcctgcgtctcctgccagtctcccttccttcttttcggtcaacaattgaaaacaaaacgaggaacagcagaggagctactgtataccgagccctcagcattgttcgtaatctccgcctgctaacagccttgtgaagaaggtgctattcttctcaacactttacagatgaggacacttgaggttcggagacgtggagcctcttgcacagctgcttaagtggtrgtagagccgagatttgaaccctcctaaccattcctttctgccgcctactgcagctcccagcagagatgattgaactgttgctcggggtagggcccccaggtaggatgggcacctcgggaaacgtaaagatggcctgaacgaccctccgaaggcaggggctcagggttttttaagtctctgtggcatctgcagtgtacattcactccacacttactccttgagtgaatgaatgactgaaggagaactaaagaatggaagtatctgggctgagcctggaatatctagtacatgcattcttttagaaacatgggtgtgtctcagcagcaggtttgagggaacctgcaggaacctagaaatcagaacactgtgttcttgttctgcagagggttaggtgtaaatcactcacctctggctcttccactgcaggttagagttgaggcttttatgctctgacattcagctcatcctaaatgaatttttaactcattatctgatctcaaagaggtgaattattttgagtgcaggtgttaacagggaccagataataccaggtccctgggaagaagta

SEQ ID NO: 94091 - DNA, 15204 bp, Homo sapiens
gctgtcacaccagcaccgggtggcctctagtgggagggagggattccttgttcacttttgctatatccagattatagcccaaagaggaaaaatgttggaaaacgtagaaaagtgcatgagagttaaacattctattgcctttgcattgtccgtgaagtcgtaaaagtaccgatggattgtaggttctagtaaggcagagagttatgtcataatagctatcatcattaaaagaatgtttaataatttaatagaaggaaaaaggaaaacaaaaatacctaataaatacaacagaaaacaagaaaggagagaaaaggactatagaacagatgggacaaatagagaacaaatactgaggtagcagatagaagccaaactacatccccagttaaatttcatcgagtggagtaaatactccagttaaaggcaaaccaatggttgcagtagacttctaaaatcctcctatatgttgtttgcaaaagatataccttaaatataagggtggatatcttaaatataagggcacaaaaacgttgaaaatgaaagaggaaaataatatgcaaatactagttaaacgaaagcatattcaaatgaatattgaacaattgtactcttgaggcaagaagattttgggagatgaggaacatttctcattcaatttcaaaggattgaaactatggagaagggaggagtgtcgctccaaaatgtcttccttcccgtcccactcacagcagggacgaaggctttctgtggcagccatggccacccagaggcaatctcccttgctcagccgccacaccttctacaccttcagggggttcttccttctccatggagtgcccgtcagattagatacacaaggaaggctcacttccagctcagcagcaaatcttcagtatttgctacctataaactgatttatcagtggtttttgctagctaatattaaacttatatttttattcataaagttatttttgttcataaagttagattgtaagccttctgaagcctgtaattatgtctcctagggcattcagaaaaatccctggacttgtgcacacttcataactgctgaggacactggacttaacatctttaaaacctttgaagtaatttataaaataaattatagctccacagaagttgtgaaaagagtacatagggtcctgggtacctcctgctcagcttcctccaatgatggtatcttacctaactgtagtgcaatatgaaagccaggaaaatgacattcctacagtattataagccctatgccatgtgcaccacgtttgcatgcatgtgtgcatgtttgtgtgtgtcctgtgcaattttgccccttgtacaggttcatgtgaccaacactacattcaagttacagaactattgagccagcacaaagagttccttcatgactcctttatttatttattttttcagtttttagggtttttttgttgttgttggttttgttttttttatttgttttgttttgttttttttttgatggagtctcgctctgttgcccaggctggagtgcagtagtgcaatctcggctcactgcaacctccgcctcccaggttcttttttggaggcagggcctccctctgttgcccaggctggagtgcagttgcaagatcttggctcactgctcactgcagcctcgaccttctgggctcaagcaatcctcccacctcccagccctccaagtagctgggactgtaggcatgcaccaccacacctggctaattttttttgcatttttttgtagagatggagtttcaccatgttgtgcaggctacaatacccctttatatttgcacccccaactcccagtccctggctcctggcacctacaatgttttccatctctcttggtttgtcattttgagaatgttgtagaaatcacacagtatgtaaccttttgaggtgagctttttccactgagagtaatgcccctatgatttttttactgaacacaattgcctttgagatctacccagattgttcgtatcacggattgttcctttttcactggtgagtagtatttcattgtttggatataccaaagttgaacattttggggttatttctaggttgttacaattatgaataaaagcactctgaatatctgtgtacagattttggcgtgaatataagtttttatttctctgagataaatgcctaagagtgtgactgctgggttgtatggtatttttgtgcttcattttataagacatggccaaataatttcccaaagtgtctgtgccattttacattcctactagcaatgcatgagaggtccagcttctctgcctcctcaccagcatttggtgttatcactgtgttttaatttagctgtcttaataggtattgaaggaaataacgtatgtggtggtccatttccaagacaaagtacctcgaataggcttgggtctgcaaaccaccaaagaacagactacatgaggcccctactttgatagccagcacctgcttgttggggccccttagttgccctcacccaaaccaaagaagtttagtctagaaaaaaagtttactagcctccaaaatagcttgctttatctattctcatcaacttgcctacctaggtcataggtcaaatatttaaaaagcccctgagctaactataactgcaacacattgtggactgcaacagaatgcagtgaggtgaccctaaaaatatacctaaaagcccctattcaatgaccaataggcaatgtctgggaagattgtgaccccatagtactcatcttatgaggaatcaggggagggacccgtgcactaggggataaattgcttatggtaaccgtgttgagtgtgcctgtccaccaggcccccgatcttgcaagactgtcattaaaagtctcgcttctgctgctctctgtgtctctgagtcccttctttaggtttgaaggggtgagtttgtttttcacaacttgggggctcatccgggatatctgtgcctgcatggagtgggactccagcctagaggggagatgcgtcccacccactttaggtggcccactctgtctgggcatagcagctcctgcagaagtcgtagacaaacccaagactgttattcaggaggcagtggagacgacacagggtcaaaagcaggcactgcagaaaccaggcaaccttttgcactagccaaggtcggaaaattggactgtaagtattgcctgggtggtggggcatttttggaggtcaagtgtgtgtgactgagatgtgtcttagatacaaggcaagtgtggagtcccaatctgtggttctgttctcccacaagggaaacagccagagatggaggaagccattctcagcgtgtgcaagaaagctcttgtagcaggggctgcataccaagggaaagcacagacaaagagacgaactgaaaattctaggcctagcgaacaaaggaaacagagaactaaggagactccctctgacattcccacggatagtctgttggggagaatgctgcaggtttggagggacaaccctcaaaccagggacaaggaaaagcaaaagatgataaagattgctgtcttattgggcccaaatatcccatttgtaagcctttggtcttttggcctaagtttggctcggatgaggattgggtgtgccaaactttaattccacatatgaataataaaacctcatcctcacaagaaaagatgggttatgctctcttttgggtcagggaattagcccccatgttcctcctcaaagaaaaagaaaaagagcatagtaaagagccctcacctgataaaaagccctgggatgccctaacacacttgcgtacccccctcttcccccaccatacatctcacaaaataaggaacagggagatcaggggacagcaggaaggctggaggaagagaaatctgggggccatgaggaaactaaacccactgctcccttaaatccttatctgaacttaaggaaagaattaaagcaatgtaagaagaacattaagaatttccctattcactctaaacaggagatgtccaacatgattcctcttaaagaaggccctgtgggactgggagaagttggatttatgagtgtgcctttaacaagtactgaggttaggaattttaaaaaggaaatgaggccacttttagaagatccccttggtttagcagaacagctaaatcaatttttaggacccaatttttatacttgggctaagataatgtttatcatgaatatcctgtttactgaagaaaagagggcaataattagaagggcagccatgatcatttgggtgagacagcatcctcctgggcaaggagtcctactggctgagtggaaatccccaaatgcgaatcctgaatgggataacaatgaccccaggcatcaggcccaaatgcaaggccttagggaactaatcagggggattaaagactccgttcctgggacacaaaatgtcttgaaagcatttgagattcaacaagaaaaagaggagactgcctctgcatttctgcagaggccctgggatcaaatgaaaaaatactcaggaaatagatccagaggacccagtagggcaaggcgttttaaaggttaattttgtaactaaaagctggcctgatattactaagaaactacaaaacattgatggatggaatgagaaaccgattgaggaattactgagggaagctcagaaggtctttgtaagaagagaggaagagaggaagagaagcaaaacagaattcaaaaatcatgttttccactgtagaggaagtaatcagaaagagattagatcaagacccctctcagaggggacaagataatactaggtctcagcaaagagactggaggcaaatacaaggaaaaactcccaagactgtaagtggatgttgcaaatgtgggaaaccaggacatttttttttttttattttgagatggaatctcgctctgttgcccaggctggagtgcagtggagcgaactctgctcactgcaagctccgcctcctgggttcatgtcattcttctgccttagcctcccgagtagctgggactacagtcacccgccaccacgcccgcctaatttttttgtattttttagtagagacggggtttcaccgtgttagccaggatggtctcgatctcctgacctcgtgatccacctgcctcggtctcccaaagtgctgggattacaggcgtgagccaccgcacccagctgaaaccagggcattttaagaaagaacgtccggaatggaaaaaggaagaaaaggtaatccccattatgagttttaatgaggactgggaatcaggggttccttctaaccaggtcccacaaggaacccttcataaacttgagagtgggacccgaaggggaaaaaatgacatttttggtcgacactggagtggcttgctcttccttaatatacccaccaaggggcacataccctctaaggaaaagttaacagtatcagagtaaaaggggagggatttcaagttccaatattcaagaaaatgttaattaggcaggaatcagaaccaattaaggagtcactcttacatgttcccaaagcaggaactaacctcctgggttgagacctgattgtagattagatttagctttaggattaggagtagaggagggacaaataaaactaatgatggttctcctaacagaggaggaagaaggtaagattaactcccttttgtgggttaaggaaggcaacgggaggattaaaaaatcacacccttacagaccgaatgaaaacatccaggagaaagagtttacaggagacaatatcccatacccatgaagggaggaaaggtctccaaccggtaatagaaggacaaattaaagacgaactatcgagctgggtactcgggagcctgcggccaggtgagtgtgggcggggcggcaaggcggaagctccaggcgcaggcggcggaagcgcgtgtctccaggtcgtcgcgtcgggctcctgggatttggcggcaactgtgggaggatggcagagtcctcggataagctctactgagtggagtacaccaagarcgggcgcacctcttgcaagaaatgcagcgagagcatccccaaggactcgctccggatggccatcatggtgcaatagtccatgtttgatggagaagtcccacactggtaccacttctcctgcttgcrgaaggtgggccactccatgcggcaccctgacgttgaggtggatggattctctgagctttggtgggatgaycagcagaaagtcaagaagacagctgacgctggaggagtgacgggcaaaggccagaatggaattggtagcaaggcagagaagacgctgggtgactttgcagcagagtaggccaagtccagcagaagcaagtgcaagaggtgttatggagaagatagaaaagggccagatgcgcctatccaagaagatgctggaccctgagaagcctcagctaggcatgattgacccctggtaccacccaggctgctttgtcaagaacagggaggagctgggtttccagcctgagtacagtgcgagtcagctcaagggcttcagcctcctcgctgcagaggataaagaaaccctgaagaagcagctcccaggagtcaagagtgaaggaaagagagaaggcgatgaggtggatggagtggatgaagtggccaagaagaaatctaaaaaagaaaaagacgaggatggtaagcttgaaaaggccctaaaggcccagaacgacctgatctggaacatcaaggacgagctaatgaaagtgtgctctattaatgacctgaaggagatgctcatcttcaacaggcagcaggtgccttccggggagtcggcgatcttggaccgagtagctgacagcatgacgttcggtgccctccttccctgtgaggaatgctcaggtcagctggtcttcaagagcgacacttattactgcaccggggacgtcacggcctggaccaagtgtatggtcaagacatggacacccaaccagaaggaataggtgatcccaccgagaaatctcttaactcaagaaatttaaggttaaaaagcaggaccgtatatttcccccagaaaccagtgacccagtggcggccatgcccccaccctccacagcctccgagcctgctgccatgaacgcctctgctccagcagataagccgttatccaacatgaagatccttactcttgggaagctctcccggaacaaggatgaagtgaaggccacgattgagaaactcgggggaaagttgatggggacggccaacaaggcttctccgtgcatcagcactaaagaggaggtggaaaagaagaagaagaagatggaggaagtgaaagaagccaacatctgagctgtgtctgaggacttcctccaggacttctctgcctccaccaaggggctccaggagttgttctcagcgcacatcttgtccccctggggggcagaggtgaaggcagagcctgttgaagtcgtagccccaagagggaagtcaggagctgtgctctccaaaaaaagcaagggccaggtcaaggaggaaggtatcaacaaatctgaaaagagaatgaaattaactcttaaaggaggagcagctgtggatcctgactctggtctggaacactctgcgcatgtcctggagaaaggtgaaggcagagcctgttgaagtcgtagccccaagagggaagtcaggagctgtgctctccaaaaaaagcaagggccaggtcaaggaggaaggtatcaacaaatctgaaaagagaatgaaattaactcttaaaggaggagcagctgtggatcctgactctggtctggaacactctgcacatgttctggagaaaggtgggaaggtcttcagtgccaccctcagcctggtggacgtcgttaaaggaaccaactcctattacaagctgaagttgctgaaggatgacaaggaaagcaggcattggatattcaagtcctgggaccgtgtgggcacggtgatcggtagcaacaaactggaacagatgctgtccaaggaggacaccattgaacacttcatgaaattatatgaagaaaaactaggaatgcttggcactccaaaaattcacaaagtatcccaaaaagttctaccccctggagattgactacggccaggacaaagaggcggtgaagaagccsacagtaaatcctggcaccaagtccatgctccccaagccagttcaggacctcatcaagatgatctttgatgtggaaagtatgagcaaagccatggtggggtgtgagatcaaccttcagatgcccttggggaagctgagcaaaaggcaaatccaggccgcgtactccatcctcaggtccagcaggtggtgtcccagggcagcagcractctcagatcctggatytctcaaatcgcttttacatcctgatcccccacgactttgggatgaaggatcctctgctcctgaacaatgcagacagtgtgcaggccaaggyagaaatgctggacaacctgctggacattgaggtagcctacggtctgctcaggggagggtctcacgatagcaggaaggactccatcgatgtcaactatgagaagctcaaaactgacattaaggtggttgacagagattctgaagaagctgagatcatcaggaagtatgttaagaacactcatgcaaccaaccacacacgatgcatatgacttggaagtcattgatagctttaagatagagtgtgaagaggagtgccagcactacaagccctttaagcagcttcataactgaaggttgctgtggcatgggtccaggaccaccaactttgctgggatcctgtccctgggtctttggatagccctgcctgaagcacctgtgatgggctacatgtttggtaaagtgatctatttcgctgatcttgtctccaagagtgccaacgactgccatacatcttaggaagacccaatagggttaatcctgtcggaagaagttgcccttggaaacgtgtgtgaactgaagcatgcttcacatatcagcaagttacccaagggcaagcacagtgtcaaaggtttgggcaaaactactcctgacctttcagctagtatcccactggatggtgtagaggttcctcttgggaccagggtttcatctggtgtgaatgacacctgtctactgtataatgagtacattgtctatgatattgctcaggtaaatctgaaatatctgctgaaactgaaattcaattttaagacctccttgtggtaattgggagaggtggctgagtcacacacggtgactctggtattaattcaccctaagcgcttctgcaccaactcacctggctggctaagttgctggtgggtagtacctgtactaaacctcctcagaaaggattttgcagaaatgcattagaagctttttcccaaattttttagtctcttgttttgtgttgtgtttgtggggaggggttgtttttgttttttcttgccaggtagataaaactgacaagctggagagagattctgtttgcatggattagtcctctggaaaaaaccaagctgtgctacaatatctgccttagtggtttccccagggaagaaaaaatatgtttccaccctttttttttgtttgtttgtctttagttttgattttggaaagatgttaagcatttatttttagttaaaaataaaaattgatttcatactaaaaaaaagatgggttattgaaaccctgtatgtcaccatacaatactccagttctcccagtaaagaaaccagatgggtcatacagattagtgcaaaatctaaggtctatacataaaattgtccaaacttgacatcttgtggtgcctaacccctacacccaccttaataaaatactctataaacataagtggttcagcatagtggatctgaaagatgcattctggccatgtcccctagactctaagagtagggacctctttgcctttgaatgaaaaacctcataactgggagaaagcagaggtatcactggactgtgctgccacaagttttcacggaagccccaaacttacttggtcaagtcttagaaaaagttctggaggaattccaaccatccaaagaaacccagctgttacaatatgtggatgatcttctaatttctggggaaaggagggccgaggtatcagaagccaccataagcttacttaatttcctaggggaaaaggggttgcgagtctccaaaaccaaatcgcaatttgtaggagaagttaaatatttaggacacctaattagtgaaggaaagcagagaataaacgcagagagaatatcgggaatagtgggtctgcccttgcctaagacaaagagagaactccaaaactttttaggtttaactggctactgtaggttatggatggactcatatgttcaaaggacaaagattctgtattttaagttactaaaaagggaacccaaccccttgcaaaggtccccagaagaaattaaggcagtggaggatttaaagcaagccctcacacagccccagtcctggccctcctatctttaaataaaacgtttcatctgtctgtaacagaccaggcccttggggtgctcattcaaacctggtggggtggagggggtgggcgggaaagaggcaacctgttgcttttatctccaagcttctcaattctgtctcaagagggtttataattgcttatggaagtatttttagaattgttgctttaaaatcatgtcagatatcatctcagtgttcacatctgtattggttccctagggctgccataacaaagcaacacaaactgtgtggcctaaaacaacataaatttattctctcacagttttggaggccagaagacagatcaaggtgtcagcagggctatactctctccagagggtcttccatggaagattgcattcattgctttttccttctggtgactgacagcattcctggacttggggctgcataggtccagtctctgcctccatcttcatatggccttctccttttctctgactcaaatctccttttgccttcctcttatggggacatgtgtcggcgaatttggaacccagggttatcaaatctcaaaagcctcaacttaattacatctatgaagatcttacttcctagtaaggctgtatttgtaggttccaaaaggtggacatagcttatctttttgtgggccactgtttcaacccactacagcatctgtttattgtcttttcttattcaagttgcaatcatcctagttcctggtatattcagcagttttgaaatcatgccccgaacattttcagcatcatgttgtaagactgtgggtcctcttcagtctttttggacaggcacttacctgtttatgcattgcatgtaggcatgggtgggggtggatgttcagttccctgctgggccctgccagtatgggaaggaggtggggcagaatttggctgtgactggcattgccactagcattgctccctcattgccactgggtgaggatgaaaatttggctgccaaggacccaacatgttgattcagctgttttttgatactgtcacttagattggaaacatttttatgtgaccaaaatattaaattattaaagttttagttttgaaaattactgtaatgagagatgttataagatttaggggtagaacaggaaaggaaaaggtcaagcacacttgttcaacctatagcgagataatgaaagagaatttgtatattttgtcttttatatggcttggctgtttccccacccaaatcttatcttgaatttgtagctctcataattcctatgtgttgtgggagggacctggtgggagataattgaatcacgggggcagtttcccccacactgctctcagggtagtgaataagtctcatgagatttgatgacttcataaggggttttccctttcactcgttctctcattctctcttgcctgcggccaggtaggacatgcctttcactttctgccatgatttgaggcctccccagccacatggagctgtgagtccattaaacctctttttctctataaactatccactctcaggtatgtctttatcagcagcatgaaaacggactaatacagtcttatctggggtcagtacggtgtcagagcattccctgggggaaaattgattccatcaaaatatcctgattggcaaacaatgatgcggtcatgattttaagaaatttagtggggagattgtggcttctggattggaaggcctgggctggaatgttgatccccactgaccactggccacatgatggtgtgacggtgagtaagttgttggttatctctgagtcctcagtcttcctcatataaagtggaggtgatgtctatctaacagcacttttgtgaggattcagtgatgtaatgtgcatgggaacaattcatcaatcacaaaaaatgtttcttggaagtcaagtataaagccaaaagacaaagaaaataattcacattgaaatagtcactttttgaaatatccagttgttgaggggagagctgaggaaaaactaaaaattaaaaaaagaacaacaacaaaaatgaagtccagatgtggtggctcatgcctgtaatcccagcactttgggaggccaaggtgggtggatcacctgaggtcaggagttcgagaccagcctggccaacatggcaaaaacctgtctctactaaaaatacagaaattagctgggcgtggtggcgggtacctgtatagtcccagctacttgggaggctgaggcaggagaatcgcttgaagctgggaggcagaggttgcagtgagccgagatcacaccactgcactccagcctgggtgacagagcaagactccgtctcaaaaataaataaataaataactaaataaacagtgaaatatccatttgttgatccatttattgataaacaattatggaatggtttagtagaaataggatagtgttgggcatcagaaatatttgcatcctgccctgctaccgacttactggaagggcgaacaaaggactgagggattcgaatcagagactgtttttactggaatagcccttccaggcctttcatgcaaccccttgtgtccagatgagaaaactgaggcagcgactagtgactcactagttactgagtaagtcagtagcaggacatcatggaaagaggtgatgggacatttttgtcttttcagaagagagcacagctggaattacaaataaaatggcatcatttgattccatttctaaccgcctttgaaatggtgttttggaaagaacaccaatccattgctaagactgtccctagggaacaaaagttctctatctagagatgttctaagatacgatcatgaacttctcctgcctttctggagaaatgggaaaaatcacacactttaatgtaaataacaccccccagcctgatcatatcaatgtgttgaacagaggtaggtacagcttgtctacagccagaaccagtttgcatacaaaaacttgcaacaagctgacagttgctgaaagaaaggttcttgtttcccagagaatgttggtgagtcgagtcctttgcaggtgaaatactgatgacagggtttatctctacaagtctttgccagctccccaacgaccttccattctctcttcaccataactttttcccttttgataaactggaatttcaatgcattgaaaatttcttgaaagtgagtcatttcctgggaattggaaagcrttttgttttttgttttgttttgttttgttttcctctgtagagactttggtttccttcagggctgacattcaaaatactgttaacaacctttgagtttggcccctggtcgtgactagcctgactacacagaggcagaatatgagccctggctttctgtgacactcaacccagacactttggtaatgctgttccctctccacaccacaaaagcgcaaagagcccttgctgagcaccaggaggcagtggtgttctctgtgtgcacacatattctgyacctgtgtatgtgtgttttgcaatgtgctgcagtaggaaagggtgagagggcagactttcctagactctgttcttagacataatccatcacgggctgtgatggtgaatcttatgtgtcaacttgactgggccacagggtgcctgtgatatcctgagatattcagtcaaacattctcctgggtgtgtctgtaagggtgttttgggagagattcgcatttgagtgtgtagcttgattgtagcagacgggcctccctagatgggtggtgggtgtcctccaactctgaaagcctgaacaggacagaggctggctctgctctgaatacacggaactcctcctgcctgcctgcagctgggacatgggctgtttcctgccttaagactggaactgaaacattagctcttcctgagtctccagcttgtagactctgcaggtcttgggacttgtcagcctccataatcacatgagccaattccatattataaatatctcacacacacgcacatacacacacgcatatattcacacacacaaatacacatgcacacacacaccacacatacactcacgcacacacatccacacacacgcacacacacatgcacacgcacacacacatgcacacgcacacatacacgcacatcctattagtttccctagagaacgctgacaaatacgcaggctctgaggttatgtttcttcaaagcttatgctatcagacaatagcaagcttcgaatgctgttattttccagagttaattaggttttcatctctttttattaaggaaaaaaaccatgttgcctctaacttaatatttaaatatgtttattttgtttgtcatccttagaataagacagttttcctttatacagaatgttccataattcggcctctgccccaagggtgggagtgagtggagagtgcaggctctgccggcggccctagtcctagcctggcgtggcgtccgcctgtagtaactggctctcagtacactttcatgcagctttctcttctgctttagatgatctcctgttggaaagaacagagtttcttgagaaactgggtgtttcattaactgttcttagagcctatgtttcagacccaccgtggctcactccaccaataagcatgggctgtgaggctgacgggtgtggctggtagcattagactccccttctttgagtgtccacgccccacacagatgccttcttagggctgcacagggtggccttccccaggtgcagggggtgagtaccaagcgctccctgt

SEQ ID NO: 94092 - DNA, 65026 bp, Homo sapiens
  misc_feature (1)...(65026): n = A,T,C or G
attattatcaattttatttttttattgaaaggttttcattagaaagagaaatgttatattatcagaacaggaaggcagacaattttgagatgagtcccataatttccttcctgcaatgccttagtacacataaacctgccacaggtttataggttgatattaaatgatcctgtgaatagtgagaacagatcaagatagagggatttttgcaaagcttttagtgcttcccagcatggatttagtgcttatgcctttcagtcttagtgtctaataggatgcagcactttgggctttctaatatttcttgctctccagaaatcttgccttatatcctgcctcttgtgaccctcttctcttgtctartgggggattggttataaaagctgtgagtcaaaccagggatgaccaaaacagccccatacaaatagcatgggaagttgagcaaggtaccccatcagacatgagaatttgtccaaataaggaacagggagatctcactggaagtgacaagaaactaaccatccttttaccatattgagcatatgtgggcacatcgcctaggcttattgggagggcggtctagtatcctgatggcatctataaatacaaagctcacatctgaaggtaggttggatcttcttgaatggggaggccatgcctagtttcagtaacccagaggaaggacgtgaatttaggaaactagaactgagggagctcagattctgttggtctcacaggtcaaccatggaagtcacaggcacccctggccagtgggtataaataatagtaaccatcatgagaaggtagaccaggaaccaggaagaacccatttattggttcaacaattgaagagaagtaagctgagttgtaaagatcaatgaaattgtctctttttcttgtccttttgtttcctcctgtcatttatccaattcttatatgaacattcttactctgatcagtcggtctacagagaatcaacccaagagtcctccgtccagtataagaaaaagagagggaaacagtgccccgttagaccaatgtgtcaatggtaggatcagacatagatcccaaaggaagtgagtcttgggtgaaagccaaggccgtatggaccacccagtgccaactctgaggttctgaactttatttttactaagaaaagtgcaatttcctcacagcactaggcaaaaatggaaagctatcctggcacacaagtatagaatgccaccagagacaagcagctggaagaaaaagccaggccaccagcaacagagacaaagaactgtgagcttgagaggctatggcagatggtgagggaaggacagtgagggagaaagagactcagatgcagcagaggctcagtggctagacttaggacccagccagggcttattgtaaaataagcacttggtaactttttatatctttgccttggcaaccaggaaactcaaagttaaattttatgcttcatttagttttggcttttgttgttgttgttgttcttgttgttgtttgcagagacagagtctagctctgtcgcccaggctggagtgcagtggtgcgatcttggctcactgcaacctctggctcccaggttcaaacaattctcctgcctcagcctcccgagtagctgggactacaggcgcatgccgccacccccatttaatttattttgtattttagtagaggcggggtttcaccgtgttgcccaggctggtctcgaacttctgagctcaggcaatccacccacctcggcctcccaaaatgttaggattacaggcatgagccaccgcacctggccagtttttatcatatataaattcctactctcttattattcatttcatctcatttcttgactctcatcttttacacttattttaatgatttgactattgtatttgtatttaatatgaatgctttctataaatagactcatgtaaggcttgtttaggaaataagtgaaattgaattaaatacgtatgtctaacatgaatctattaagtttctcagcagatgaaaaagaccttccttataacaacacttgtcatacctgaagaacattatttagccagttcttaatcttctctttaccagaattgatcacaaaaattttaactcatttttagcttttgaaacaatgacaagtttacagaaaatttgcatgtacagtacaaagaattttttttaccctgaatcatttgagagtaaattgctgacctaatgccccaaacccctgaacacttaagagtttagtcctacacactatacaatatacccatcagaatccagaaattaacagcagttcacaactactatctaattatcagactccattcaagattcgccggttgtcccaatcaagtattttatagcaaaaatattcaatacagaatctcacttttcatttagttgtcctgtctctgaggtgtcctggagcaggaatcaggtctcccctctctctttgacatcatgactttgacacttcggaagagtttggccagttatcttgtccaatgtctcccattttgagtttgtctattgttttgtcgtggttagatcgatgttatgagtctttgtcagaatattacaaaagtgactctgtgttcccctcatggcatcctgccaggtgacacatgacttcgacatgtcccacttggttaagatggtgtctaccaggactctccacagtgaggtggtttttctccttctgtagttaataaatattctgtggggagatactttgaaactacgtaaatatattgttcctcattaaactttctgtttattttttattattattattattttttgagacagactcttgctctgtcgccaggctggagtgcagtggtgcaatctcagctcactgcaacctccacctcccagattcaagcaattctcctgcgtcagcctcccgagtagctgggactacaggtgtgcgccaccacgcccagctaatttttgtatttttagtagagacagggtttcaccatgttggccaggatggtctcgatctcttgacctcgtgatccacccgcctcagcctcccaaagtgctgggattacaggcgtgagccactgcgcctggccaacactctttttgttactgccattctacccctcaggtccaccccacagcctgtccaattagctatgtgagttaactgctcagtttggtctctgcaaagcagagctaaaacaaacaatgcgccttcctttagggctcttaaaattaaagcatgagtaccctctagtggcttgcaggaaagtttccacgattctcgaacttttcctaagtcccagatgagtgaaggacactggcaggggtgggatgtactggagccagatgtgttccccaccagcacacccaggaaatacatttttgcacagctgtaattttgacttaaacatttgtttaaggtttgcatgctcaatcatatgacctacatgtttggctcagtatacatttgttttctcaaaatctttagtatagtgagtgctccagaaagtcattgcatgtttacctcatagacccatgaactctgaaaagcatagagttccactgaaatgccctttctgagaatcaaagttgaagttcttttcacttgcattggaagaaacctagattttgtgaccagagatggaataaaatatgaatagaaccacattaagtagaatgttctcagtatagcctggcagaaggtgtgtcgtgcctagcatgaggtgacatggtgatgtgtgcaatggaaatggagttatttggcttcaaactgtgtttgaactcttatgaggattcaggcaatagagcagacagggatacttcaatccccactggggttgaactgcccttttccctctgtgtcaaataagaggtggtgatgctggtctatgtgatgcttctgaccttaataataattatgtttttttgtttctggtttctcctccactaataaggctctgggtcttctccttagggagaaggaattgtatgactgaaaaaaaaaaaaaaaaaaaaaaaagcttgattttcctagtactcctgcaacgataaggcaggccaggaccttccagaagttaaaaaacaggctccattgaaacctgtgataaggaagcaacagaccatcactgatgggtctgggatgaaattagatcccctgttacagagtacattttaggagacgctaaaacagaaacagggtgagaactccaggctgagacattccagcggggagggatagtttagatttgtttagcataaggataacaaggagcagctcatggttcccttatcaactaaattagctgagattactgaggcagcggggtgttgcatgagtatgctggcaaggtgggggaggtgtcatgccaagtacattcttaatattgataaaatacagctatgtaggagggtgaaatattctcaaagattagtcaacaagagataaatcaaagcccaacctgataaaaacagactaactgcaattagaaccagcccagctagtaatgtcaaatcactctacgttagtgtttcattctgcaaaccccgggtgtgaaggattaattttaaaaggctgcctaactcatctcctgggggtttgggtgactacttcactttttaagactgatttgaaccctttcatccttactgaagaaaaaccctgaagctcatgctaatatcctgccaatactcacaacttatggctccaaagttggttgaaattttgaattatttccttgccagttagcaaatagcattacttcgatcgctagatgctctcccattacttccctggacccttcccaggagcccccaacttcctcatacccagtaacgctcaacataaatggctggggcagctccttacatgggccaattgaccagtgcccctcacaaaactgattgttgaagattttgagtatcgggtgcaaaacctgaaatccaagcattacagattttagacaacaacctggggaattgaatgacctttgccttattgtaatgccattcgatttatcccccttaatcacaaagcaactttgcatagcttcaccacaatcagtcaggaggaggtcatggaaaattctggtaaggtctgccacctgcaagtttttgctgtcattccttctctctagcctctatttccttgtgtctgtcaaaagaagaatgtggaccagcccaggagatctcactctggctgtgtaaaaacaccttgaagccttttaaaaatctgcagagatccaggctgggcgcagtggctcacgcctgtaatctcagcactttgggaggccaaggcaggaagatcacttgaggtcaggagttcgagaccagcctagccaacatggtgaaacaccgtctctattaaaaatacaaaattaggctgcgcaggtggctcacgcctgtaatcccagcactttgggaggccgaggtgggaggatcacctgaggtcaggagttcgagatcagcctgaccaatatggagaaaccccgtctttactaaaaatacaaaattagccagacatggtggcgcatgcctgtaatcccagctacttaggaggctgaggaaggagaatcgcttgaacctgggaggcggaggttgaggtgagccaagatcacgccattgcactccagtctgggcaacaagagcgaaactctgtctaaaaaaaaaaaaaattagccagggctatggcaggtgcctgtaatcccagctacttgggaggctgtggcatgagaattgcttaaacctgggagatggaggttgcagtgagccaagattgcaccactgcactccagcctgggcaataagtaagactctgtctcaaaaaaaaaaaaaaaaaaaaaggcagcagagattctaattgaattgatctgggagtggggcatctgtgctgtttttgagttcccagcgactctctgtgagccaatgtggatactcactgcactggccaaacactgaggtcctggtgccatgattacaattcagctgctcctcttatgtcaccagtaaaaacaagttgctttccaggactgacaataggcgctggctgcagcctggcccagatgcaggacatcttggctgagagggtagctgagctcccagaggagaaaacacagacgtactgagccctcctgaagcacctgaggagtctggcaggccagcagatccggaatatggcggtatgttccctggtttcaaccactgggcacaccgcacctatttctgaacctcactgaaatgttgagatatgcgttggcagaatcagtatgcaaaaaggtctcagcagattgaagcaacaggcgcagtaaatgtttaaaattaataagcattatttaataaaaatatttaagaaacaactataggctgggagcagtggctcacgcctgtaatcccagcactttgggagaccaaggcgggtggatctcttgaagtcaggagctcgagaccagcctggccaacatggtgaaacctgtctctactaaaaatacaaaaaatagctgggcatggtggtgcacgtctgtaattccagctacttgggaggctgaggtgggaggattgcttgaacccaggaggtagatgttgcagtgagcagagatcatggcactgcactccagtctgggcaacagagcaagactttatctcaaaaaaaaaaaaaaaaaagaaaagaaaagaagaagaggaagaacgataagtcaagctcaaaagagtggctaagcagcatcacaggtgagaaaaggatgctatggttttgctagtttcatgataagcttgtccaagaacttagtttagtcttaggctgcattaacaaaatagagtatctaaaacaaggagggtagccttctctactctgggctgttcaaaacacagctggagaaagatggtcagatctgggaggcatacttgaagatctggttgattttgatctcaaaagaaaggaaaagagaaacagttaggtttttgaaacacatatgctccttcccctgcataccctcaattgtatagcagaaatctttgggatatggaaaaccagggagggcatgtttcctttaaaacagctctcaagtgatttcaaaatgttctctcyccagycaggaactctgacgaggtacactggtgaggagaaggtggcaggagaatgaggggttggaaaccaccccaaaaagaggactaggggtgggaggacaggcaaagggaacatgagagctgccttggactatgtctagactcctgaggtctgatgtgttattacatatgagcagagagtagaagantaactgacagatgaggrtccagggagccagatttcagctcaggggaaacaaaaaaaaatgtaaaatggaactgctcataaaggaatggggattccctgtcctcacctgtgttccagtccagaccgcagcaaccaggaggtcaccgtagattccttccctatgctgggaggagaatcttgagttcaatggccagtcatttccctcccaagttctgaaatgctacaggctccatcagatctgagtgagggctcccaaaaaagagtgaaaaggcaattctctgtccaactgtgtggatgcctcagaacactgacacagcccatgtgaagtctggccatttcagaagcccacaggagatgaggctgagaccctttgcaccaaggcaagatggcacctctgcagccaacaccatggccatcttcactgttgccagggctgagtggggtggctcactcccgctgagcctccctgcttgaatctgaatcccaggcctgccccttcctagctggggacattggtcaagtttcataattgctctgtacttcagtgtcttcatctgtaaaatagggataacracacccacctcactgggttgttgtgtcaggggttagacagcgcgtggaacacacyggtgttaggtaagtgctaggcaccctcgagtcctcttcccatccaaagaagccagtgggaggggccctccctgacaagctgaacccacaccctctgcaaaagagagaaagactgaactgacttagattcctcttgaccctttcatggccactaagaggaccatcagcaggtgccttcggggtagagaagctgagagatggaatgactgmgctgtaactctctctccttagtccttaggggggcatgtgakaagccggcattgctattcggacctgaatccaattcttgctgtgggcaatgctaccctcaatctgatttcagcaggtaagctgcctccaaacactctgaacagcacctagagatcttttgtcttttctayttattcttttaaggaattgctttaagtcagagcccaagtctctagttctcaattcaccatggggagcccagctcatgagggaaggtgcactgatccaaaaggcagctggtgtttccttctgacaccacacacgcacacaacctgggaccacacactcagttagctcacatgttcgcccacgtgtcttgcttgaccagtaaacaccagaggtgatgtgcagaggctaagctgagggtgaggttgcagtgcgcactctccctatgggccaagggactgctcctgctcccccattctcatcatgggctccctccgccaacacacagtccgaggcccccacacagtgccctcaaagttgcctccctaccccccagttgctgtgtaagaagctacaaggctggtgtggacacacagtggacatccacacaggttgtggtgggcccctgggaaggggtaggcagtgattgattttaattgctagctgagaggaacgttcccttgcggtggctgcccactaaacctccctttcatctccccaagcaccctgcacactcacactgcccccaactgccccccagatactaataccaccttgactggatgcaactacatgccaggctgtgctggggcgttggtcattaccattggctgaaggtctgctttcccagctcagctagagccatctccacccagagcacagccctggctccagcaaaggcagtagatcagctcgctggcccagcaacagggaggggccaggcagagatcaaccgtgggagcctcctttggggcaccctgcttcctcacaagcatacctacattccaaccagcacagcgctcactgtgccagggatcaaacgcatgtcacagtccccaggccatagtttgatctcctcactgcactcctgtgggccagagggcacagttgtggtccccaagagggggcaactgggctagaaggaggtttcagaatttttcactttgttttaaaggtgtaagtgtctgtctcaagagctgacaacagcaggaagaacacaaggcaaagtcagtggcttgaactgaactgaatagttaaaagtgcaaacaaaccgtgtgctggcttaaagttgttgacttaacaagtgatcataagcactgaacaggttctatgtagttaaccacaggcccagtgagccttcaaggcagaagagaccccagttcacatagcatatatgctgatgagaaaatagtaatgtcattacggtgccaccacctgggaccccatgatgggaccctgtgactttgccgtggactcagacctcagccttgctctgtgtagaggaagctggcctttccttctcyactgctgacatttaaaagaacagaataatcttgctctccttgttgtgactgtgcagaaatatmattctcttccacagaaggtacgcggcggattcctctaaatgaacattttcttgctgggttggcaagtgcagaccttaagccagaggaaattttggaatctgtgcatatcccgcactctcaaaaggtcagaattccgctggttgcttttgagggtggwttttcctttttcataactgagtccagtcatctttagaaatctaaaaacagatggaaagaaaataactctgccctgcaaacctgtttcmtgtccaactgcagattgggccagcaccaaggccctccgacagccaagagcaggcagctccgggtgtggatgtggggctgttgttctagctgcagggtggagcatgctgagggcctgtggtcacaccaccacacccctcatggccacgagttcaagctctcgggctgtcaaatggagtgtctctaactgacccacagggagatgggggctagggctcagctgtcccacaccccactctagccaatagttcatgggcgcaggagggcctctagttgttcgctaactcagaatctctgcggctgatgtagccacccagccggctatggagttgaccttctgtcctcactgcctgctccctgtgcctctgccaaagctgtacctgaatctaagaggatagtcttcccagagagaggcaatgcaacacacacacacacacacacacacacacacacacacacacaccccctagctcagcccccaaagtcccagagaggagcagccaagactctggggcaccaggatgaggatggcccactccccatccggggccttctgctacagtagcagtaatattcttctacaggggcattggtcgttaccattggctgaaggtctccgctttcccaactcagccacagccatctccacctggagcacagccccggctccagccaaggcaatagatcagctcaccggcccagcagcagggagggaccaggcagagatcaacagtggggggctcctttggggcacccctgcctcctacaaccatgcctacattccaaccagcacagctctgactgtgccaggtgtcttgttagattgtgtctgtgtgattaattaatagcatcaaaagccggggggcagcctggttatggagggagtcataagttatgctttcagccatgtgtgatcttcattagtttttcctttggaatggaaactttgaaatgtgttcccatttaaatccatgaaaaggcagcagacggaaaaacaagcccactcaaacatgtgcacccttcgtggcggcacagatggaaatgcacaaaggggcacaggccgtcttcatggaccccaccttggctcaccaaagatcatggtgccaaggggtcagctgggacagccatcacctttgactcttcctcctgacacaagattccctagccactgctggaaagctttgctcggctcccttctgtgctttgccaagtggaaaagcaatcatttctacaagccaagcaatgtggtgggtctcctttgcacttttagcaaatcacctttaaaagcccctgcattaggagggctcctccaacctcatggggaaaaggtgtctgaaaactggagggaatggcccctggcaatgccagcacatggacgggtgtccaggcgtgagttcccacagcatcccgtgcagaggcatcctggcctccaagggagagtgcgcggtggtccctgttccttgagggtgtccgaggccttgagagtgggccttggggaggacgctgttctcactttgaacgagaagtcagccaaggtgtcctctaattgtgccaactgtcyttggtgtcttgttagattgtgtctaagtgattaattagtggcaacaagaagcataaaccatgttcttagttttgacatatcagataaccccaaatggtttttgtctccacagtgggaatttgtgtcagccttccgacaggctcaatgccagcagaatgccttgccccacgtgaatgccggcatgcgagtccttctcaaagaaggcacagacagcattgaggacctgagcatcgcctatggaggggtgggggctgccaccatcagtgcacacagatcctgctagcarctccttgggaggtaagccaagagcccgcaccctgagggggaagcttgctgttaaataaaacaagtggagatctgtctctggcaagcatcagtaaagccctgggaagatggaaactattacatgaaaatcactgcctgttctttctgccattttgctaaatgaattaaaccttatttgactttgattaattggatgccagtctttggatgaggtatacaacaaaagtgacctggcctgagttcagccagcaggtgattttttcccatctgccctcgttctcttacacagatcgacagcctagccatcctgatgccatggcttatgcctataatcccagcaatgtgggaggccaaggcaggaggattgcttgagcttaggaattcaaaaccagcctgggcaacaaaacaagaccctatctctactatatatatatatgtttttttttttttttaattagctgggcatggtagcatgcacctgtagtcccagctcctcaggaggctgagacaagaggatcacttgagccctggaggttgaggctgcagtgagtagcgatcatgccactatactccaacctaggtgacagagcaagactgtgtttcaaaaaaaaaaaaaaagtctagcaaacccaccctgggcagtgtccaagcagcacctaatgctcccaccgttaagtgcactctattacttcctcagtgaagtcagtctccaagtctgagtcccgttcagttcacaatggaattggccctagtggtctgttttgttgttgttgtttttgagatgaagtctcactctggcacccaggatggagtgcagcggtgcaatctcggcttcactgcaccctccacctcctgggttcaaagtgattttcgtgctcagcctcccaagtagctggaattacaggtgtgtgccaccacacccagctaatttttgtgtttttagtagagatggggtttcaccatgttgcccattctggtttcaaactactgggctcaaactatccagctgccttggcctcccaaagtgctaggattacaggcgtgagcygycattcccggcctgcactgcttatttaattcttgattctagcatgtctggctgtggaacatgttcatgtttaagttgcaggtcccattctcaccctgccatgacccttgggccactcgatgcagcctccccaggccttggtttccctaagcagcttgattaggtgatttctgagtttccaaggaaactctggggtytctaaaaggtcactatcccatatcatgccatgctagaaactgccctctaaccaattccttcctgccttcaaccctcccaggtgctggaatgagctgttgctggatgaggcttgcaggctgcttctggatgaagtctcgctcccaggctcagccccgggtggccgggtggaattcaagaggatgaggaccctagtcgtcagcttcctcttcaaattctacytagaggttctgcaggaactgaagaagctggtgaagctagtctctgtgcctgtgggtgctcyggtgtattcgctggctggggctgctgaaacaaagtagcacagcctgcctggcctgaacaatagaaacatgttccttcmcagttctggaggcgtcagcaggcctggttccctctgagtgctgtgcaggggactctgccccctgcctttccyctagctcctgctggtttgctggcaatcttgggcactccttggcttctagaagcatcaccctgatctgtcttcatatgaagttctgtgggtacatgtgtgtccaaatttccccttctcacaaggacatcagtcatatgggattaggcccatcttaagtagctcattttaacttgattacctctgcagtaaaggccctgccttatttggataaggccacattctgaagaactggggctggagtgctgggacttcaacacagatatttagaacagacacaatttgacccatagcatctggctcttatgtgttccttgcacccataagctcacagctttcccatcactttggcaaattgtctcgtgcacagcctgtgctgttacctgtcacctgctctgagtcaggcctcgtcagttcccagccggccctcctcctggaatccagccctgaggggctacatgaggctcatggcgccagactctctgcagtccgcaaatgttgactgcgtgccctgaacactgaaacactgtggtgtccctgctgccagttttttcttttaaaatcaactttattgaagtgtaatttacacatcataaaatgtacctatttaaattcagcgcatgttgacaaatgtgtatatctgtgtagctaccacctcaaattttccattatcccaaagagtatcctatgcccccttgtgtcaccatcttgcccctggcccaggcaaccaccaatcactttgctggcactagagattcattttgcctcttctgtaattttatgatcaatctaaaacataaaataatattttatttttcaaaacaaccaaaactgcccaggcatggtggctcacacctgtaatcccagcactttgggaggccaagggaggcttgggcccagtagttggagaccagtctggggaacatggggaaaccccatctttataagaaatagaaaaattagctggccgtggtagcacatatctgtagactcagctacttggaggctgaggtggaaggatctcttaagcttgggaggtcggggccacagtgacccatgtttgtaccactgcactctagcctgggcgacagagcaagagcctgtatgaaaaaaaaaaaaacacacacacaccaaaaactgatgtgtatgctaatgtttaaatagctttctagattcttctgattgtaaacttttggaataagctaagcaaagcaaaatatattatctctctctctttctctctctctctccttctctctctctctccacccctcccctgaccatgattacaactcaccctaccttgtattccctgttccccaaccacagctcaccccaagagcctgctgttctaaggtatctgattttcacagactcagatgaagaccctcatcaaccacactcaccaggataatccttgctgccatttaatttctgaatcaagacacttgacaagtttcagtgacacccagagcaccctccccacctctaccgctctcccaggagagttgagttcctgagaaaagcaatctggctttgagtccttttgtgtgcaatggatacctgcttattctgggatggcttatctagcccattttccttgcttctcctcctgcctctacccctactctctggcaggcctctgcctcctcagggtggcttgaggatcagattccaagcagtcagtccaggtcctcattatgtggagggaggaggggaacaagaaacattcataaaacatgaagccggggcaggcagtatggatcctggttatgcacactatgctggatacattagccaagtcagtttcacgtaaaccaaagcccagtttaactgtagctaaccagcttatctttattgttttgaatcacctttcaggacagccgtcatcattctgaaatttcagaccaattcctaagcgctctcgaagatttcccagtcacaataccccagggagtccaaacgtaccaggtcagtgagtttgatttaactgaaayctgcaaactagagctgtgctgagcgagcaagcttttcagagctgtggtttcaagtctgacattctagtcgtggctctttgcttagtccgcgtcagggagacgctggaatctgaggtcaggcccaagctgctgctagatgagctcaaggctgaaccgtccagctaatctacagtctaatcattatagtctcttcaaagtgatattctctgggcatttgtttgatatttactcagaagagcaaccgagccagaaggttcagcccccagctctgattgcaaatgtttaatctccagtcagcaaacaaatgccctgcgagtaacttaactcaccgttctggcaggacagtttagaaattatggattcttgctacagcacaacgcctctcccaccccacctccacatacatgcacacacacacacacacacacacacacacacagagcttccctgagaggagctccagaataaacactatctccacctccttacagcctagtgatgtttttgtgccactcccaagggcagccaggacaccttattctggatctggggggactctgttgccatcccccaaaccctgtgccagaggccccaaacaagtccatacttgggcttcgggcttggattttggcatcccaccttgggaactgtatcactttaccccccatcatcatgaggacagtacccgtggacagactgatcattggaaaggtgaggaggcaggacagcgagacccctgagaacaccaccagggaaaagaaaatgccagaaggagaagctggggtgccccttcacctacttcgccatttattgccacataactgaaataacaattcactgttctagtggcatcatcaatgtgtcacactcatcatctggcccactccagtgtttgtcacccgagggtgaccatccgatttctcaatcctagctcaggagtgttggtgataggccaggccacttctgaaaattaaaggcttctgaggcaactcttgtcttccctgtagagtgtggatcctcaccagcctctccaagacccagttggacaccctatcatgcacytgtcagctcttaaacatgccactggggaagccatgttttstgatgacattcccatggtggataaagaacttttcatggctttggtgaccagtagcagggctcatgcaaaaatcatgtaagtaaacgaagagctttcaagagccttttaaaagcacacttggggacccctcagaggaatgcgcccatgctcctgccatgtcctgaacttaaaggacctaaaatggaaagaataaagaaaaggttgccagctccaggaggaagggagagcatctagaaatgaacatcatggagagagaataaaaatcactggctaggctcagtggctcacatctgtaatcccaacactttgggaggccaaggcgggcagatcacctgaggtcaggagttcaagaccagcctggccaacatggtgaaaccctgtctctactaaaaacacaaaaattagctgggcatggtggcacacacctgcaatcccagctactcaggaggctgaggcaggagaatcacttgagcttgggaggtggagtttgcagtgagccaagatcgaactactgcactccagcctgggcagcaaagtaagactctgtctcaaaaaagaaagaaaaatcacagttacaagccttttgtttccctcctaacctcacaaaacctcagctccctgctacagcctcagacatgactcaaaggcacaaccctgatagagagctggtattgaggtggtggtgaaatacccacttcatgcccaagaatgaatggcccctgtcccaaccttcaagaacgccccttgccaaggccacactatcccttctccacctcccaacccccaacagctaaagtgttgtctcctggcccagcaggagtctcttggaccctactccttggcaggtctgttctgattggtcaggacctaagctggatttgttgtcatatattccgattttcaaccatgttctatccctccctcaaatttagggccctcaaagcttgctgatttctacttcctctttttttaatttagagacagagtctggctctgtcatccaggctgggggcagaggcaccatcatagctcactgcagccttgaaytcctgggctcaagccatcctcccacctcagcctcctgagtagctgggactacagacatgcgccaccaccacacctggctaatttttataattttttttgttgagacagagtcttgctatgttgcccaggctggtctcaaattcctggcatcaagcaatctctcccttcttgaccacccaaagtactgagattacagacctccaccaccctgcccagagtgatttctacttctyaaatatctcttgtttagatcaattgatgtgtccaaggcccttgaactacccgaagtggttgatgtgataacagctgaagacattccaggcaccaatggcgctgaaggtgacaaattgctggctgtagataaggtacgtctgggacatgctcttctagatgattcygtgtagacaatcaccaaggtacccctcctgccagctgttcagctcccagctcttcctgcctttgggaggtggaagcgccgagccttctggcagctgtctaccctgcctttattcagccctactagtccggagtcaggaaataacatagtaaaaggaaatgtattacagaaaagcaacaagtcctagttctgccactgtgtgctcttgagtccatatgaatttttagaaacacaagtcagtacacaacaggagccccactatacaaaaactttatctttaaactctaaaatgtcatgaaggcaacatgtgtcaaccaagctggacagaagacatggtagattcaggttacggccaacctcacatccactctgagccttacgttcactgagttacatggccaatggaactgtctgtattatttaaattattttttcattaaacatattttttagccaagcgtggtggctcaygcctgtaatcccagcactttgggaggctgaggtggatggatcagttgagtccaggagttcaagaccagcctggccaacatgatgaaatcccatctctactaaaaatacaaaaattagccgggcgtggtggcacgcacctgtaatcccagctactcaggaggatgaggcaagagaatcatttgaacctggaaggcagaggctgcagtgagccaagatggcaccactgcactccagcctgggcaacagaacgagactctgtctcaaaaaatatattttttttaatttttagccaagcagatgtagtcaaatgcgactccaatgtggttactattgctaaamagcgacatctaagacagcagccactgctaaggttgaactaagcctattcccacccagaattttgkatctgcttcatgtgtgtactttccacaggtagtctgtgtgggccagatcatctgtgctgtggttgcagaaacagacgtacaggcaaaacgagcagctgaaaagataaagctcacctatgaagatctggaacctgtaatcttcacsatcaaggtaaacagggctggccggtctctccctamggttgtagaattaaaagtacctttgtaaaaatcttaatgaaggatctaattktttttccttgccactggtttgctctggaaaaatcaactttctttggaaaacattacttgcatgagctgaaattatctttggttccaaggagtggaaaagacagaagtttctcacattcaaaaagtctagaagtgggcagtccaggacttctatggcattctgtgtgtttaggatccagccttcttatatctagtcactccatcatgcattgcttcctggagggcacatttggtccacaatggccacggaagctctagctgttacatccacattccagacagctgagaaaataaggtgatgaagaagggtgtgccccctccctttaaggacacttcccagtccttaaagggaggcatgtacattgcacatgccttcctccatctctttgtttggaacatggtcgcatgccacacctaactgcaaggggagctgggaaatgtggattttattccaggtggccagaaaaccactacagatcggagactctatgacttgaggaggaaggtgaggatgcatactgggaacagtaatgttttcaaggtagagcccaaatgcagtggaactttcatggtggaattccacagaaacttcactctcgtttctgagtctagataatgatattcaaatggtatttcggggaagataacggagtgaggacagacaattcaggtgtggactggggttttcaggttctgattcagtgagggacaggttcagagtcaatgacttgagaaaagcttacttgtttgtgtgcttgtgacagaacatcaaatgtgtccagaggctttcatgaaccattgggacattttaaaatgtaactaaatggtacaaattgctcaatatttaaagtgtttttttaaaaaaaagtttcttgatcttcctaaaccaaatcaactttgttccaaattcccatttgccaagtttgcaagaatccaggccatttttcttggctcattcctcttccttgggttgaactaggatcctaataagggtttttgaaattgcccttctaaccccactttcctcaagggggaaatggcacccagaggacacacccacgaactattctagaattcagaatgggtagggatttagagttccctccgaacaagactgtccagagtcatcaaaacaaaatcctccacaagtcataaaattgtcatatatataataccaatagtgcttcatccatctattcatttatttatatgactttatagatcagaggcaacatagggtcatggttacaaacacagatcctagaaccaaactgccagatttgaatagtggctgcaccacttactagctgtgtgaccttaggcaagttatttaacctctctgtgccatggtttcctcatctgtaaaatggaggtagtaataatacgtatctcattagtttgtcataaaattaaatgagttaacaggtgtaaagcacttagaacagtacctggcacatggttagcactcacccaatatagcctatgttataacaatattatactgtcttkgttgggcatagtggctcatgcctgtaatcccagcaccttgggaggctgaagcaggtggatcacttgaggtcaggagtttgagatcagcctggccaacatggtgaaaccccgtctctactaaaaatacgaaaattagccaggtgtggtgatgcatgcctgtaatcccagcctcttgggaggccgaggcaggagaaccacttgagcccaggaggcggagttgctgtgagtcgagatcacaccactgcactccagcctgggtgaaagagcaagactccatctaaaaaaaaaaaaaaagagattatgctgtcttatgacacatttacagtatggcaataaacatactttcacatgtaccaggatggcttctgagatcttagtataacagaaaatgaaaaaattcagctatattgttccttgtctgctgctttgaaaaaatcaagtgttcatcattagatagtatgtttttaaaaacttagcctgggcttgaacacttcctttatcacttatttacagtgtgactttgagaaagttcttttaacctctctaagcccagtttcctcatctaggaaacagagatcataacagaatgaacgtaaggatacaagtacatacgctgttattgcacagtgcttagcacaaagcaagctctccatcaatattagctgctcccaggagcatcatcagcaagaaaggctatggcatctgaggccatcagagcctaggaaggcaggagacaggtgtcattcagaagtatgaaaaaataccttggttctaaaggctaaacaaggatccgctgtcagtaggtcagtccacagaaccagtctttatttgtaagtcagttcatgttattgtcagggggaagaaaaaaaaaacatagaacaaagagctagaaaagcccttatgagatgatgccaaatactcaaagaaaggaacaaacttcctattaggttggtgcaaaagcaattgcaaacttttatagcaaaaactacaattgctattgcaccaacctaatacaatgtgtactgggcttttctgccccagagatgtgtaataacttgtgtcttccctctcaagacagcctcagtatttttcagatccctgagtgagaggttcttgtacctgagctacctaagtagtctaacacaagcatttttcttcaaggaaaaggtaaacgaaaaaaaaaaggcagattcccaaacctcacccatcatgcacatttgacttatctcatgttccctggagagtcacatttaaataagaaattagtattcatcgtccgggatcatcatagtgtccccagccctcagttatgaacgtagcttccttctgaaggtttcgctaatccttcttgctggttttctctgcaaatctagaagacctttccttggacttcccatctctgcagccagcctaccgctctaattctcccttgcttgtttgacacctttcatctgtcccgggagacagtgattttccagagcatactggcttttaagaaaaaactaacagtggaaggaaaagtcggaagaactggcttttatgcttttttgtttttctgcaatttaggatgccataaaacacaattcattcctgtgccgtgaaaaaaaaacttgaaaaaggaaacgttgaggaggcctttgaaaaagtcgaccaaattgttgaaggtgagctcccagggatacttaatagactctgcctgattctattctgaagcaaccatcaaaagtgtatgatttcccctcagaaagtccagcctctaaagtcttggtgctttgccaaatttctcttacatctcttcctttcaaattgtgtgtgtgtgtgtgtgtgtgtgtgtgtgtgtgtatgtgcagttttggcgttggtgggtagggagcaatagcataaataaaagaaaatctctaagattttggtttgggcagagtaaggaacaaaacttggcacttttaatttgtgatccagaactattgtctctgaaacagattgccacaggacaaatgcctggttccttcgtcaggataaatccaggccagccaggcagggcacggtgactcacacctgtaatcccagcactttgggaggccgaggcaggtgaatcacctgaggtcaggagttcgagaccaacttggccaacatggtgaaatcccatctctgctaaaaatacaaaaattagccagtcatggtggcaggagctgtaatcccagctacttgggaggctgaggcaggagaatcgcttgagcctggggggcggaggttgcagtgagccgagatcgcgctgctacactccagcatgggtgacagagcgagactccacctcaaaaaaaaaaaaaatccaggccagccagtccacatcttactggcttttgaattctccaagacggtggctctccaagacggtggcttcccaccagcacacaccttaggagttgttctgtgcttatgcttaacaggagaggtccatgttggaggacaggaacatttttacatggaaacacaaagagtgcttgttattccaaagacagaggacaaagaactggacatttatgtgtccacacaggacccagcccacgtgcaggtgaggtccaggataatacccacgtccccaccttcctaattccatgatcacagtcgatcccacagcctcacaatcactggccattttacctgcagaaacctggaatccaagcattagacatcagacatcaataatgcagccaagacctcagaacctttttttttttttttggtcttttcaagtaaataaaaaaatagtcacagtaattttaggtttcaagagtacgttcatttgcatcatgcttagatgagctctgtgatgagatggcatcactaaactatttctgtacttgatttttctctaaaataatcatcacagataacctttggagtcaacacatcactttatagtacattttcatttccccagtcacaaagtgctctaggtttagctgcaaacacatcatctccttggtaggttgtcaggagttcgccggctttcatctccttgggactttagactaggaacccagcttctcacaggaatccagggctctgacagttttccttctggaaaataccatttttctgctagaagggctgctctgtgcggaccaacggtgtttacgagctaaacagagccccaccagacagattcagactatctccattttttttaccaatggtagatgtgaatgaattctgctgggatgctgtttcaagaaacaaaaagcttcttttccatttcactcttataaaccttcttgttatctcacttttacagaaaacagtgtcctctactttaaacatccccatcaacaggatcacctgtcatgtaaaacgagtgggtggaggttttggagggaaggtaggaaagccagctgtattcggggctattgcagctgtgggtgctatcaagtaagtatggttggggatgcttagggatacagaatggcatcaaatgcacagagctgagggcaaatcagtggctgacagtcatctgggctgccatcataaccatgtgtgtgtccttgggcaattcagcctcctgtctgtttctttaaaaaatgtaaataatcatacctaccctcccacacttttagagttattgcaaaagtcaaatgtacacaggactttgaatagctgacatgctattgaaaggagcagtggtactattagctgaatacctcctgagcttcagggaaagtgagccgttgaggggtggggcaagtcaccctgcccaagtggagtgctaggggaggctgctccctgactcttctttcctgctctcagaccaagaacagggtgaggtaaggaaagaaaggctcttcatcctctgcctccctgcacctgggaagggctgcgtcctcagagtctgctcaatggacagatgactcatcctcaaagacagctcccaggctgacctcagcggaaggctcactcctttgctgttcatgcctcagatttgtatttagttggtgctgctttttctgttaatggttcattttctgtggctaagtattctgtcagagccccagagggcatgcaaagtttacaggccctgcttcatttgacaactcttgtagttcagagctaggtcctgaaacactcagacatatgtctcagtcctcagtgagaagtgggaaaaagcaggatctgaatcccatctccaattctttccataattaaatccactccactcacacccactggggattcagcacaagataatcagttcattgaattccccccaggcgttgtggctttaagacttctcaaacacgactgcacgttagaatcatctgggcagcatttaaataccagtgcccaggctgccccatactgacccaggcatccgtatattttaaaacttcctcagtggttccactgtgcagccaagtgtggcaaccagtgccttaagatacaactctaccttggtacccaagggccatgcattaaatgatccccagagtaatgttcccaaacctaatagtaagtaagagttgcctgatgtcatagaaattcctgcctcagctgggcatggtggctcatgcctataatctcagcactttgggaggctgaggcaggaaaatcacctgagcccaggagttcaagatgagcctgggaaacatggtgaaatcctcatctctacaaagatttaaaatagaataaaataaaaatagctgagcacagtagcacgtgcctgtggtcccagctactcaggaggctaaggcaggaggattgcttgagcccaggagatcaggctgcagtgagccgtgttcataccactgcactccagcctgagtggcagagcaagaccccgtctcaaaaaagaaagtcctgcctccccatcccagcaccactgaatcagaattagcaggggatggacctggaaactgcatttccctgatgttccagattgtcctcacaattagggaacaccaggaaaccctgcactagaatagtgattttcaacatttgcctgaagacacctgaatcaatatcactcagaaaaatgcattctaaagcccctccctgacccactgaatccaaatcctagtacaaaggcccaggaatatgcattttcaccagcgtgccagaggattcttcagcactccaaagtctagaagcctctgctctggagatggagaaaagctgaggctcctccctgaatgagagcccaacttggccagcatagccttcacggatgagaatggagacgctaacccagacatcctaggatgagtgtttggccttgttttcccagtagggttgttaagtttgcatttatctgttcacattctttctcttttgtaaatagtggtggagataatgcaaatatctggatctgggtgaaggtcaaacttgaagctatagaattcaacttaaccgaatgtgacattaatacttttaacaagatctccaaccattgagttatagaccacagagacaatgaagatttagtcatatattaataattcacgttagtgtctagcatattgtatgatattaatacatttatatgggataaatgaatggatggatggttgaataaagagtgggagaatggatagtggatggatggataataggcagatacattgatgggtgggcagatagttaaatgaggggatggataaatatgagtagataggkgaacgagaagatggatggatggatggatgggatgggtggagaacctaagatttattttctttagaactggtcaccccattcgtctcatccttgatcgtgaagatgatatgctaataactggaggaaggcatccattatttggaaaatataaagtgagtattaaagattaattattaaaatatctcattttggctaggcactgtggctcacacctgtaatcctaccactttgggaggccaaggcgggcaaatagcttgagcccaggagttccaaaaccagcctgggcaacatggggagaccctatctctaaaaaaaatacaaaaattagctgggtatggtgccacatgcctgtactcccagctacttgggaggctgaggtgtgtggatcccttgagcccaggaggtggaggctatagtgagccaagattgcaccactgcactccagcctgggcgacagagtgagaccctgtctcagacataaataaataaataaataaataaataaataaataaataratagataatctgattttatctgaatggctttgttcttttctatcattttgattttgctaaattctaaaaacaaacttagcacctaaaatattaaatgaggatgctgtgtatttgaatattcataacattttatgaggaacttttaataattctagtaaataattgtgaagaagtttaatgataaaaatacaatttcaaataatgatcaaaacactccttgaaggaataaggatttacattagtggttcctcaaaaacaaacagacaaacactgatagaaggtacaaacattgctatgccaaaccttcttgactatacaaatatttttcagtagaaatgtttggagacaatttgaccattgaccattttaactgcaaaatcattttttagaagtgtttttaccaagtggctatgatactgtcacaaaagctctttgcatgtaggaaaaaataatacagtaagtagtgaatttaaaattgtttcagactgcatttactgcatttttatataactataatataaacatcttaaaaatacttgctggcctcgagcttacaatactacttttcaaatttgtcattgagctgttaggatcattctaatgtaatctaagtcgtatcgaacatactttacgtgggaattgcttgtagcatatacatagttagatttcctatctgattttgtnattgtcttagattatcttccctgtattactaaagccacagttttctatagcacagaacaattttatttcttccattggcattaataatttttataattagagagggagatcctctctaatagttggccgattcaactgtttatttgctttcaaatgcacagatattaatagtcacagctattattgtcttctaggaccgasagcaatgtagagacacactgctaagattggagcagttgctgttgtggtgatggctgtgctcttatcaaagttatgagattcttttagtactaatacttgttaagaagattctagactgttaatattttggtaattatagtaatataaagtataaaagagggaaatagattttttgaaaaatccaagttttattttatattttggctgggtgtggtggctcacacctgtaatcccagcactttcggaagctgaggcgggtggatcccctaaggtcaggagttcgagaccagcctggccaacatagtgaaaccccatctctattaaaaatacaaaaaaataactgggcgtggtggcatgcacctgtagtctcagatacttgggaggctgaggaaggagaatggcttgaacccaagaggcagaggttgcagtgagccaagattgtaccactgcactatagcctgggcgagagagcaagactctgtctcaaaaaaaaagtccaagttttattttattttttaagaaacaatttcaattccaatataatatatataaacaatttcacttcatatatacatatatatatatatwcacacatatatatatatatacacacacacatatataatccttcagacacagctaacaaagttttgcttggttattcagaactatttgtaaattaggataacatgtgtttatgtttaaatagtttcttccaaatttttgaaaagtttatatgaaatagtttaaggattctgctaccttatttatagtactattttgcttagcagtcctttcttcatgaaagtcaaaggtaaacttcagtcaaagtctaatgttaaccctatagttatatatatagtcgtgtggatccttcagttgtatttatccctgctttcagaaaggcaaagggacctggatcaatcctcgtttggtagaactacagtagggagtggggatttttcttttctttttaatgtggactgtatagacaaaatggtctggatgggtggaggggagtggcaacactgaaagaatgcaagctgccttaagctcttcccaaacagtaacaacagcacgagctcaggtttgttaggtcaggtaagcatatacaaacatcttcaccacctagtgaaatgagagcagtccccatgcatccattcagggacctcagcttcagaggctttcccataacaggatacactgtgattcattccaacacattctggaattccagagactttttcaccagggaggaaaccacacactaaattagaaagaaagtcagtaaaaaaatgaaggggaatcttccaagaataaggatgaagagggtggcaattatagtccaggagacaagcaaagtctttagaatcccatgctgactgtgaagccagaaaatcacatgttggaaggaaagagctcagcaaaattcagctcagaagaagtctccatcagtcaagcaaggcatggtacaccataaagcaaacagggagctgagtctggcctctgtcctgccctgtgggggaactgggctatgtctcacaattggcatgcaaattttgaacatctcagtaaataactatcatttggtgacaggtaggattcatgaacaacgggcggatcaaagctctagacattgagtgctacattaacggaggatgcacgctggatgactctgagctggtacgtacaccagaaagcagcaacgtgcttgaccatgagtagaatgccaaatttctagatgactctttatgaagtttatttcctaatgtagttaaattctacaagccgtttgactctgtacttgactttcagagaaaagaaaaaaaaagtgatgataaatgygaatatccctttttaggtaacagaatttctaatactaaagctggaaaatgcatataaaattcrcaacctgttcaggttccagggccgtgcatgcatgacaaatttaccatccaatacggcctttcgtggatttggcttcccacraggagccctagtaacagaatcttgcatcacagctgtggcagccaaatgtggccttccaccagaaaaggtaakgttgcaacaaaggccataaccaaagttgctgatgaaccagactgggaaacccagcttctttgacccaaggaaacacactagaagaaccacatgaattagccctggctcagaattcaaagtgaattaaaagctacctaaaaaaactcacctcaccctatcttcctccttccttacttacgcaaacatctcttttttttcatttgtaccaaaataattactctacttaaaattcaaaccacaccgaagtaatcaaaaaaagggaatgcccctttttccacccccatccctcttggtcaagggtaatcattgttaacaattccatgtttattgttctacccctttttctatctttggccacccatttgtattcatacacacatacctaaacattgacatataacatatatgtgcacacgtatggttatttaccagaatgggaccatagcatacatattactctgcccctttcttctcctacaggacagtatgccatggccatctttctatgtcagtagaatggtctgcttcattctttttcatgactgaatagtactatgtaatgtgcacgtaccataacttatttaaccactccactattaatatacattctggctgttaccatttttggccattaaaatgatgttacaataaacatcttggtacatatgtacccaggtatatgtttgccttatttatctttaggataaatttacagaagtggaattactggtrcacttgaaaacttttaagaaatactgccagaagaacaccctctgaaaatactgtttttcacaatagaccagaaggtgcacaggatgtacagtatgctggactagagagaggcagcttctggaattgagatcatggtcaataacttgcttccactccccacacattccaatcagagcccaccctaccttttccatttctgtcccctgtttccccaatatagaccccctactccagcaagaactctcctatgtattgtccctagaactgctttgtccctaaattcaacaggaattccaggtttgtgattgtcggggtacttcctacaaacaagagaacacctaatattttgtacaaggaaggcagtagttatcctaagagaagtcacgtacagtgttccacgggtaccagagaaggaaggcatcacgttggcatggggagaggggaaccaggaaggactttctggagaagatggcacttgagataggccttgaagaataattggcacagatgttggaaaggtgatctaggcaagtagaacagcatgagcaagagtgtcaatgtctgtgtagttcagtttccttatctataaatgactcacctcacagagttcctgcaagaatcaaataatttaacattcattacaatatttgttttataaactggatagtattattccaacgttgttgccaataataataattcttttactgtgattagaataaaatggagatgatttaaaaaaaacttctaggcaaatctcagcaggctctcctttgtcaagtgttgcaagtttccaggacatataacataaaacacaccttattcaaataagccgttttttttttctttctttcttttagagatgaggtctcactacgttgcccaggctggtcttgaactcctgagcttaagtgatcctcctgcctcggtctcccaaagtgctaggattacaggtgtcagccaccacacgaggcccaaagaaactgcttaaaagatttacccatacattccaaaggcaattaaaagacttagaggggatctgctattatttgcaatgctattcctccctggcaggacaaatcttcagttatgacaatgaatccttgctttagtgtactgcccaccagctctgctccatcctctgaaccttgtagaataaaaagaaaagaaaaatctacctccctaggcccctacatcccactgcctttcatggaatagtctccacctgctaccttccacttctagtaaggagagaccctaactggtgcattgatgaagaggtaaaaataacctctactatttttgcaaaagcatgtaccattcaaagaaaaaacagaccctgtcttcccttctctacarcttgtgctttcgtggagaggtttttcaagtctctatttggccatcagtttctgccttaccataactactgaatttcccacctgtttcagattagagagaaaaatatgtacaaaacatatctacagatatgtagataaacatatctacagatatgtagataaacatatctacagatrtgtagataaaaccatctacaaacaagcattcaaccctgagaccctgataagatgttggaatgagtgtctagacaagtcttcctttcacagcagaagaatgcaagtcgaagagttcaataagaagaattattggaagaagaaaggcattgctattattcccatgaagttttcagttggctttgctgcaacaagctaccatcrggtaagacttgcatataggataaataaccttcatgctagacacactcctggcccaatcagcttttgyggactttgaaaaatatctcatttcttagagcattgagctcctccctgccaacacctaagagaaatatacagaactgtccagagcagcacccctatctgcaagcatttttaatacagtgcagtatttgtttccttcttgggaaacaaatccctaatcaactgaagtcaggaagacctgagaaatcctcggctctgtattgaccagctgtgcaacattaaattattcaacatctctgagcctcagctttcccagtgataataacaataatagtaataacaataactctgtcttaagattgatgaggactcagtaagatagtgaatgtagagcagcacttggctgggttcctggaacactgtggatgtcatccagagcatcactaggcccctcccaggacagctcagacacacctctcagggctcctcctcctctggtgggtaggatgagaccccctgaacctctgggtcacatgttcaggcccagcatgccccttctataaacaggcacaagaaggttaactgtcatgtctgcaagctagatgcaatcaaaggctgtgacatcagagaaacttsagagctgcctgtgtggtttcctctctgatgccaaatattgtcttttccaaaccaactccaacaccaagtgggtgtccaaccattctgttctcacactaactaccagagttagtgcagactccacagatcaagggctgagtcccacaagaccgcccctatttcagacaccagcttcaaatggagggccctagctactcacactcctgcctggccgactactaatttggaggttttcactacccccattcaggtttgataatttgctagaatgactcatggaactcaggaaagcactttacttatgattattaccagtttactgtgaaggatatgactcaggaacagccagatggaagagctgcctggggcaagggatgggaaggggacagagcttccctgacctctccaggcacacaccctcccagcacctccacatgttcaccaacccaggagcccccagactgcatcatttggggtttttatggaggttccactatacaggcatgattgattacagcattggccattaatgattgaactcaatctctagcccccctcccaagaagatggggaggaggactgaaagaccaatgcacaccgcctccaagcccccatcctaaagctacctaagccctcctcatgagtcgtctcattaggagaataaaacagtaaattccaaggctttacgaactctgaaccaagaaccaggggcaaagatcaaatatttactttttattataacacacttcccttcacctgtacggccacaccgcatctaaaccacagcctacgctctaccatcatccatgggaacaaacatctcatctcatcacaaagaaaaccttcaaatcaagcaatgattttaagtctccatttgaatatcctccagctgctccacagagttctaaattgaggcaccctagaatcacctggctaggaatagaagggtgttattccaggtcagctgatgactcacaaagctggaacacctaccctctaaattggcagtgagagctctgtcctcagtgggagtcaaaagacccatggtgagtaaatcctattattagcagctacaagccttgatgctcccaagcccctctgagccaaccctgggcctccaggcatctcgagacacaaatgggctgaagccttcgttcctccttctcctggaaagaaaaaaataccacctttccctttgtccagtttatcaaacattgatgtagtgtccctgtgattttttttttttttttttagacagagttttgctcttgtcacccaggctggaggctggagtacaatggcacaatttctgctcactgtaacctccgcctcccaggttcaagcaattctcctgcctcaggctcccaagtagctgggattacaggcacctgccaccacgcctggctaatttttgcttttttagtagagtcggggtttcaccatgttggtcaggctggtcttgaactcctgaccccagctgatccacccgccttggcctcccaaagtgctgggattacaggcatgagctaccactcaaggccaggacctgctcagaggtatttacgggacacaaagatgagttaagaccaggtgtctctccatggcaacactcagagaagagcctcttacctccaggattccttacctgtggctgctcttacaaagtaccacaaactgggtgattcaaaaacaacaaatttattctctcacaattctggaggcctgaagttcaaactcaaggggtcagcagggccgtgctgcctctgaaggcttcagggaaggatcttcccttgcttttccagcttctggtggctcctggtattacctggcttgtggcaacataactccagtcgctgctgcctccatcttccatggccctcttacaaggacaccagtcattgagtttagggcccgcacaatccagtatgattttatcttaagtagttgcatctgcaaagactacataaagttccatgttgaggtttcagacagacatgaattttagggggcaggggagggacattcttcaacccagtattcctgtaaggagaagtacaaagaaggaggtgattgatccttcccagatggggatgagtacaggcgtgagtcgccgcatccagccaagtgaggaagttttaacagaacatagactgcagggcgtggccctgcaggctgtgcagacaggtaaggaacaggaggagaagccggccaggacaagagattggacagaagcaaggagcacaggccagaaaggagctgcagtggggccagactcagaggcaaggcagggggcgacagggactgtacaagagaccaaatcccacaggacctcctagtggaataaggagccgagctttcccttacaggctgtggggggtttgcccaccttgcccatggcaaagccttcttcggtctgtgattctgttctgttgtcacttgtcatccctgagcagcacaggagttgcacctgtcctcccaggtctcccagggccccctatgccactctcattatctcactgatcatcctacactacagtgacttgatctccagcctgcctttccaccacattgtgagcagcttgaagaagagccatgtcttgttcatctttatgtatctggagctgagcacacttggtacacactatgtgcaagtacctaaaacatttaaataactagcttaatggtcagccagtgattttaagcatgagagtgactttcaaacaattggaaccaacgctctcaactcctgaggtatccaaaggggctcctatgaaaaccaggaggaatgttctttacargcgactttttgcacaaaacagaactaagcttcagcatcccaccaggaaagtttgcttctctgaccccctccactccctaagactggtgtttcactaccttgtgttwtatattgaacctcaccaaatgctaacttgcactgagctatgccttccrgattcttttactaggcagctgcactggttcatatctacrcagatgggtctgtgttggtcacacatggaagcaatgaactgggacaaggtattcacaccaaaatgctacaggtaaaataaataaaattaaaccattattctctatatacattgttgaaagttaggattcatctattagggtaaatgttgactccctgtattcaaacactgagatcttgactatttagttggacggcttcttacatatcaaatagaatgtagaatggctgaggtggcagaaatcccacgtgtatgcagacagtcctggagcttggccagggttcatggatggggtgatcattagtgaaaacgccactaagaaacccatggagccctgtggtgggagatccaagcaggcaaccaggagcaggagtttctcagctagttttaatgtttacattttagacaacaatattaggttgctaatgttttattttgacaagtaagaacaagtatttcatcaactgccatcatcctacaatttttataagatatttaacacacatacatacacaccaattagtacgaatataatctcaggagaaaaacaagaataattctttaaataaccctgtgacaaatgtattagatttctatagcgcattagatttctatagcgcacatctgtagcttttgactatccagccccttagctcatttggagtactgtacctctcacatgccatatattcctgaaagactcctcaatttggatacctttcagctccatccccatccttactcccacgcctgctgcagatataggcacaagacccgcctctggtcagtcagggttccggaatcccactgactctgggaaaggacacatgattcaagcaaggccactcagagcctttcctgggactgacgtgtagatgctgggagaaaggagccatctttcccctgtggctgtttaggtactatactatagggcaggggctgccacaggcagttctgtgccatggatggaaccggccatcrtagaaagaaaagcaaatgtgagaggctgagaggagaccctgacgagaccacaaagcccctagatacacatgtacttcacactagctccatctatcctgcccagttatatgaaccaacaaattccctttggattttcaccacccagaaacaacaaagtcatccctttttttcattttgcttctttctggagaaacttcatattgaatgacattagtcagaagattagcatttgagaacgggatatcatgagaaggtgttttttgcaaacacaaaaagacaagagaagccaaaataatgttttttcctttccctttcttctttttcatctctttccttgtcatttcttgattaaatatcttcatctccacatgtgtttgctagagaaactggaaggaaaagagcagaaaagaagccaggtgcagtggcatgcacctgtagtcccagctactcaggaggctgaagcaggaggatcacttgagtccaggagttcaagatcagcctggacaacacagtgagaccccatctctaaaataataataataatcttttaaaaattatttttaagaaccagaaaaaatgaacagcaaatactggaggaatataagcaagggaaaacaaatagaaaacagagggggaggataagagcaagaaaaaggtcctcagggtcattccaagttcatctgatactgatatcgaaagatttcagaccaaattctgagccagtctcatctcagtctcccctctttctctctctctctctcttcctctctctctctctctccctccatccctctttttcttcctgccactgaaccaaataagtgcctgaaaatctcaatttggcctacttcctacacatctaaaacttagaaaaaaggaaattcttaacattctaaayggactcaatttgaaaagaaccactgtggaatattaccaagaaaacrctgtaaaaatgagcatgaggccttacaaaaaaagtagttttgatgcttataaagtacattattttagtcttaaaagggtaccatggatgtaataacaaataatttttattaagaaaaataatgattcaaatcttcatagaaktccttgctggacttgaaaatatttatgtttctcataggtggccagccatgagctaaaaatacccatgtcctatatgcacatctgtgaaacgagcacagcaacagtgcccaatacaattgctacagcagcgtctatcggtgcagatgtcaacggcagagctgtgcaggtgagtcttcctgtctctccttggtgtgcctctcccacatccctggtttttatgactagatacaggtrcaatagttgacttcagagaagtcatctgtgtcactamacatagtctgaggtaaytaaaatgttgggagagtgtatttggagtaggctaaattgagatgacagacccaaaatgtaaaggctcaaacacagtaaaagtccctttcttgtacacatatcagtcccgagcattgtttggtcattcgagcacccaaattgatggaggctccaccatcttcaacatgtggtgtgccaagttgccctgggtgtcatcattccagtgagcatggaggagccggtgtggaagactctgagccagatctggaagtgatgcaagtcatttccacacacagtccattagcagaaccagtttcgggctatgtctaactgcaacggaggttgggaaatgtagaatagtgggaaaccgtatgtccagctgctatggaagaaggagagaatggattttggtgaacaggcagtctctgttcctaggagacacagcaagaagaaatttggctaccaagtaatgcagagctgtgcaagtttcctccagcataaacaagtgcttgcaggcagataggcaggcagaccccagccaaggagacagggtgcaatagaagcattgtcttcagtggtattctaccgagtacttagagcttttctttgtacttattttttaactgaatttttttaaattgctaaattttcactgtctcagaatagaatcatgacttcatattccttaattcaaatatctgattgcatgtacttttgaaatatatctatttgtcatgtttctgttgcaaactgttcacttttccactgggatattgtggtgagccatattttcccagaatgctgcaatgataccaccaacaggaacccctttcaaatcagtcctaattttgtggtgatacctcttaaggaatcaaaaagcaaacactcttttttgctcagaacaaatgtgtaagaaacctcaaatgcatgagatctaatttggagtagggtcaaacacaagagaggaacagctcagagtgtatgggagttgtcagcccaaaataagtgtcaatccatcttctagagtattaagttttaggtttctgttaaagatcagaaaatttgtggtctaggtcattataaagtaaatttaattgttttctcatttcatacccaaagccaaggactttgttgtagtagtttgatggtggtcgaatgaacagatggagggagagatcagacacagggggattctggcatgtcattgttacagactggaaagcacaaattttaatgaaaataggatgtttattccatttattttaatagccataaaatacaaaagaaatggtcgggtgcagtggctcacgccgtaatcccagcactttggaaggtcaaggtgggcagatcacgaggtcaggaaatcgagaccatcctgcccaacatggtgaaacctcgcctctactaaaatacaaaaaattagccaggcatggtactgcgcgcctgtagtcccagctacttgggaggctgaggcaggggaatcacttgaacccaggttgcaatgagctgagatcgtgccactacactccagcctggcgacagagcaagactccatctcaaaaaaaaaaaaaaagaaatatacaaatatacaaaagatgtaggaaaaaaatgctaaaggccaggcacagtggctcatgcctgtaatcctagcactttgggaggctgaagtaggcagatggctcgagctcaggagttcaagaccatcctggtcaacatggtgaaactctatctctacaaagaagacaaaaatcagccaggcttggtggtgagtgcctggagtcccagttactcaagagactgaggtggaaagattgcttgagcccagatgttgaagttgcagtgagccaagatggtgccactgcactccagcctggttgacagagtgagaccctgtctcaaaaaaacaaaccaaaagaaaagagagagagagagagaagttaagaacctgaatattctaagaaagaggttctgagagtagaaattcagctgaacccatattttcacaggaagtgagccaagaaggggaaaaaataacctccagtaactgatactgttatcaagggcaggagttgtgttaccgatttttcaggatcacgcactccatagcacttgctgacctaatcagtgaacatttgttcacacaaatggtaaccaccagaaccactgggctcttctctaatgtggattccattctttactacttcaagaatgcttgtcagatccttctgaaacgccttgagcccatcattaagaaacatccggaaggtaaatgggaagactggrtaagtgttccactccctttgaaatgagaaaacaatgtaaaccagtactsagacagcaccacagcatgcacagccatcacacacagagacagttcctctaagtgtcacagtgatggagcatgccccctgtttcttccccagttgaatggatttctgcaaataggcaggatctctaaaggttgagaaggctactccaggatgtataccaggtgtgtatggagaaagcacacaggaaacagcaatcactagaaggagaaatagaagtgtatgaagaatacactctgctcaagtaagaaataagaggaaaagaatgagccttcctaagccacacacacacacatacacacacacacatgcaagcacgatgttttgggtaggttaggaggaaaactaaaaggcctatttgctcttgaatatggctcaaaggagatgactaagttaatccaactttacaatatcctgtgacttttttcattggagcaattatttcacatttacacacacgcttactgtaaagttctaacatttagaaatgaagtccaaataccttgtgcactgagtccctatctcatggatgtgcagcaggattctattttatgtttgttcaatccagacttctaaactcaatcagaaggaaattgttagtgtgccaattaaggaaaaataatatgatgacgagttctattattggtagcaaagcaccagcaacaattatgagatgtcaattttagattggacatttctgttttcacctagcagatggtatatttgtttcgctttaactaaatatgcccattctgcagatagaagctgcatttgaacaaagaatcagtctctcagccactggatacttcaggtaaacatcacaataatatcttgacgtagctaagaaaataagaggtaactcaatcactgttgatggctgttgtaatactttggttcttgtcgtcttagtttaaaagaatttaaacaagagacacagcaaagcaaaacaacaacaacaacaaaaagagacacacagcaaaagatgtgcagcatagagtaatttattgcaaaaaaaaaaaaagaatattttgaaaatgaggtgcagagtagacagtacaccctgagagagaattcagggcaggctgtccgtaaggatgagacagcaaaaactggtattgcggacgctccctttatggggatcttacatgattattcatattggtgggaagaggtgttactagtaagcacgttctggatggtcttctgggtgcacatgtgcagctgtacatgcgtgttcatacatcacatgtctcattagtatcttaaatctccacccagaggtgtgttttttactattaaaataatttgattttacctgaggacaggtaaaatcaaagtgtgcatgccctctacaggggaaattccctactgaagataactttgtttgaatgagtgcgattacaatggaaatgctgaagctttcgtgttgattgtgccgtcaccacagtgctggtgctgcgtccagagaacgtggtcactttcttgactatctatgctgcctcaactctgggccgcaggtccctcatttgtaaaatacatttttattgtatgattgctgaggtcccttctaggcccaaaattctatgatttcacataggcctttcagttatgtccaaaaaaaaaattaaacaataaaacacccttattggggaaaaaaattagatgcttgacttacaacagctaatccttataatcattatttactatttatttaatcattacttacaatatctaatcattatttactattctttatcatgaatagtaaaaatatattatcattagaaatgacttgcatctcaattttacaaatctccctccttttaccataaaacctgtctattttgaagctccgtactagacaagggagaatgggtggatgataatcaccagtcattgtcaaattcaaaaagcatgtgacattagttttacagtctaatgaaacaaaccaccaaacaatagatacacacacacacacacacacagagaacagtaaagcaaatcctcatgaagaatgaggaaataaggaggtaacagcccagcctagagccttgtacctaatgagttctaaattcctaagttcagttacctaagaagagagcaaaccagccctctatctgaatatatcttctattataaattaatgcattgaattaccagtccttttttaccaaccctgaattaccatcagctccctgtgagtttggttagcactatccatggggtccctttgggaagagtggtcccagggggactactgataaaattcaactgaggttctcagtgggcaggcaggctaaagctcaaatcctttgtggtcaagatacaggcacactgtgaggtccggtcccaaacaatctattggcttctccctctttttgacatcctaactgtggcacaaggaatgtcctctttaaatgagtttaaaaggcaattgaaatgaacataaatcaaatgaaatgctgtacttacctggcaggggagatactgtgattctgaaggtggttttcctagagtgaggcttatcttasctattttactccagaaatgctgacccctgtgatttccccaaatgtaggaaactcaactgcataatttatgataatgggagactgtatttgtgccctccctggcaaaaaaagaaaaygaaacactaccataaaaccttggtaacttttaaaataaatcaacattctatctccccagctcaagctaaaaggctttatttcttcygtcaggggctacaaggccttcatggactgggagaagggggtgggggacccatttccttactatgtctgcagagctgcctgttctgaggttgaaaytgactgcctgacaggtgctcacaaggtaagtcaagtctaactttcctcttggcaaatcaaaacaacaaaagtgtgttgtatagtaaatagcccaattccattatgtaattctcttataacaagaacaagattctttcaattccatgggagggtccagagatctagccttatcctgaatttccacttaaaaagacaatatagtagtcaaaaatgaattgctgatgacagtctaaaatgtattaaatttcttatttcatttagacaacaaaatcactttccaagatttctcccccaaaaaagcttctatttataaagaaaaaacacattttctaatctgaaggaataactaacttagtaaatagtcttgagcaaacattttgaaagcacatagcaatgtgctgtttctccaaagtcaattatccaaaaagtattactggaacagattttgggggaagagaggtattaaaataattgttacattttctatttaattgaacagccaagaaaccacacattggagacagggaatcatacttaacccaaaattaacaacttgcattataaaggatgcaattttacccaagggccttggaataaatccctaaagatatgaaacttatgaggatcttccagaatttatgatgctagaaaagtcaaaatgtggtcttttctgtgcctttcagtttacatttacagtttaaggttcaataatttcagtatcactttgatcccttaaaatagtttatttcttaaagaggcaaaacttcttttaactaaagagaaatcagagaaattcagtgacaggcctgttgcagctggccatttgtggttggtgaactaaatcatccatcaactcagtgttagtgcacagccatctctttccactgtccagcacttatagtgcaaaacacaccaggtttcaaggtagaagtaaactgaaggcccactctgaggtgtgtccaatctccctccctatccaggttgaggatagatgaaggctggtcccaatgcccagagtaggttgtccaagaggccaaggtttgagtcaaaagagaattgccaagtccaaaaggctagatagaaagtaggagcccaggtattgagcccaaacagagaatgatgatcttgtcagagcaagcactgggaaatggggggcagaagggaagccctgagacactccggagataggccacaggcacttaggggcttttagtggctccttaataacctgcaggcccatgcccagtgccaaaacaagggccagattcatgtgatgcttctcagagaaggaagtagattagcaaatcaaaggtggtctcaacatttgccatgaataccttccaagatcttgcaaatccacaaactcatacatgccagtatggctctaggattttcacagtaaaatggcaatagtaccacctgccacagattatcatgaggactacatgagctcataaattatattccaacaacaaattcaggttgagaatcagatgaacaaccaggcacaacaattatttaccaagtgactcactcagacacactagcatgtcatggactttggagtcacttaagaggagtcaaaaccatgaatgtacaagatcttccagggtcatggacagtcctggcactaaatttgaagagttcagcaggcatcttaacagctctaatgttgacagggttcaatgcagtgttaattagccagcaggagttctggaaaaactggagatcatttgagtatacctgaaaatgatacttttaattcaaatttttatggtgaggtaatttttattttgggcagaaaatcagaacggacatcatcatggatgcatgttgcagcctaaatccagccattgatattgggcaggtaggtgctggcccatctgggcagatgccccttcctgggagtcatttcagggtaggtaaaggccttctaaaaatgacacaatgtcacaaagcttgaaattgtccccctccagattgaaggtttgtttattcagggaatggggctttataccactgaagaactgaaatattccccagaaggtgtcctgtactctcggagcccagatgagtacaaaattccaaccatcactgatgtcccagaggagttcaatgtctccttgctgccatcmtcacaaaccccactaaccatctattcgtctaaggtaagcatccaaacctaccactgcacggtgtcatggatcrggtagcacaggacagatgaaagcaggtggacaaaatagtaaatcaatgttaactgttatcaggaacaaatcattatagactgctagaatttggagatgactcacccatggcaatcgtgagccaagaattttaataatttcctctttcactgaaaactctaaaactcgccaaaaagctttgacttcttaatagaataacacttttacttaagaccctgaagactataatattaaacaggattggaggcgcaatgcgactgaaatcctagcagtggcagcatggacagaaccctggactgaggtcgcagaagacctgcgttcctgccacagccctatcccctccccatggtcttaggcaaatcactcacctctgaggggctcagggtcctcaccatacccagaaatgcatctagaacagtggttctcaactgggagtgggggaagtgggggaagtgattttgtacaaggcagcccccgaccccattacaaagaattatctggcacaaaatgttactagcatcagaaagcaaagacatcaacccttaataattgctaaagtaatgaaactgcaaattaaaataaagatcattatttgtttgccttgctctatgcagattacgtgaaaaccaccctcagagtaagaacttcatctagggttgagatgtattgttaaagtttcttgactcctcttaagatattaaaatmtttcctggccatggtggtrcacatctatagctccagctactcaggaggctgaagcaggggattgcttgagcccaggaattcaagaccagcctgggtaatcaataaataagatcttttgggagacttcttgctagtacccatcctccaaaaaaaaaaaaaaagtatccaactccatctgtagaaatttcatcatgtccaaactggatcccactgtcagcccaggaacaccaggaacttcctctagacctatagtgatgaggtcagggcaaacctgaaaggaaggacaatcaatggggcctttggattctcatcgaactggaaatcactctaaggggaaaaggcaaaagggagctaagagcccacagagagcagcttttaagccaccaagagtaacacagggcagaaaggactcttgagtccttgtagttgcagacagccactcacaagcagacactcaggaaaatcatgggtttgcaggtcccacatggagggtactatgtagaaacaacagagagctaccaggcaccgggagctgtgctaggtgcttttgcgtttcctgatccttgcaacacccaataaagttggcatcactgcccacacttcactgacaaaggaacagaggagattatctcacttacccagagaaacayggggagtaagggccaggattcagactcagtctcactaacttaagggtcacaaattggtggtctactggctaaatctagcctgaagatgtacttttctttggcctacacagtgtttttacaagtcagggaattttactttaaaatacagatatctaaattctcttgagaaaatggatgatctggtaattttggctgcattcttggaaaggcaacaactaactacaaccaaagaacagctgcccttatagacaggacatgggggtgctcttcctcaccttactttccactgctccttattgtccttcatctgcctgcatcactcattgacaatacctgcctgttccttgcagatgatgggtttacaacctttcatctggtatcaaagtctgtactctttcttctagagtaccctgcctatcctgaccctgaagttaaaaaaggcatttttctctctgctgataaaactggctagttcaatccattgaatgtgttttactaaatagggtactttcccattaccacgcaaagacactcatacacacacacatacacacatacatacctttcctagggaacaaaatttaacccagacgggattcaagatctgggaaattcagattatgctgggactttttttctttgtctttgcttttttttttttgagatgtaatcttgctctgtcacccaactggagtgcaatggcattatcttggctcactgcaacctccaactcccgggttcaagcaattcttctgcctcagtctcccaaatagctaggactacagacgcgcaccaccacgcccagctaatttttgtatttttagtagagacggggtttcaccatgttgggcaggatggtcttgatctcttgacctcatgatccatccgcctcggcctcccaaagtgctaggattacaggcgtgagccaccaagcccagcctatgctgggatttttaagactactcaagcttctgattcagtcagtaagtcagccaacaaacatttattgagaagattttgtgtacaaaacactgtgcaggggttggggacacaatggtgaacgagacctggcccctaccctctagaaacttgtagtgtagtatggaagtttcttaaaccaatgtgccttcttacagggcctcggggagtctgggatgttcctggggtcatctgtgttctttgccattgctgacgctgtggccgcagtgcgaagagaaagagacatagctgaggacttcacggtgaagagcccagcaacrccagaatgggttcgaatggcctgygcagatcgattcacagaaatggtaggaaattgtttattttcctaaaaggtgatttgtctatttcctgcttcttagacctcttgggtaaatgtataacctaagctgtgtctagctaatcaaattatgaaatgaaaaaagcaaatcacacaaatacaccttgtatacatgtagtaattttaacttttaaaaaagtatttcccaagtgttaatttgatcatcttagcaaccctgaagtatgataatttattaatatcatgctgcagccaggcacggtggctcacrcaagtaatcccagtactttgggaggccaaggtgggcgratcacgaggtcaggagatcgagaccacctggctaactcggtgaaaccccgtctctactaaaaatacaaaaaattagccaggcatggtggcacgcacctgtagtcccagctactcaggaggctgaggcaggagaatcgcttgaacccaggaggcagagattgcagtgagccaagatcacgccactgcactccagcctggcgaagagtgagactccgtctcaaaaaaataaaaaataaaaataaaaagtatatatattaaaaatgctgcaaaaactaatagctaaatggaaaggaactgactgatttctccaaacagtggttaagtattccctccctctatcctaccaactccatcctgcccttcaacaaaaacaaacacacacatacagaaatccatgtgtcatatagccatatttgataatgtcactttctgtgttccctatacagagagtatacacagactgcctgtcatttagaagtagggtgatcccattgcaagctactgcctttctccttcattctgtttcataccaatgcctccaagcccgggagagggaggcctagggagttatccatggggatacacacatggcaaatcccacctgctgaaggttacagataagcaacttcccagaggtcatcgagcctcgcctttgccaatttcctaagcatcctaatttaagtaataccaggtagcattacgtgactgagcaccaaactaaacattttacacgtattagtcattacagcaactctatcaggtaactgctggtattttcttcattttactattgaggaaataggtgcaataactttcccaagatcacacacctagcatttgggggccaagattcaaacccaggctgcctggcttcactataatatatggtctctcagagagaaaagagttgattctccacttcttaaaaggcaatttctattttcaaatctatattaaaagaagcccaaatacttaactgacctcttcaaaataaccaaccatagagtgaaaagatcttatagaaatattgcttaaaaggaagtgtcataattattaatttccttcccctacataacctattcctatttccatcttcaaatctaactcaacaatatttcttatactccaataataccagtcaccctgtaatttccctccaagtcttctcccagtctatggatctgaccctcatctgattccattgtctacagcaatgattacaatcacctgcctctggacagatgccctcctcagatgggcagggccgggaaaccagcaccctccacccactccaggaactcctctgtgcggatcttggcctagaggtcagtcatctgtccgttcctgactctgctggtgacgtgatcactgtagaatggtgtcatctcataccccaaaagcataagcacttctgacctttaaaaaatgttcttattcacattttgcaataataaataccctcttctggaatggggcagattaagaaaactaaaaaacacaaaaaacaaaaatatacttctaatcttcctttcttgcctgaggttaatgttttcagtcttccaatggtctggctcctagaaaatgaattccttcatgtctaagatttcaggctgttttgaatagtccagttgtctggcaaagtagctctgtcacatacaatggtaagaagtgaaacactttgatttcatttaccatttgggacttagcttcttagctacctggtccatatgatgaaaccatattttctctcaagtctgatggttccttgataagactaacatatctttgcagatataaatcatctactaatttgtgcccatcaatcaaatgctcaatgttagaataacctagcattttctaaaatactcgtagataaatggtttataaatatcacttcatgttataacctatgtttgctattttagacctccttttaataacatacattgcatttcgtctttgtaaaagtaacatatgtccgttactgaaaaattagaaaatgctgaaaagaataaggtgaagttaaaatcagccataatcccaccaaccagaactaactataaccatgttttggagtgtgagcgtgcatgtgtgtgtgtgtgtgtgkacatttttaaccatcctttaatttatatgtttatatgtacaatatatcttatttgtaaactcatttaataaaatcaggatatccctgacgtaagtcttgaaaagatttgaacagtataattgggaatgactctgctgagcctcagtcacagaaaaatctggattgggaatttcatgggaaaagtatcccatgaagcatcactcaaaaaatagttgcttaaacacaaaaagagaatacctggccaaactcgtttatcctacaactcttaatctttgtctatagctactggaataaatttgaggggtgagggcaggacagaatgtttaacttttcaataataagccccttgttattaaggctacttagaccatatggagaatgatcatttatgcttttttttyytcttttggagacagggtcttgctctgttgcccaggctggagtgcagtgttgcaatctcagctcactgcaccctctacctcccaggttcaagtgattctcctgcctcagcctcctaagtagctaggattacaggggtgtaccaccatgcccagctaattttggtatttttagtagagatggggtttcaccatgttggccaggctggcctggaactcctgtcctcatgattcgcccacctcagccttccacagtgctgggattacaggcatgagccaccgtgactggccataatcatttatccttcatactgataattacctacaatattcctaaccattgcactgacctcacatgtatttgaaacaatgaaaagaaagccctctccaaatacatgagaagacttcagttagtttgttcgagcctccagaccctgtctcctcaactgttcaccaacagagagaaggggctggttagaagccagccttgattgggacctcccaaggagtgcrgagaggaggaagtcctgggtcttagtttaacagaggccaagaaacacacaaaatttagattcttctactattacctgttgcaggaaatggcaatactcatctatctatacagaaacataaacaagaaacccaggagccatcctggcatttctctccctcatactcagtagctagtccttcaccatgtcctgttcattttcacccccaacaatttcttgacccagtccattttctccatccttaaccactatattattcattcatcccacaaacagatgttgagcatctaatgtgtgccaggcattgttctacagaacaattctggggctacagtagtgaatgaaacagagaccccctaccttggtggagtttagtttctggtgaccctgaagctacctaccatctctccaccctggatcaaagctgcctcctggctgatctctctacaccccctgcagccagaagcttgtggtgtggcaaagcagaccatgccacaccagcacacacattggcaaaaagcttccctttgctcataggagacagaaaacttcttaacttgccttcttgagcctacaaaccttcagagtccagcatggccaaccccacccacctctccagccacccatgaccccacccagccacacttgtcttcttctgtcattcctcatgttaaggacagagacgctcactcctgctttagggcctctgccatgctcttccttctccttggaaccatcttcttctgttcaacttgttaactcctactcagctttaatcaaattcaacaaattcatttgatcccttcctttctgcatagtttgaggtcccaggaatataaggtccctgctctcaaggcatttatagtctagcagggaaggaagacagtgactgtgaattataagtgcttggctgaccctggggtatactactacatcccacagaataaaacctttctgacttagcctcgctcttttcttgaagtcagaggggtcatagatgggatcccactttggttactcgtcatgcaattgttcatttatctaacatatttattgagtaccttccatgtgccaggcactgctggggaactaaaaaaatagtggtgagcaaggcaatctctgccggcatagagcttacattctgtgggggaagccagacagtaagcaagtaaacaaacgcacaatataattgcaagcagtattgaatactgtgaaggaaaattgaagagaagggagctagaaagtgatggagagattatttgattatagtttcttggggaagttccctctgagagtgttcacatttgagccaaagcctgaatgaagcaagggaccaagtataaagctggcaatgatacagtccaggccaagaacagctcatgcaaaggccctgcagcttcagaagaatcaaagccacttgggactaagcagccctcaaaagtggcccttttgtgtctgatttgcccctctggtagaaaagtgtctgatttgcctctctggtagaaaaatcttacaattgttgttctccatggctgagagataaaatagaatttgtggccacaccatttattttcacatcagcgagtgaaacctggatagtccttcttccaatcagcaactttcctagtctttatcatatgctttatcacacttcaggtctacttctttagatctttagtgactataattaattcatccccttagaagccacagcaggcctcctgaagttcttatagcctggctgctcacacagaccaatttctaaagcatcttagaacaaatctgaccccatatcagaatttactcttttttttttttgagacagagtctctgtttcccaggctggagtgcagtggtgcagttttggctcactgcagcctccgcctccaggattcaagcgattctcctgcgtcagcctcctgagtagctgggattacaggtgcacgccaccacgcccggctaatctttgtattttcagtagagacagggtttcaccatgttggttatgtctcaaactcttgacttcgtgatccacctgcctcagcttcccaaagtgctgagattacaggcatgaaccaccgtgccagccagaatttacatttttaatacatttgatcaaattacaacatggtttttaattgaaatatataatgattcacactggtacacaatgctgtactatgcaaatgtgtatatagaaagagagaaagaataagaaacatatatattaacagtctttgcattgggcctttgaatgcccttgtcaaaacacaatttgttctaatgaataagaaggtcagggagtcagagtgtctgtatactagagcatgagtattgaaaagttcaagacctcctcttttaataacctccttatagccataaggtaaataacagcccgactagatctatttcttaaatagaaatgatggtaaaacactcagtacttttccctcggaattaaataaaataatgcatgtaaaaatactgtgtaaatatgagtcactctgtaaatattagtgttaaggtcatcaccaaaaacccataaactgttaatgaccttcttcaaaatatgcctctcccaaaaggcttgaaaagtgtttccacattaaatcaagttgacctgctgaggccagaataaacaacaactcttctaactagcagcttcattttcatgggtaaattagcttcaaaaaaggcaggcattggtaagaagcctaaggcatgtttgttaccaaaaaaatcatactgtatgaatgagcatttactatgtcaaaaggttttttttttttttttaacatgtttgggtttgtttaaccttaatcacagcctaatgctggctgccatttttgcatggctgtttctcaggtggttaatttctggtgaggacagtgttgctggtttctactctgagcccagcaggtcagtccggctcaactaggcgtggccagaaacatcatctctatgtaatttccttttcggtgatgggagaaagaaaaatatgtatttcctggaaaatgtgttttgtacagtcatcttaaattccacaaggggaaaaaagtaaacttcctttaaagatatacatatttaacactttcatatgaggacttctccttagaaacagtgatttcatttaaaaaaaatatatatttaggattcagagacatgaagggttccataccctcaaaaattagaaaaatactgccttggagaatgtggaataggcagacattttttacatgttatcttaatatcaccaacagcaaaacgttatttattgagtaatcaccaaatgtggtctatgtgggctgccatagtgggaggccatgtagagccaattaacagcttcagtttccatctcctggaagttaaaatcagacacctcagcttggaaacaggtttataagcaggtttcagcttaccccacttctgaaggggcagcctggaacacgctgactcataagaaatctttgcaatcataacaaatggctcatgtcctgcgttaggctgacgcatgatcttatcgtaccctagtgggaaaagtccttcattcttagatcagtcctcagttccaaatggccatgcctgtccttcatagaatctgctattctatgagactgaccaatggctagtttctaacggccttcaccttcttcctacgccgcaaaccctaatacagtctccatccacggactcccctcctttacagcactgcgtctctcacatccccacgtctcattttccctccctgcttcttttgcatttctagatgcccagactcagtgagaactggcagcattaaaagcgccacctgtttagttcagtatctggagcccttcctccctgctgaaggaggagaggcacgtgaacattttgcatgctgccagacgcctggtttacccactcctctcgggcagttcactcccaaacactagccgttcaagatgaagcctgctcaaccccatactctatacacagccctggatttctctgagctgggggagacatctaccagccctacaagactgtattctatttcttggggctcatttaccacaacatgtgaaaacatgaaatctccagcctgttcagctataatctcagctacagataattggtagggccttagaccagcacggacatgcttcggtcacctggattccttgagatggaacacagagcagactgcacggctcaggacagactgagagtagagtctcccatggtgtcttcctcagaatgctcaacctattgacctgttcccatgagacacatacacatacatgcatgcatgtactcacacagacacgcatgtacgcacacagacacacatgcacacgcacactcagacaggcatgtactcattcttaaccacattcttctagcctctcatgctgtcttggaagaggttttattggctgtgaaactgattccacattgaatatgtttgtcccaggatgcaggaactgaatcatttccctgcaatgcttggtgacatttcacagagtagccattcttactcctgaagggagagtctctgatactgttattgaatgtatatttttgtatctaaaaactctcctatgtgatctcttcctccttaggtttgtaggagcagaggaaagggagagatagggagaacacctaaaagggaagaggcaaaagctggaggcattcctcagtttaagggaggaaataagagatgcagaatataaaacaggagaaaagagagccatctcatcctgccaaggagaagagttacaatgaactattttagcttagtgcttgagacaggccctgagtagagtgaatctgggtttcaattccagctctactttttttttgagatggagtcttgctctgtcacccaggctggagtgcagtggcacaatctcggctcactgcaaccaccgcctcccaggttaaagtgatcctcccacctcggcctcccgagtagctgggactacaggtgcacaccaccatacccagctagtttttgtattttttgtagagacaaggtttcaccatgttgcccaggctggtgtcaaactcctgagctcaagcgatctgcccacctcagcctcccaaagtgcagggattacaggcatgaggcacaggacccagccccagctctacctttgatgctttatttaagttctctgatcactcagttttcttatctataaaatgagggagaggtggggtagtggagagaataactctagttactttacaggattgttgtgagaattgaataagataatactaaagcagttggcagttgttgcacatagtaaatggtcaatacatattgatgatgatgatggtgaagatgattgagtcagggatccctaagaccacccttaggtttaaagattcgctagaagtggccaggcacagaggctcttgcctgtaaccccagcactttggaaggctgaggcaggaggatcacttgagatcagaagttcaagatcagcctgggcaacacagcgagacagataattggcagggccttagaccagcacggacatgcttcagtcacctggattccttgagatggaacatagatcagactgcatggctcaggacagactgagagtagagtctcccatggtgtcttcctcagaatgctcaacctattgacctgttcccatgagacacacacacatacatgcatgcatgtactcacacagacatgcatgtacgcacacagacacacatgcacgcacacactcagacaggcatgtactcattcttaaccacattcttctagcctctcatgctgtcttggaagaggttttattggctgtgaaactggttccacattgaatacgtttgtcccaggatgcaggaactgaattatttccctgcaatgcttgatgacatttcacagagtagccattcttactcctaaagagagagtctctgatactgttattgaatgtatatttgtgtctctaccaaaacccaaaaaaattagccaggcatggtagcgcatgcctatagtcccagctactcaggaggctaaggttggaggatcgcctgagcccaggaatttgaggctgcagtgagcttgattgtgccactgcactccagcctgggtgatagagcaggaccctgtctttaaaaaaaaaaaaaaaaaaaagagagactaaaaattccataactttagcagaatagtagacccaaatctgccacagctaaactgaggaattttgccctgtgtccagcccagaccttgcagaacaggctcattctaaagaagagagccaagaagctcccacagggacagctaagaagagaatagggaaggccctttgggaaggcaaacccttcgtttacatttcaatacagagggcaaaaagtaagaatagaatttaggaaaatgtcctgaatggtagactggtgggtgaattatttggcttctttttgtatttttgtgaaataaatacatattaggaggggggagaaagctttttggaaccttcatagctttccatcattggggaaaagcttgctttgctttttaacacatttgtaactaaaagccaacacttcaaacaaaaacgtagcaggggagaggagagatgtgtgttctgctttgggcttgaacctaaggggaagaattccccaaagaggagacaggcattgaggaccacgaaaaaggatgaataattctcggagcttgtagcccaagagagtgaaaagaggcttgggtttgaccagcaagaacacaatatcacacaaaccatttgactaaaggtgcacacagggctgttatcatatcgctgtaaagaagtccaggtgtgtgggctccagtgtacacacctgccagcctagccacatccctactcccaaatgaattcatgggatgtgtaattctctttgggattcatatctgggaagcaaagaagataggtaactcaccgaaatgccctcttactaagccaggcgcagtggctcatgcctgtaatcccagcactttgggaggccaaggcaggtggatcacttgaggccaggagttccagaccaacctggcctacatggtgaaaccctgtatctactaaatacaaaaatgagccaggcgtggaggcacacacctgtaatcccagctactcaggagactgaggcacgagaatcacttgaacctgggaagaggaggttgcagtgagctgagatcataccactgcgctccagcctaggtgacagagcaagactccatctccaaaaaaaaaaaaaaaaaaaaaatctgaagtgccgtcttatttagcaacattaggtaaaacagaggagaggacaacacaaacccaccttcttttcacagttgtcaattgaagggaatgacacagtcccatgccccaggagccaggaacatccagcctcctctcatccaaaaaatgttttaaacccaaagacttgatgtaatgctcctgttgaaataaatagtgttatggtatattaagtgtttaatttgctttgtttcttagatcccaagagatgaccctgagacatttaaaccttggtctatccctatagcataacactgctatcattccctaaaaggtaagatcaataagctaaaagataattattcaaagtgggggaaaaaaaatcagccaatccaggctttcaaacttcgttctatagaaatcaagaattgcacaagtgcttaaatcatgcttcattttaaagtcaatatatcttatccaatatttaagtcctttaacactaaatatgcatggttctgggaactgacaaagaaaggccagggtgttttaaccaacatgatagtttttttaattttaaaataaaatatgaaaatacactggattaaaatatttaaaaagcctgctccctgattcttttaagaatcacaactggaatgcaaaaaaacaaactgaaatccactgattactccatttataattaactagcactatttggaagagttatctctttgtatttattgagttcaactgctacaattttgtgctgctgcttaacactacacacagagcactgaaggctttggagagtggccacagaaactccttgggaaatatatgctgataagaaaaaacatggtttttttgttacaaaattaaacttctactttctgcacacttactgggcaataactgaaaacactggggaagagagagaactatggcataaattcagataaaataaaataaaattttttcattaaaatctaattttccaatgtaactgtttaaaaacacccacaggtattaacacatataatatacatttaattccattgtgctttgtcatatgagaacaacttgtattgatgtttttactaaatcagactaaataaccgatgagaatttgcttctcctttacaacacaaatcaaaataagcaacacttaaaattacatcttacattattgtaagatagtcattttaaaacattcaccaacaagccaggcatggtggctcatgcctgtaatcccagcactttgggaggccaaggcaggtggatggcttgagttcaggagttcaagaccagcctgggcaacatggtgaaaccccgtctgtacaccacctggcatggtgacacatgcctgtagtcccagctacttggaggcttggaggctgaggtaggaggattgcttgagtccagaagatggaggttgcagtgagccaaaattgtgccactggactccagcctgggcaacggagtgaaaccctatctcagaaacacacacacacaaatgtagggcagaattatctaagctctttaattattctctctttctatccttctttctctttctaagtattaaagttaaatgtgaacatgatggcaaatccactctaattcttatgtacaacaaggcatataaaatacatggcatcgtgcctgacacatagtactcaatatagttacacacacacaaagacacacacacattcagataaaatgccaaattttaactaactagacaccaccagtgaatgaatgggattgtcaagtttttgtacagacttttttttttttgggtcgggggtgggacatggtctcgctctgtcacccaggctagagtgcagtagtccgatctcggctcactgcaacctccgcctcccaggttcaagcaattctcgtgtctcagcctcccaagtagctgggactacaggcacacaccaccacacccagcttatttttttgtagagacagagcattgccatgttggccagcctggtctcaaactcctgacctcaagtaattggaccgcctaggcctcccaaagtgctaggattacaggtgtgagtcactgtgcccagtctgtacagaagttaaaataaagaccatcctctgctatgcatggtggcttatgcctgtaatcccagaacttcaggaggccagaatgggaggatcacttcagcccaggagttcaagaccagcctgggcgacatagcaagaccctgtctctattttttttaattaaaattaaaaagtaaagaattttttaaaagaccgtcctcaaattgcaagacaaatttaaaaagcaaaaaaaagcctcttgtcactttaccatttataattacttctgtgtgtcagaatgttatccatgccatgaatcaacacaagatgcagatataaattgcattctgagtctgtaattgttatcctttacctgcaatttcaaatttttacattcttcaaagtaacataattggctcttatatatttgctttataaggaagtgttcaacactgatcttataaatcaaatttataccacactaaaaacatacacatgtgagtatgttccccatgacattttaaacctctgctaaaaatattcaaaaacttctgatgtcatccagcttcttattttataaatgaagacacggagcccagaggagaatggtaactacccaaacgtacttattcatagctgtaaatcttatcaacccaattgtcaatcatttattgttcttctccctatatataaagttgagagatttgcacactttgtttcataattattgtcttgtctttttttttttccaggtgtttcagtttttcacaagtaaaaagatggcttgttaatcctaactgggttccaaacttatattcttatactgttgtagaaaaaaatagacacaaaatttagaaacgttatccaactttgattatgttaacccaatgaatcattatttgcaaagcatttcacttagactttccagcctagaggccaccagaaaagcactgctgtatccacagtaagcaagtttagtgctgatttgtttctgaaaagatcacgtaaatgttgctgtaaaagcaaacttttcctttctgtgtccatccaatctaaatggactggtaatacaggttatgattatagaatgaaagacacttcttggtagataaatatatgatgacttttcccaggggtgtatttgattcagtagccacaagagagttctgcaggttttgttttgccatggattgaccataagtctatgtacgtgcatttgacagcaaaggagtggtatttccctcatgcacatctactattcaactgattaacattcttttggatttggaggaggggaaaaagcaatataaaaacattttcaatatcttgcccccaacccctctgtgttgttgttgctgttgttgaaaaacatccaatctggtatcagagtttaagaaatattgcatatttcagtttcccatagattgaagtgagaacataaagcaaaagaattataaattgtaattaccccctacattgtggtttaaaatatgcaagatcctctctaccaataactttgagaaggaaaaacaaaagaaaaaaagaaataagatatatgggatccaccaaattacattcatctgagtttagaggccttcagagagaggaaccagcgtacaaattaggccctatttgaccagaaagtcaggggcaagctgattttctactagccagatttcacacgatcaggctccccaaggcatggtctgcagtgacccctgcagtggccgaaggaggagaggcagagctgagaaygctgggtgttgggtgagagaaggtaggcaataaggcatacaatacagcccggaggaggccgaaggtccttaaagccatgggcacgttgtcatgagaggctggggcatagctgtccacaggcccatctgcggacattggaggcttccctacaccacaggagcccaagagataaagcagcacaggagcagaaagaggaggaggcaggagcagaagggtcatgggcaggacaaaaattacgcaagacacaggaacattaagagctgagaaccttagtgggagtggctggggtgaaataagttgaaagtattttttttacttttttttagctcttttgaaaataaaatccttaatctaataagaatgtgagaagtttgtcttatcatgtgtatcattttaaatgatggtaaattgtatttttttttttagaatcttgtcagttagagctaaggatagttactgggcatttattttctatttgtcatggttcaaaactacaaagcactaaacatagaggggcttgaataaaaattatttctgtgagttgatgcactaaaatctggatggcatggatgttaataaaatacttttttaaaaagatacagttgaagccatatatttgaaaccagttctttgggctcaataaacatcattaaaatatgaaacagactaaaatgtttaaataagtaatacattaacatggctcgaatgttttaaaaaaaggtaaagcaaagacttactctcatactgctatggcctgaatgtttatgtcaccccagaattcatacattcaaacttaaacctaaaaggtggtggtattaagaagtggggccggccgggcgcggtggctcacgcctgtaatcccagcactttgggaggccgaggcgggcggatcacgaggtcaggagatcgagaccatcccggctaacacggtgaaaccccgtctctactaaaaatacaaaaaattagccgggcgtagtggcgggcgcctgtagtcccagctacttgggaggctgaggcaggagaatggcgtgaacccgggaggcggagcttgcagtgagccgagatcccgccactgcactccagcctgggcgacagagcgagactccgtctcaaaaaaaaaaaaaaaaaaaagaagtggggccattgggaagtgattaggtcatgaggactccactttcatgaatgggattagtgcccttataaaaaaaagaccccctacagcgagttaacctcctccactacatgagaacactgcaagaagacaccatctgtgaaccagagaggaggcccttatcaaatactgaatctgctagcagctggatcttggacttctcagcctccagaactgggttctgagcaaaacatttctgtctatgagcaaaacatttctgtttataagccacccagtttatggtatttgtgttatagcagcccaaaccaactaagacacataccacccccatccatccaattctcacacatgcacagagtataacttctgctttcccagaaagcccagcatgtaacctgtactagaatgcccagccactcttggcaaagtcagagctactcagctggccctacaaatggacaggacacaacggccaaatgtcagaatgtttgaggaagtctagggcaacaggacaagtacctggttcctgcccttattttcacacctgctgtgccccttctctctgtctaaacaattccattctaccagcttcccaacatcagcagcagcctgatgcctgtaagggtgaggaagcataacccttcatgctcatcatgggcttcatggaacctcctatttcttactccctgggcctcggagcacaggagacatttgtactcttgccatctgagcctgagttctctgagtaggttttctcttttgtaaagaaaaacagactgctcccggttccatcccagaacagtgaaaattaacactttatctgtctcatagatttgagtaggcaaatagcaaaaagataagctttctaatttgtaagatgtcaaaaggaagtcaaaaaattaggcagaaatagttggagacagaaaataatggaattttctcagtcccgccacacaaccctgaaagtcagtgttaagatgccaccgagtacaaagcaatagtgttccttcctttgccgagccacacaggacaggctcccctgtgctcctgtaacttcacatttagatgattttactggctagctattggtcttgttccaaaccattctgccaagataatatttctcaacatctgtaaccacccactgtcactatgtaaaagagttgcattcaacaggacagtttcttcttccaaaagggactttactgtcttctgtaaattggtcacctgttgtttttatttgactgctgtctcttcctttgggaaattatccatcctccactccatgtgttccaaacaagctgctgggaaaggaatgagataagctgggttagagtctctcctgagagataggctcttgcg

SEQ ID NO: 94093 - DNA, 76913 bp, Homo sapiens
aagccctgtccccagcccttgcagtgtttctgtatcaactccacgccagcgcggttctccatttttcttagcctcttaattaggacagggtcggatttcagcttttatccaccgggtttatcctgttgcaaagcagagtacacagttttagacacaaaataattgcagttgaaatggatacacattctggtggtaagatttggaaacgtggtatttgatggaaccctgttgtaacatctaaaactctttggattttttaaaaacgtattctgtgtaatccagtaaaaatttggattcgtccagtatttatagagtagattattaaccgcagtggtgctcattccagggccctgccgggtattttgtgctatggatgtgagtacggcaaagagactgaattaagctgttttgtatttggaatcggattgttcacgttgcaacgttgctgcaatgataaatggatggatactctttacactttgaagtggatttaatcttcacttttaagccccttcatctcacctacacagcaggagagctttggctttgatatttggggaaatggctgttattttacttacagatcacgctattctagtcttggcctagttaaaagcaaatgagtactttagtttctacaagatttattggccactacttggtctgcacaaaagactataacacttggccggacgcggtggctcacgcctgtaatcctaccactttgggaggccgaggcgggcgaattgcctgagatcaggagttcgggaccagcttgggcaacatggtgaaaccctgtctctactaaaaatacaaaaaattagcagggcatggtggcgcgtgcctgtagtcccagctattggggaggctgagacagaatcacttgaacctaggaggggaggttgcagtgaaccgagattgtgccactgcactccagcctgggcgacagagcaagactctccggaaaaaaagagaaaaaaagactacgacaagataacattatgtggaaacaaacattatgtcgaatacagagtatagagggagtacaaagttgaataaggaaaattacgcctttccctcaaaaagcatataagtaatttaaaagtacaatagtaagaaatagaccggttcttctattcctagcattcattggctctagaatgaatagtgtttatctgaactcaagaataaaattggaagtaatttaccctttacaaagataagatggagtttaacctaggttttcttttaaaaaaaaaaaaatcacaacacagtacaatctgagtaatgattttgttcctctagttatgtactctcttcacatacacataaaccaaaaaggcatcttaagcattcaacaaggaatattgacgagtgtctaccatgtgccaactactggtccgtgcgctggggatacagtagtgaaaagttttttggagctttacattccataaaacttttagcccaccccttgggataaaaagtcaaaaaagattttatcttttttggaacaaacttagaagatcaagcaataaaacataattacctttgataacgaattttaaatgtcattgaagaaaggtgcttaattttgaagatacgttgaagaatcttgtctctttcagttttgtttcctgtggcgtgttgcaaaaatggatgttaaaacttttccgtagaacagaaatttcaaatggattaaaaagaaacatttaaaattaaactttttttctaaaattatatttccagtctaactgaaaatgctcaaacctatgagagtcagatataagagatgaacatataattctttttctttttttgagacggagtcttgctcttgtcacccagactggagtgcagtggcgtgatctcagctcactgcaacctccgcctcccgggttcaagcgattctcctgcctcagcctcctgagtagctgggattacgggtgccggacgccatgcccaactaatttttgtatttttagtagagacggagttttgtcatgttggcccaggctggtctcgaactcctgacctcaggtgatctgcctgtcttggcctcccaaagtgctgggattacaggcgtgaaccaccgcgcctggccaagcatagaattgtttaagtttcaaagtgcttaaaaaataaatgcaaactcattcatcttaaacttgaaaacccctaaaccatatgctaccgtaatcaactctacttctgatttacaagattttgccttgaaagaaaatgtaatactgagaacttgattttgttattgttgtcattaaggactgagaaatggcattagtgatattttggaatcattaactttaacacacttcctcgttctgacctagattggagagggaggtgacttcaattaaacggatcctctttttatgtatatatggtgtattagtcagggttctctagagggacagaactaataggatggagatatatatatatataatgtatatacatatatatgtttattaagtactaacttacataatcacaaggtcccacaatagactgtccgcaagctgaggagcaaggagagccagtctgagtcccaaaactgaagaacttggagtctgatgttcgagggcaggaagcacccagcacaggagaaagatgtaggctgggaggtatagtaatgaagagcattagcagtctattttactttaccttaatattcaacctgcagatattcaatatgcaaaaagatcacatttctaaccatcattaggtaatgagctatgtttctccttgttttgatgatccgcaaaagccttaagaaaacagaattagctgccgggcacggtggctcatgcctgtaatcccagcactttcagagactgaggtgggcggatcacctggggtcgggagttcaagaccagcctgactaacatggagaaaccccatctgtactaaaaatacaaaattagctgggcatggtggcacatgcctgtaatcccagctactcaggagacaagcaggagaattgcttgaacccgggagacgtgagaaagaggcaggagaatcgcttgaacccaggagatcacgccattgcactccagcctgggcaacaagagtgaaactccatctcaaaaaaaaaaaaaagaaaaaagagaaaagagaattggccaggtatggtggcttaggccggtattcccaccgctttgggaggctgaggtggctggatcacttgaggtcaggagttccagagtcccagaccagcctggccaacatgatgaaaccccatctctactaaaaatacaaaaattagctgagcgtggtggcacgcacctgtaatcccagctactcgggaggctgaggcagaagaatcacttgaatctgggaggtggaggttgcagtgagccactgcactccagcctgggtgatagagtgagactctgtctcaaaaataaatacataaaaataaaaataaaaatgcaaaaattagctgggcacggtggtgtgcacttgtaatctcagctactgtggaggctgaagcaggaggattgcttgaaccaggaggcagaggctgcagtgaacccagatcaggccactgcactccagcctgggtgacagagcaagactgcctcaaaaaaaaaaaagaaaacataatagaatcactgccagtgaggggctaaaaacattacatgaattttctgaagacagaagatactattgttaatttaaaagttgtgatgttctatgaacaattcaaatataccgcatgtccagattcatgtgcagatttgatcttcagtgttactaagctgctttcagaatctctgctccagttatttccttgaattcgtgtgttctcacagattgcaactgagctttttgttaatttgctttatttactggcacatctaatatctgaatcagctttatcaggtattttactacccagatttcttcccacctgcacaattaatcccttttgtaagggattaattcatcaacattcaacaagcccttttatttcttctaaaatttttttttccagccacagcaaaacaaaacaaacaaacaaaacccaagtccttttctgaatttagtgcagggcacagtgagaagttcaaaataatgtacaatttaagatactcagggagataaatatacacacagcactggaaagttacaaaataacataaggcaggcaagaagtgataatattcaggagaatttagagtagttaggtaacatgagtggttagcattgatgtaggctatagggtctcctaattctaacattttaaccttattaaattagacaatagattacattagactacagttagcttgaaacagaattgcagagttggactccaggatattgagaaactactctaggtacacacttgtttgtctctacttaaacctttgctttttaataaaacaccaaagcaaactaaaaacaacaacaaaaaaccagaggaacgtctcctgttttgagaactggaaaagcaaaggggactttttcttttttttgagacatcgtattgcaagacaccaatagaggcacttttttttttttcaggcggagtctccctctgttgcccaggctgcagtgcagtggtgtgatctcagctcactgtgagctctgcctcctgggttcaagcgattctcttgtctcagcctccccagtagctgggactacagatgcacgccaccacgcccggctaatttgtgtatttttagtagagacggggtttcaccatattggtcaggctggtctcgaactcctgacctcaggtgatccatccgcctcagcctcccaaagtgctgggattacaggtgtgagccactgcgcctggcccaatagaggcacgtttgtcaagctattgtaactttcagaatgtttttgttctcaagatacgggatcatggtgggggaggcatgctgtgtattggagtgcagacatggtgtgtgttgggttgcacactgtgtattggggtgcacactgtattggggtgtagatgtgtgggggcgcacactctattgaggtgcacattgcattggaatgcagacagtgtttgctgggatgcacatgtgctgtgttggggtgcacactgtactggggtgcagacatggtgtgtgttagagtgcacagtgtattaggggtgcacactgtattggggtgtacactgtactggggtgcagacatggtgtgtgctggggtgcacactgtattggagtgcacactgtattgggatgctgatgtggtgtgtgctagggtgcatactgtgtattggggtgcagactgtatgctgggttgcacactgtgtatcggggtgcactgtgttgggatgctgatggtgtgctgcagtgcacactattggggtgcagatgtgtgtgctggggtgcacactgtattggggtgcacactgtattgggatgctgatgtgtgtgctggggtgcatactgtgtattggggtgcacacttcttggggtgcagactgtgtgttgggttgcacattgtgtatcggggtgcactgtgttgggatgctaacggtgtgctgcagtgcacactgtattggggcgcagatgtgtgtttggggtgcacactgtattggggtgcacactgtattggggtgctgacgtgtgttctggggtggacactgtgtattagcgtgctgacgtgggctgtgctgggatgcacacgtgcttcgctaacaggccagggcccggcaacagaagcttgcactgtaaacgctcctcccgcgcggcggacacagctccaggctggtaccgcgcgcacacggacgcctcgcaggacctgggctaataaggagaggagatcggcacggtaccgcctcttcccacggcctcccggcgcggcaccgccctcctccctccaccccgggccttccccgccccaacctcttcgggccctggttctccacccttgccgcgggcgactcgagccaggccaaagggaggcgctacctgaggactgcttccgggagtgggcgtggccccaagggcgtgggcggggcggggcggggccgtgctgctcttgagcgaccggcagcgtatccggcgtggctcccgtctccgcccagtcgtaggcgctggccgctgacatgttgaggactacgcgcggcccaggcctgggccccccgctgctccaggccgcgctgggccttgggcgggctgggtggcactggcctgcgggccgggcggcgagcggggggcgcgggcgggcctggctgcagcccacgggccgggagacgggtgtgcaggtgtacaacagcctcaccgggaggaaggaacccctaatcgtggcgcacgccgaagccgcctcctggtgggccgcgcgggactggggcacgggcgggggccgatcgtggcggagacttcccacggctgaacgggatctgggctcggggagggcgtttaggaagctgcatggagggcgccgttctagaagctgggggtgcgcggtgcttttgcaggtttgggtgtgaattgagcaagtatgaaaaccccggctattcatcccccagaagtgattactttaaaaattatatgatcattataactcagaatcgaatgtcctttcttgcaaatatgttccacacgatggattttaactttgtttccaggtatagctgtggaccaactgtatatgatcatgcgcaccttggccatgcttggtgagtttcctggatttgaattttcatacttcaaaggaccatttatttttgaaagccttttgctgatttcttttatctcttaagtggcaacttagggatgcagaataattcctacattccaggcattgtgggaaatgttacaacctcatttggttcttatagggattctgagcacttacacccgttttacaggtgaggaaactcagggagacaatggagcactgaaaaatgacccgttttggaactagatgttttttgctgggtttagtgacatcaagaggcctttgcggggtcccggggtcctgctgatcagtcattcctgggccccaccacttcttagcttcacagcactgagcaggtcactttattgctttgagtcctggtttcttcatctttgagatgggaatgataacttggatcttataacaattttagtaaataatgcccataaaatgctgcttaacactgtacctcacatgtgagatgtcacggggctcaatagtgattgagtaactttcctaagatgacacattgaagaggtattggaactggggtgaggcttggtttctctgactgcgaagtggttgctctcttgacctctttaactgtaagatgtactgcctcctacatttgccaaaattaccacttttcctaatatttcgtacatttccaaaatataatgtacaaaaatgacatattatagattttttaaaacttagtattgttcagtcctagactaaaagtaaaaagttacatttactctgtatactttttttttttcttgagacggagtcgctctgtcgcccaggctggagtgcagtggtgcaatctcggctcactgcaacctctgcctcccaggtccagttgccgcctcctggcagcaattctcctgcctcagcctccggagtagctgggattacaggcatgtaccaccacgcccggctaatttttgtatttttagtagagacggagtttcaccatgtcagccaggctggtctcgaactcctgacctcaaatgatccacctgccttggcctcccaaagtgttgggattacaggcatgaaccatcatgcccggcatactctgtatactttaaatatacatttttcccctttactttgggctaacatacttttaattatcaaaagcatatttcgacatctttcttgaattataaaatatgttggggaaatattaaaaacaaaacccccaccctggaaaacctttccacaaaggtagaagagaaagaaaacagttctgttactgaataagccttaaaccagaaggggatgagctaaaataactgcaaagacagaaagaaatctcatccttctatggagctttggggatacagcctgtctcagtctatgagtctgctgtaacaaaatatcctaaaatggatgacttataaacaacagaaatttctttctttctggggctaggaagtccaagatgaaggcaccagcaaatttggtgtctgttgagggtctgcctgctgtgtcctcacatggtagaaggtagagggaattctctgaggtctcttctatgagggcattaaccccagtcatgagctctctgcctccatgactttgtcactcccagaggctccacctcctaaaaccgtcaccttgggagttagggtttcaaccatgaatttggagggaagacaaacattcagaccatagcataacccattgcttcaggtgagttacagtgtggagtcagatgacaaggtaggcccatctcctcccaggacactgggaaacggggcgttattttccttgattacatttcagaggtgggtcccaggttttgaaattttcttgagttgtaaaactgccaagaggtttatttagccatttaaaagattgacatgcatttgaagaggactgaggaagaaatcctaaaagttgttggggagagaatctcttctcatttccaactaggagagtcaagtcttgcagtttaaatttgtataatatttacctttatgactacagaaaagaatacacatcttaagtgcgcagctgaatgcatgttataagctgtgtccacacagggccttcccaggggctggtgggagcttgggactctcctgttgaccaccttcctgtcagcctggccaacccctccaggcctttgctgggctggcctgccccacctccctctccccatctcagctctcctagcattgtactccttcagtggttatttatgcaaccatctgatgtcgttagcatgatgtaattatttcagctccagcaggacagggatgcacacagtgcctgctgcagaaaggtagaatttgagcaatgggtagcactcagttcactggaaagagacaccctgaaaaatagcctccaccatttccagaagaggtcagagggatggaaaccctgtttggggaaaacaaatagatcagtttggtgctaggggggaggagcaggggaagggatggggcgtcagttgcagccagactggggagggtgctgcgtggtctggcccagagagtttggatttcatgccatggtagacggagtcacactggagcgttttgagggaagactcttagcaaatgaatcatttcagcgatcacccagatgagcacactcacccagtggatggagaaaatggggcagaaagagccgggctgacggtagcatggttcatggtggagtcacagaagcaagctgaggtctcctgatgccatgttcttcagacttggctgcccggcacttgcaaggcgtgtgtgtgcgtgtttgtgtatagagtggcccctgtggtcacagcctgcctgcagcgtctcagggtctcaaattgctcatgaccctgcattccgccagctctgccaagctgtggagcctctgctgtctccaagggcagttccgggactcagcctgggctcctctgggccaagcaagggacttgactcttgttttcatttgctttaggttcctgtaatttttttcttgtaaatctcacatcttttagactctttcccaacttgaggtgaatgaaggagcatggtgatgagaatggtaataatagcttgtgtttttagaattcatgctgcacaggckgtaaggctggacagcagtcctgttaggtggtgggattttgccaaatttataagcaagccgactgagctgtaagaggttaattatcttgttgagttttggagatagttttgtccctggaatcaagatttggtctcagctgtgtttggagagggagggggtgtgtgggaggttaaagtgatacaataacatggctaggattcccccacaccaccctaagagaaaacaattttacgaactgaaatttaggccacatggatagcagaggtgagtgtgacattagataaccttgagttttaaggtaacttttatgggaaaacagattcttgagatgctaagtagattttaaacccttttagttttacaagtctgaattaccycagtgtagtatataaataagctggcatttttaaatattctacactagtgtgtgcattcttaggagtaatcttatatggctttaatgggatcgtacttgttttgatttggtatttgcttctgttttgtcatagtgaaaaattagaattactctagaacatgaacaagaatggtgaaaacacgatcttaactgagagattgtattatgagtgaatttttatacaattaaatagacttcaactcacttaagcaacaactccaaaattaaaaatgctaatattgtgtcctgaaattgatgcaatrcctttgtcagtttctcctgagaacccttgtggcgcaggccctggtgccatcagtgagagggagtttccttgtacctgctccgctgacctgtccattgtgctacacagtagaagttatggagcagcatgttaaaatgtaatggattttttacaaagataactgatgactttgtgtaataaagacatcctgacactttttttctttcagctcatatgttagatttgatatcattcgaaggatcctaaccaaggtttttggatgcagcatagtcatggtgatgggtattacagatgtagatgataaaatcatcaaaagagccaatgaggtaagtggagaagagttacatctattgataatgccattgattagtgttctgagcccttcctgaaagtggttcttggccgggcgtggtagcttacgcctgtaatcccagcactttgggaggccaagacaggtggatcacttgaggtcaggagtttgaggccagcctgacaaacatggtgaaaccttgtctgtactaaaaatacaaaaattagtcaggtgtggtggcgggctcctgtaatcccagctcctcaggaggctcaggcaggagaatcgcttgaccctgggggggcgaaggttgcaatgagcggagattgtgccactgcactccaacctgggtcatggagactctgtctcaaaaaaaaaaagaaaaaagaaagtggttcttgtttgcattttacaagtagttctcacatcttattgtccatgtgtggccagtgggtgtaatctgagacatgaaacagtgctgggttagcagggtttctttggtgccctagtaaaggaagttaacatctatcgtattgtgatcgctgaaggcttttctgtggcctcgtgtcgttacctccttctgtggtcgtctcctggctccaatcttactccctcccctggcccctcggcctccaagggaaatgacttgactttctctttactgagggaaccagacccactgattggacgtattcatatttgtgctaatgatgcctttcatgtctgtgtcttgatagtttaaaaagtactttttgtatctattagtatttcagtctcagaacaaccctgtgtgctgcgcagagcagaccttattgtgctttttttaacacattttattccatattaaaaaattatttgaagcgatttgagatctacagaaaaatgacaagaatagtacaaagatctcctgcagccaccctgggtttcctcgtggccattgttggctgcgttgggccatcatcttctctctgttctagacttttcccaccaggccgcctcccctctctgcacacgccacgcgtgccttcagagcaaggtcactggctctcgaggcccgcacagccctcccagtcaggaaccggacattgatgcagtgcgctggtgtgggtgacatggacgtcaaccccaggtgttgtccctgtccccgagcgcctctttcttttctgttctagaaccccttccagagtcctgttgtctcctcggtctccttcagtcttcagtagttccctgtctcatgtccttgacactgtcaaggattgtaggactttgattttgtaaggtggccctccactcaggttcattggatgtgtccccatcttgcagaagagtcaagaggttaaggtgatcacatcttgaggttgcacagaccttcaggggcagggccactcccacrgctctgacttcagctatctctgggcaagtacccctgccaggtgggaatggcctrcgcacttgtggcgggtagcagaagtctctttcccgtgcaggctgagggccccactggagtctggcccacacctggagtgtggtgcctggcaagctttgggaagacacagtggatgaggttgtacaggcaggtgggacattggaggcrcctcctcgggctctccctgttggctgggggccagtgccccgcacatcacttctaccggaagggctttggtgggtcctttgactttaactgctggtgaggaagacttttcctaaagaagccattctgatgaaacgctgtcactctttgccccacatgctgtcttgtgtcggctttctccattgcgggtgcttcctctaatcaccattctctctggacatttttgcccattttcacaattcactgtggtttagcatacaagacagtctattcatttgtgtgttagttaggatgactggctatttccttttcctgaatctgatgaaggaatttaagtaaagctgacctaattttgatgtagacgagatgtagtcttgtgatactttgccagttaccactgcttttaccagcatgtgttacagtggaaatgttctaacatacatgaagtagagagaagagcatatgaacccatgcacctgtcaccggcgtccatggtcagcacctgttccacccctgttctctctgctttttgtggagaccacctgtggattgtccagtggtgggctgctgtttggcagtttgaccctccaagagcattagacggtgtttgtcttagtctgttttgtgctgctgtaacagaacaccacaggttgggtaatttataatgaatagaaacgtatttgctcactatgctggaggctggaaaccaagatcaaggtgccagcatctggcaagggccctcttactgcatcatcccatggtggagggcaagaggtcaaggggagagaaagaagccctgccaaaagccccctgcccccacccctccttgggttttttttctttttttttggagacagggtcacactgtgtcgcctaggctggagtgcagtggtgtggtcatagttcagtgcagccttgatctcctgggctcaagctgttctcccacctcagccctcctggtagctgggactcagctgtgcaccaccacacatgactaatttttttcttttttctatttttagtagagatgcggtttcactatgttgcccaggctggtctcaaactcctgagctcaagcaatcctcctgcctcggcctcccaaagtgctaggattacaggtgtgagccactgcacctggccggaaagcccttttaagaaggcatgaagcccatccaagagggtggggccctcacggcctaatcacttcttcaagttctcacctcttaatactgttacaagggcaaataaatttcaacatgagttttggaggggacaaacattcaaaccatagcagtgtttctggtgctttttaaaaaaaacttgctggatttttttttttttgagacagaatttcactcttgttgcacaggctggagtgcaatggtgctatctccgctcactgcaacctccacatcccggggtcaggcgattctcctgcctcagcctcccgagtagctgggattacagacacccaccaccatgcctggctaatttttgtatttttagtagagacggggtttcaccacgttggccaggctggtctcgaactcctgatctcaggtgatccgccctcctcggcctcccaaagtgctaggattacaggtgtgagccaccacgcctggcctggatttctttttttgaaaaaaaaatatacatatacatactttttaagtcagtgagatttgaattatagcatttgtctgtcattgtggcttcccttcctctttaacctcccgtcacacccatgcatcttccttttgtgaaatggggtggaactagtgactaaagatttggattggaagtcagaggccgcctttgggctggggcgtttatctgaaaagaggctgaactttgtcatttgttgagtgaacagagctcttctcttgtctcttaggcatgagtcaaaggaatggtgtgaggtccttgaggaacattttcactgaggtctctgtcttcctattttctattgatttgtctttctcataactgggtagtctcccaccrcatggggctgtttagcagttctagccttttcccaattgctgtttgtattgcttctggctgttaaaaagagtgctgctatgaacatatatgcttttgttttgtttacttataaatatatttcctgtggctgggtgcrgtggctcacgcctgtaatcctatactttggaaggctggatcacttaagcccaggagttaragaccagtctggccaacatggcaaaacgctgtctctactaaaacacaaaaaattagctgggtgtggaggtgtgcacctgtaatcccagctactcgagaggctgagacacgagaagtacttgaacccgggaggtggaggttgcagtgagctgagatcgtgccactgcactccagcctgggccacagggtgagactctgtctctaaataaaaagttaattaatttccaaagcggaattgctaggtcaaagggggaacagtttatttgatatcttgcaactgagagtcagatcattgagagactggcagtgctggaaatcggctcccactttaaatgtatttcttcacatccttacccccagcctataagaggcaggatttagaaggcaggtgcgtgatgtctaaggctgtgcgtgaatgcatagtcaccaggtaaccctcagcagaggtggtgtttggaaatgccccactggtaaagaaggaaggtcagtggttcggggctttcacctgccgtcggggcagccagagcctgaaatgaaagcacttggtagcttcgtgcctctcatgaatcttcaagatcagaaagaattgtgtcagtccccatgtcctggtggcagggagctggtagaggctgagacactggctgagttctggagggagccccatgggacagagaaagggccccgcaggggatgggaggagaggtgaggacacagtgtacttggagggtgtcatgggggcgatggggaaggtggggcaggaacgttgccatcagagaagcgggacaagagccccgaatccagggagcagagaactgcaggaaggaggaggtggccagcgtggtaaagggaggaagaagcaagagttaatttcacagatgccacaaggagggattggttgttaacttttttaaaaatgttatgattagaatatgaaaaacttggtagaattggttaaacattctaactgtagagagtagttaatttttgaaccagagaatttccatacttggtacacagcaagatcctaagatggtattgaatagtttctttcctcaaaataatgtctgacttcaatgtaataaaacatgtatctgaaacccatagttatgaaaacatctgttttttagtatttagtgaaaaggtaattctttaagaaatgcaaatcaaaaccacagtgagataacatctcatgccagttagaatggcgatcattaaaaagtcaggaaacaacagatgctggcgaggatgtrgagaaataggaacgcttttacactgttggtgggagtgtaaattagttcaaccattgtggaagacagtgttgcgattcctcaaggatctagaaccagaaataccatttaacccagcaatcccattactgggtatatacccaaaggattataaatcattctactataaagacacatacacacgtatgtttattgcagcactgtccacaatagcaaagacttggaaccaacccagatgcccatcagtgatagactggatgaagaaaatgtggcacatggaatactgtgcagccatagaaaaggatgggttcatgtcttctgcagggacacgggtgaagctggaaaccatcattttcagcaaactaacacaggaacagaaaaccgaacaccgcatggttctcactcataagtgggagttgaacaatgagagcacatggacacagggaggggaacatcacacacccggcgcctgtcgggggttgrggggctaggggagggatagtattaggagaaatacctaatgtagatgacgggttgatgggtgcagcaaaccaccatggcacgtgtatacctgtgtaacaaacctgcactttctgtacatgtgtcccagaacttaaagtataatttaaaaaaaaaaaaaggtaattctttttatccaatgtaaacttttttgaaggtaaaattaaaacttttatttttcttctttaccttttttataatataaaatttacgattttaaacatttttaaatgtgcaattcagtggcattaagtacatttacagcattaaatggtgcataattcctcaaggttcatccacctgcagcctgtgccggaagttccttcctttttatggctgaataatgtcacattgcatgtacactctccttgctgtctatcttctgaatatatatgcttttgttttggttccaggaccccctccccacataccaaaatccttggatgctygagtccctgatataaaatatatttgcacttaatctatgcacatcttcccatatactttaaatcatatctagattacttttaataactaatacaatgtaaatgctctataaatagtaatactatattttttaaaaatttgtattattttttattatttatttagttttaagatagggtctcactctgttacccaggctggggtgcagtggcataatcacggctcactacagcctcaccctcccaggctcagggatcctcccacttcagcctccagagtagcggggaccacaggcatgtgtcaccatgcccagttaatttttgtattttttgaagagacagggccttctaagttgctcaggctggtctctaattcctgggctcaagcaaccctcctgccttggcctcgcaaagtgctgggattacaggcatgagtcactgtgcctggcattatttcttaatattttctatatgagatcgattgaacccacagatgcagaaccctaggatacagagagccgactgtgctgcgttttctttacccatattcttccaccgttggacattgggtttcttctcatgcaagcttttaaaatgataacaatatctttcgtgccatctgctccaagacttgtttttaaaatattttaaattataataatacactttcctgagtcactcccttgactttaatttttggcaccattttataggttgtcagagatggaaagcacaggwtttaaacaaatctggggtaagaattaaaagaggtaggatatattcacatagtaacattttgttttgtttttgttttgagacagggtctcactttgtcatccaggctggagtgcaatggtgggatctcagccyaccgcaacctccgcctcccaggctcaagcgattttcctgcctcagcctcccgagtacctgggactacaggcgtacaccactacgcccagctaatttttgtatttttagtagagatggggtttcaccatattggccaggctggtctcaaactcctgacctcaggtgatccagctgcctcagcctcccaagtgctgggattacaggcgtgagctaccacggccagccagtaacattttatattaagaaaaatcattaagccaggcacggtggctcacgcctgtaatcccagcactttgggaggccgaggtgggaggatcacctgaggtcaggagtttgagaccagcctaaccaccgtggagaaaccttgtctctactaaaaatacagaattagctgggcatggtggtgcatgcctgtaatcccagctactcaggagctgaggcaagaaaatcacttaaacctgggaggcagaggttgcggtgagctgagatcgcaccattgcactccagcctgggcaacaagagcaaaactacatctcaaaaaataaaaaacaaaacaaaaaaaccgaaaaattattatatatgtctccaagtaattcaagccaaagtttctctttttgtgtgccgggacactggcctgcatcaccctggctttctggaagaaggtgaaatgttgaggaagggctggacacagggcccagccagcgggctcctgtcctggagagatagctaacttaaaatgatttacgatcgttagagctacctgagagaatccgaaataggactaggaccccattttagcgcctttctacctcgtctatttgttttatggcagtgagaaagcagcactaccccggtatgaggaatgatcatatgtttcaggttaaatgtagcaagcagtttgacttttagaatatgagtttccagccggacacggtggctcacgcctgtaatcccagcattttgggaggctaaggcaggtggatcacgaggtcaggagatcgagaccattctggctaacacggtaaaaccccgtgtctactaaaaatacaaaaaattagccgggcgtggtggcgggcacctgtagtcccagctactcgggaggctgaggcaggagaatggcgtgaacctgggtggcagagcttacagtgagccgagattgcgccactgcactccagcctgggcgacagagcgagactgcctcaaaaaaaaagaatgtaagttttctctccccagcaccagcagcagtaggtgggtattccacttacaactccttgtcattgtagcatttgtgagccatgtcctccaggactgggccgttggtgctggtgcagccacgtgcagagaagggagtattgggtgtttggggtgtattctacctgatgagcctttaaagtgtgtgtgcttgtgtgtttatatgttgtctctttctgaactagataaattaattctttttttttttttttttttttttgagacagagtctcgctctgtcacccaggctggagtgcagtggtgcaatctctgcccactgcaacctccgcctcccgagttcaagcgattctcctgcctcagcctcccaaatggctgggattacaggcgcccaccaccacacccagctaatttttgtatttttagtagagatggggtttcaccatgttggtcagactggtctcgaactcctgacctcatgatctgcccaccttgtcctcccaaagtgctggcattacagatgtgagccacagcgcccagccaattaattccttttttgagacagagtttcacgctgttgcccaagctggagtgtggtggcacagtcttggacattgcagcctccatctcccaggcttaagtgatcctcctgcctcagcctcccaagtagttgggactacaggtatatgccaccacgcctggctaattgttttgtattttttgtagagacagggttttgccaggttgctcaggccggcctagataaattaattctaaagttcatatagaacagcaaaaaaaaaaaaaaaggaagaataggaaaagtctataaaagatgaatattgagagggactagccctatcaaatatgaaaacttttatttattaatttttttttttgagacggagttttgctcttgatgtccaggctggagtgcaatggcacaatctcagctcaccgcaacctccgcctcccgggttcaggcgattctcctgcctcagcctcccgagtagccaggattacagacatgtgccaccacgcccatctaattttctgtatttttagtagagacggggtttctccatgttggccaggctggtcttgaactcccggcctcaggtgatccacccacctcagcctcccaaagtgctgggattacaggtgtgagccactgcgcccggccaccaaatatgaaaacattttaaaagctatagaaggtttttgttttctcatatatatgtatatatatgtgtgtgtatatatatatatgtatatatgtgtgtgtatatatatgtatgtgtgtatatatatatgtatatgtgtatatatatatgtgtgtgtgtatatatatatatatatatwttttttttttttttttttttctgcacagctttatgtggtaggattgacctacaatagattgcatgtattattcaggaaggtgcagtttgccaaatgttgacctagggatgcccctgtggatgcatccctcacccctgtgtctgtgcccctcgggactcctccctgcaccccctaaccctctggtgtccaagcatctgctgatctgttatctgtggctttaaagcctgcagaaattaaacacctgtacaaagcacgcataaacagatgatggaatacaccaaaaagtccagaaacagccctgataatcaatgggagtttgttttatgataaaagatggcatttcaaatcaktaggggtgggaggtagagtgttggcagctaggggtcatctggagaaaaacataagccagaggtagatagaggcgtcatagccgcattcaaggcaggtcagagatttaaatataaaaragaccccaaggcaaatttgatagcctcatactggggaggctttgtaagtttgtttccaaatccagaagccatttatgagaaaagattcagaaatatgaaagattgctaagtataaaaatgacagtttttacatttcatgaaacaaccataaagttgaaaaactgtggaaaaatggaaattatatcagcgataaaaggttaatttctttaatataaaaatacttccggcctggcacggtgactcacatctgtaatcccagcacttcaggaggccgaggaaggtggatcacctgaggtcaggagttcgagaccagcctggccaacaaggaaaaaccccatctttactaaaaatacaaaaattagccatgcatggtggcgtgtgcctgtagtcccagctacttgggaggctgagacaggagcatcgcttgagcccgggaggcggaggttgcagtgagctgagattgtgccattgcactccagcgtggacaacaagaacaaaactctgtctcaaaagaaaaaaaagaaaagaattcctaacatccaataagaaaaagacctataccactcaatagaaacacaggtgtggataactacaggtcatttaatgcagatagttcctaaacatgggagatgttcagatttactcaaaagaggtaaaagcttaaagagcaaagcacttgtcagctgtcacactgacaccatgtgaaagttggctgaccctgcaggtgagggcagaggaagacagacacctccaggtgttgctggtcgggtgtagctggcacagctttcctggaaggcagcttgcaggagcggccaagtccatgagcctgtgccctctgtctcctgcctacgagtgtagctcacaggcacacttgggctgctgcaaagtgacctgtgcacagttgtgtttgtagtggtgaggatgggatgtgcatcgggacaggaccgggtaagcacgtagcgacacatctggaagggggagtagaggccaccttgaaaggagcgaggcagctcagtgtgtccagcatgatggacccccaggattctgtgtgctgcgagggagagaagctagcagcacagagcagagtgtggaatgggctgcatttggggattccaagaaaaagatgcaaatgtatatatataaccacgttcatgcttgtgggaaaactggtcgctgtattttccttctgggaggaaagccaagtctgggcaccccttcatgccatttgacttctcctggcaataaattacctctgcagaaaaatatagattaagcaacctgctgatctttattattttattttttatttttttgagacaggatctcgctctgtcgcccagtctagagtgcagtggggcagtgttggctcactgcaacctccagttcctgggttcaagcgattctcctgcctcagcctcctgagtagctgggattacaggcgcctgccaccacgctcagctgattttttgtattttcagtagcaacggggtttcaccatgttagccaggatggtctagatctcctgacctcatgatctgcccacgtcggcctcccaaagtgtgaggattacaggcgtgagccaccgcgcccggccaccccactgatctttaggcccaaaattgcatggaatttgagacttccgggggagtctgaagcggcaagaagacacagtacttttgggttttttcctttggtcttttgtcccctggatagacatacattaactgatttattgttgtaaaggtctgctttgccacaaaactgtaccgcaggagaggggctgaagtgtattggagtaccagctatgtgctaggtgctgtgtattttctctctttaatgtgatatttatgtaatgttttcttttacaaagctgtcctgcccgtatatacacagtggttcttctagcagtctaagggattactaggtagaatatctccatgctgtaaagtaactgaaggccaagaggtttgattattgatttgcccaagaccccaaagcttaaacaacacctgggtagcaacgcatagttcaccagcttgctttcttcagtgggtattctttggtggggctttctgggttgactatgccattcagagccctgggtctcagggtcacatggttgggacctggccccacrtgtggcgttgcgcttgagaaagtttctcagtattctagagtggtaattccttcacctgtgaaatggggagacttggttcccgaggctgcgtggagcagctcggrgagactagcaggtggcaggtgctgtgcttgggaggcccaaaggccatttgagcaggaccagcagttatgatgcccggctccattccagagcttcacagtgtcttgtgcatctgttcatgtagagtttttcattgaaattatgaaataacatgagcgaacctagtcttgtgtctcagcctccttggataatgtggcaggggctgcagatgcgtgcccccaaggcccccacatttggaattgattggactgttttgatggtctatctccagaaacccagccatgggacccgagggaatgagtactccattaaatcccagttgtagtgtgttaaattactttcaaaatatttctttagaagttcctttttgatctttcttttttgtttgttttggaagagagtcttgctctgtcgcccaggctggagtgcagtggcaccttcttggctgactgcaacctccgcctcctgagttcaagtgattctcctgcctcagccacctgagtctctgggattacaggtgtgcaccaccatgcctggctaacttttgtattttaagtagagacggggtttcaccgtgttggccaggctggtctcaaactcccggcctcatgtcatccacctgccttagtctcccaaagtgctgggatttatagctatgacccacaacacccagcctcctctttagtatatttttgactattttttttttctcctgaggattaagggataagataggaacctagtttcttatcatacagactggactagggtgattttgcccttgtcttagaaaagtggaggatccttggtatgttttgttttctattttactttatttttatttttgtttcggagatggtgtctcgtcctgttgccaaggatgggattgcagtggcacgatcatggctgttcgcagcttcaacctcatggtctcaaacgatccactcatcttggcctcccaaagtgttgggattacaggcgtgagccgctgcacccagctggtttgttttttactatataatggaaattgtgacattatttcttctctaaccagaagacaaggtcaataagcctttttttctagctaagctactagtaaaagttcagtacctaaaatgagtgcccccgctttggtgagtgggtgggggcaaactgaggccgaggcaccggaggtggccggggtatgtttgctgtcgtgttgtgcacgtgggctttcttgtggctgggtggttctgttgcgaatgccccagactcattaacgtgcacatctaatccttctgcagatgaatatttcccccgcttccctygccagtctttatgaggaagacttcaagcaggacatggcagccctgaaggtaaagtgtggggctggttgttcctgccatgagggtgacaggcgtgagcaatgacagctggtgctggctgacctgtgcttctcacgagggaaacacggtcacgtctccacttccttgcaggttctcccacccacggtgtacctgagggtaaccgaaaatattcctcagataatttctttcattgaaggaatcattgctcgtgggaacgcttattcaacggcaaaaggtagggtttatgttctttttttttttttctttttttttttttgagacagagttttactctgtcacccaggctggagtgcagtggtgctatctcagctcactgcaacctctgcctccctggttcaagcgattctcccgtctcagcctcctgaatagctgggactacaaggtgcgtgccaccatgcccggctacattttttttgttttggtatttttagtagagataaggtttcaccatgttggccaagctggtctcaaactcctgaccttgtgatccacctgcctcagcctcccaaagtgctgggattacaggcgtgagccactgtgcccagccggtttatgttcttaaaactaaaacattactgggatttggagaaactggatgtatttatcagctgtaggaacatactaaaatttacttctgtcttgctaggattccaacagcaaagctgttgtggggttttctacaatattgtgtctctttgcgaaatggttgaattagttctaaatatcttttccagggagaggggaacgtctggacagctagtcttggtaacagtcgtggaatctaggtggtaggtgtacaggtgttcattgtggtgttatttcatctttgtttaggtattttcctaacaaaaagttggggacaaacacagtacctccagagacctgctctcttcttattaaaagtcagcccaggtcacccccgtctgtttggctatcgttttttcacaggccattacgagtgagttgcgggagtcagaggttgcagtgagccgagatcacaccattgcactccagcctggtgacagagcaagactccgtccacccaccctcccctgcacaaaaaacaaaaagttgcagggccaggcatggtggctgatgcctgtaatcccagtactttgggaggtggaagcgggtggatcacttgaggccaagaatttgagaccagcctgggtaacatgttaaaaccttctttctactaagatgacaaaaaatcagccaggcctggtatcgcgcgcctgtggtcccagctattctggaggctgaggcatgagaattgcttgcacccaggaggcatagtttgcagtgagccgagatcacaccattgtactccagcctgggtgacattgccagactgtctcaaaaaataaaaataaaaaagtgagttgcagggctgggcgtggtggctgatacctataatcccagcactttgggaggcagaggcaggtggatcacttgagtccaggagttcaggaccagcctgggcaacatggagagaccccttctctacaaaaataaaatataaaaattagctaggcatggtggcgtgctcctgtagtctcagctactcaggaggccgaggtgagaggatagattgagcccaggaaattcgaggctgcagtgaaccatgattgtcccactgcacaccagcctgggagacagagcgagaccttgtctcaaaaaaaaaaaaaaagcgtgagttgcagatgttctgtcgcatcagccatgacacttcaacatgcatctctgcataaaaggagtccagatgtcatggtcagacctcagacaatgaagaatttctggctagcttcgcgtgtcctctctgtattaaatatactcacttgtccccagggcatgtgctgcgtgtgcatttgttggtttagtctcctcactttttcccctcctctttctttttttctttttttctcttttttttttttttttcattttttctgggtaagcacatgtagattcaagactctgacaggtcagttttcctgtggagcagtctgtgtttaratttgcatgttgcttactgcaggtggtttcattggtttgcggatgctaatctttgtctggtggaccccaggcaaggctggcgtcttgctgttttgctgctttggtgatgaagcatcgccataaatccgaactaaatcccacccatcctggctgcaaaccctgaccacagcctcatctctccatgaagttctccttcacccagcacagttgaaagtgaacttactttctcagccttgatatctctgctgtaccatttggcagccagttctgcactgccatagtttgctgtttaatgtattcatattttgtccccatctagatcataaattctcagaccataaaaaccttttgctttactgaatgacgccttaaagtatccagccgacggctgaagatacgtaggtattgaatgtttgttgcaatgagtcagaaagcatgaagcactgccctggacgttcctgtccttcctgggtcctacttggagcgtragatgagcacgtgaggccctgaggatctgctcagtaggctctgtgtatggaagtagctttttacttgttctaatgtggtatatttagattttgtttcaaagaaaaactttttttttttttgagacagagtcttgctctgtcgcctaggctggagtgcagtggcacaatcttggctcacagcaacctccgcctcccgggttcaagcaattctcctgcctcagcctcccaggaaaaactttttttaaaggacttaggtggttgaattagagtttgcaccagaaaacacaggaattaattttttgctgtcgtgtaacttgaaataagatatgtgggcctgtgcttccattttaggaataaagtgataaatgttcacgagtctttagggattctcgtcttcacaggcttgaggattgaatgctgtttgttgttttgttactgtgttttattataaacaatttaatgatagtataaatataattaattcaaaatacacttacattcamtcaaaccccagtaatttggactttgttacaattccacaagggcttggttgtaatttgatctttgaactcttggtgaaaaacaatttcttcagcaaattgataacataaagcaaagtgaagggggaatgtttccaccatttaagggagtggtttctctccagtgaagcgcttttaaagcactgtttatattctgacttcatagaaagcagctcccagggcctggatgtccccctcctgtcctctggttcatccccagcaccgagtgccagcttaatggtcaaccctgaatgaccagagaggacgctgcagggacagggcagggttttctgagcacaatggtcactggtgggaggaaaggccagtgtggcttgggcaaacaaagccgggtgacatttcaacagaaaaccctgccctgtcccttcagcgtcctccctggtcattcggggttgaccactaagctggcactcggtgctggggatgaaccagaggacaggagggggacatccaggctgaggacatgaggcaggtcctgggtgcagcttgtgtttgccagttgcaaagtttccttgatcttaccaacaccagtgtccgcagtaaggacagtactgatgcaaatcagtaactgcattagtaaaaaagaatgtgaagactcaaactttgtaaaggctaaaagttgcacccacgcctggggcctgaggacagctacatgctgctgtgtggttggagggtgctggatggtggctgcggatctgtggtactgagaatggccatggtcacagcccggatgagcattgcctccttcctagggagacacatggcctggaacacacagcggctgcagccgggcagccttggagcataggttggtagcgctttcttcttgacraagctcccactctgagtgcctcctccccagctctgctttcttaggctttgtggtggaaggggcaagggcagcccaggcttgcaggaggctctggagaaggttctgacctcagactgcaaagcggaccttggcactcagcctcacagacacttcaatatgcagatgatttttttgtgtgttttttttggtagagatggggtctcactatgttgcccaggctggtctcgaactcttcagctcaaacaatcctcctgcctcggactcccaaagtgctgggattggaggcgtgagccactgcacccagccagatgatgttttcaatctgagtaaaaaggtagttttagaagatgactgggcaaagaaagagtgtctttgctagctggtgtgtaacataaagtaaagaaagagtgtctttgttagctgttgtgtaacacaaggcacaagatctaaatgaaggtcagtgataacacttttcttttttctgattaaataattgtctcagtagtttacagagaacttacatttgtgttttcactttcacgtctgtgtactcatgatatgtccaaatcatgcatttatcttatagtattgtttttaattctggttaacaaatatattaagccaggcatggtgtcactcctatagccccacctactggkaaggttgaggtgggaagactgcctgagccaaggagttcaaggctatcgtgagctgtgattgtaccactgcactccagcctgagcaacagcaagaccctgtctataaaaatataaatactatatatgtatatggggccaaatgctatgttctgtatttaaattctaattacttgttagatgttaaggttgtcaatatgctgatattcagactgagaagtgatgaattcataattgtctttataaacaggcaatgtctacttcgatctgaagtctagaggagacaagtatggcaaattggtcggcgtggtccctggtccagtcggagagccaggtgggttggccgggctcagccctgtgggtccctgacctctgcctcgggtctcagctctggggagatgagatctggagcgcagacccctccacttgctcagacactggccttacccaggtcacagctgtgttttaaatttagtgtggtttctgtggatggctccagcttgtgaggcatatagttcaaacggcaagtggggcatcgtccacccccgcccccagcgtgcctggctccattccctggagacagtgctggtcactgtctcctttttcctccccagggttttcagygcacatgaaaacctcatacacgtacatcatattttcgcgttcttctgtgttaccgtacatttaattcccatacgtgtcttactatgtgttaaacttccaatctgtttgaatctcttccttgctctattctgttccagggagttattaggtcaaaacatttttatggagaagaaatagtaagcgcagtatatggaactaaatttaaaataatttgaaaaggatactgtctaagggaatcaaacaagaataacagggacagaccccaaagactgttcaaggtatttctggttttaggcactgtctttctgcgccataaactgtgccaatgaatcctaaccatccatagcactgacccctcaggttctttccttcccccgccgtggtgccctgtcccgctccccgcacaggccggaacacagacgcccacatcagccacgtgtgaggcgtggctaccagcaggccgtgtgggctttgcttacacatgtggaggagaagtttctgagagttgtacattctggcatcaggaaggttttttaaaattatttatttaatagatttgctttttagagccattttagcttcatagcaaatttgagagtaaggtacagagaattcctgtctacctgctaccctccacaccgccccccacactgtcagcatcccccaccattgacgcatcagctttgcccagagaccagagttggcatcagggttcactctcggcactgtgtgctctgggtttgggtgaatgtatagtgacatgtttccaccattccagcatcacgcaggatacttgcactgccctgaaaaatcctgtgtggtctgtctgctcatccttccctctttcccatccctggaaatcactggtctttctacagtctctagttttgccttttctagaatgtcatatagttggagtcatacactgtgcacccttctcagaatggcttctctcacttaggaatacacagtaattttcctccgtgtcttttcatggctgagagctcgtttctctttaacactgagtcacgtcccagtgtctgaatttacagcagcttaagcactcacctactgaagggcatcttcgctgcttctgagttttggcaattatgaataaagctgctgtaaacatccacgtgcaggttttcagctcatttgggcagataccaaggagcacaatgctgggtcctctgggaagaggcttatttgtgtcagaaactgcccagcttctgccagagtggctgcaccattttgcatccccaccagtgaggaataagtccctgtcgttccacatcttcacagcagtgctttttaaaataaaaaatattttcttatacaaaagcaacatatttatataatttataatggtacaaaattaggaaatagaattacacaaaacaaagataataaaaccaccatttttacatatggtgaaaaaaaattttaatgccttagtgtatgttatttccaaagcaatggtgttgtctttttaattttcaatttaaattgttgtaataacacaacaatagaaaacaccattaaaaaatgtccaacttggttgagcatggtggctcacacctgtaattccagcactttaggaggccaaggttggaggatcacttgaggccaggagttcaagaccagcctgggcaatgtagtgagaccccttgctgtctctaccaaacaaacaaaaatgcccagctcagtgaatttgtgttcagtggagaccctgcggtcaccccctagtggaaggagacaacaatggcaagggagcgaaggcacctgagtcctccgggtcccacgccctggccgataacctcccgggccctgcctgccagcctctctgccctgccctgggggcaactactgccctaactctgacagcggccacctcctcatttttctgaatgggtttattgcccaaacacgtgtcccttaacacgacacttagccttagctgttctatatttgtgtcttgtttttagtccacatgttcctcccctggcttcttccccttgctgctcatttgagggagaaacgtcatgtgtctcacggttcccccagtgggatttcgcttgctctgagttttggagtgtctgtaacatttccctctgtcctgtgtgttttttgcaaactggtagttgaatgtagaggcttaatccagttctaaatttctggagaaggctactttgtagatggtgtattcctcaccaggagacatgtaagggctctgcctctgtgtgtcagcagccctggccactctaggcttagatccttcactgcaaaaagaggtggcatggtggtgcaactcccattctgctttatttgctggaataccttttttgtttgtttgtttgtttgttttttgagacggaatctcactcttttgcccaggctggagtgcagtggcatgatctcggttcactgcaacctccatctcccaggttcaagcagttctccctgcctcagcctccagagtagctgggattacaggggcatgccaccacacccagctaatttttgtagttttagtagagatggggttttgccgtgctggccaggctggtcttgaactcctgacctcaggtgatccaccccccccccctcggcctcccaaagtactggggttatcggtgtgagccaccgtgcctggcccatttgctggaatacttttatacaggcagactgtcatctggttactcagtggtacagtttgtataagaaaggcaggaccttttccttaacttaccagttttcagaacaaggagttggcttccatattttcctctggcagtgaccagttcatgttcttccgttgctgagagctcgtgggcttcagtgcacatgccgttttaacccattgctgccatcaccttattgagcctcggcgtgccccctcttttgctggtagcagctactcccgagtcccttacactcagccctgttgtagttaatagttttgtggctgtctatctgatatggtaagatattcctggctcatcttaaaataagctgtttctcctggaagtcccatttttctcttttctttcttcccttttcttccctttccctccctccctccctccctccctccctccctccggtcacgcccggtgtccctccctccctctctctctctctctctctctctctctttctttctttctttctttctttctctctctttctttctttctttcttttcttttcttttgtttttttgagatagaatgtcactcttgttgttcaggctggagtgcaatggcgcgatctcggctcactgtaacctccgcctcccgagctcaagcgattctcctgcctcagcctccacagtagctgggattacaggcacctgccaccacacccggctgatttttgtatttttagtagagacraggtttcgtcatattggtcaggctggtctcgaactcctgacctcaggtgatccgcccgcctcggcctcccaaagtgctgggattctaggtgtgagccaccgcgcccagctcccattttacttttaatgggaaatggtgttttgagaacacagcatgggcaccatggatactcattgttgccatctgtcattgccgtctgtcattgtttcctggcctctcccatagactgaggtaatgaacgcatctgctccgtaggtcacactgatactcaaattcagggccacggggtttcattaacccctctgtctgttcacatgtgtggttcccttttcccctgtggcaagtcctagcctttaaggacaccgggcgtgaccggatgaccagtgggcatccacctgctttagtccatcacggaccagccctgcccgaggcttgaccacggttagaaggttcccatgcacgtgcctcctccccgccccgcgtgtccatatgttggagtgcccagcctccgcctgcgctgccttctgtagccccgtccactcttcccccctcccaccgtctccaggtccgctttttccctgttgtttttgaagctcattccccagcagtttctgaaggaagagccctttctcgggaacagtattctctgcatttgtgcctgtggatgacagtgtgctgccttctacttcaaagtcagtttggctggaaatacagtccttggccgcattttctgtccttaagtattttccttcggcataaggtgttattgatgctctcgtttgccatgcactatgtaggaattgttctgtttgcttgggtgcccagaggatgttattcttagtaaagtgactagtaatgaaaacgtagcctgtccagtctgacccagaaaaagtatctgtgtctgcactctttaaattcatcaaaggtgatggacgcctgtgtcagtgctcccgggtggaaagggtgatattgggacgttgtgcacatggggtgtgcctgtcctgggcagatgggacagcaggttttggtgagcatgcgccactggcagcctcaccgcacggtgatgggcaccttgctcagagtctcgggtccataagccgcgttacctgacacgatcacgcgcctttcactctgtgtgattagtatctttttggaaaaaacaaccctgaaactcagttactgataagcagagtatttctcgtaagacagaataaggaaaaatgggaaaaccccacccggtccacagtacattcctgagaaatgagcctctgtgggttcccggccgcccagctctccctgtgcgctggtgcatctgaggtgaaagcgttgccggtgctcctgtccctcacgtgggtgaaacaggagtgaacgagaagccaaggctccttcgaagagacacagcctggggcgtgctgcccactggcggctggaggggcttccaccggggtggccggctggatttccctggtgggggtgaccagctgagtttctgtggtggggggtgactatctgggcttctgtggtgggggtgaggtggtggtgacagcctgggcttccctggtggggtgacagtctgggctttcatggtaggggtgactgtctgcgtgtccgtggtggggtgattgtgtttccatggtgggggtgactgtctgggtttccgtggcggggtggctgtctgggtttccgtggcggggtggctgtctgagtttctgtggtgtgattgtctgggtctccctggtgggggtgactgagtttctgtggtggggtgactgtctgcgtgtccgtggtggggtgattgtgtttccatggtgggggtgactgtctgggtttccgtggcggggtggctgtctgagtttctgtggtgtgattgtctgggtctccctggtgggggtgactgagtttctgtggtggggtgactgtctgcgtgtccgtggtggggtgattgtgtttccatggtgggggtgattgggtttccgtggtaagggtgactgtctgggtttccatggtggggtgattttctgtgtttccgtggtgggggtgactgggtccccgtggtgggggtgactgtctgagtttccatgttggggtgattttctgtgtttccgtggtgggggtgactgggtctctgtggtgggggtgactgtctgggtttccatgttggggtgattttctgtgtttccatggtgggggtgactgtctgggtttctgtggtgggggtgaatgtctgagcatccgtggtggggtgactgagcttcttcccactgatgtaccgtttgtcatctgcagcggactctgacaagcgtcatgccagtgacttcgccctgtggaaggcggccaaaccccaggaggtgttctgggcctctccctggggacccgggaggccgggctggcacatcgagtgctctgccatcgctaggtaaggtgcctgccgcttcctgggggttggggctcaagttcccctggtgcctgctcagggcagcagaggatgtgcatgggagcaggtgcagcctggcacgtgtgcccatgggtgattttttgggaagagatttttgccggagtgtgacgggccatggaacggggtgaacgaaacccatgacacatcaagctttcctgacctcagcacttcctctgtttagtggagaggctgctttttggttcacacttgcagctgccctgttccctcacccttctctgtagtggctggtgcttggggccctggaggagagtgcttgcacctacatccctcctcgcttcgcacttctctagcccccaaatccctctccgccttcccgccagctcttctagctcaggcaactcgcatgccagggtgctctgtggcggaaatctccagctcctcccagatcttcctggagtcccccagccaccctcatgtgggtcctctgtcaccaaagctcctcttcccactgtctgcctgggaccgcagctgcctgccgcccccactcagtcacacracactgctctcctggcccactgcggcatcccctactctggaaacaccctctctgtcctggtttctgcctctcagtagagctttctccgccttctccctggtccccttggacgcacctgaggtgtccacaccctgtggctctgcccacagccaggggcaccttgggtggggtgtgtgaaagacagcataccgcccgtgccccgtgctgcacagctgcccatggggctcgccacagttagtttcatgttcctgtttttttgttttgagacggaggttcactcttcttgcccaggttggagtgcaatggtgcgatctcggctcaccgcaacctccgcctcccaggttcaagcgattctcctgcctcatcctcctgagtagctgggattactggcatgcgccaccaccccggctaattttgtatttttagtagagacgggatttctccctgctggtcaggctggtctcgatctcctgacctcaggtaatccgcccgccttggcctcccaaagtgctgggattacaggtgtgagccactgcgcctggcccacggttagtttgttaccgtggtgctggtttgtgtggcctgaccctctgcaggcagcagggtacccagccgcgcgtttagactgttcctagcgtttcagtgttacagatctccttagtgaataaccacgcgtatgtttcctatttgtagaaatgggttttttttttcattatattttaacttctagggtacatgtgcacaatgtgcaggtttgttacatctgtatacatgtgccatgttggtgtgctgcacccattaactcctcatctacgttaggtatatctcctaatgctatccctccccactcccccaccccatgacaggccctggtgtgtgatgttccccaccctgtgtccaagtgttctcattgttcaattcccacctatgagtgagaacatgcagtgtttggttttctgtccttgtgatagtttgctcagaatgatggtttccagcttcatccatgtgcctacaaaggacatgaactcatccttttttatggctacatagtattccatggtgtatatatgccacattttcttaatccagtctatcattggtggacatttgggttggttccaagtctttgctattgtgaatagtgccacaataaacatacgtgtgcatgtgtctttatagcagcatgatttataatcctttgggtatatatccagtaatgggatggctgggtcaaatggtatttctagttctagatccctgaggaatcgccacactgtcttgcacaatggttgaactagtttacagtcccaccaacagtgtaaaagtgttcctatttctccacatcctctccagcacctgttgtttcctgactttttaatgattgccattcaaactggtgtgagatggtatttcattgtggttttgatttgcatttctctgatggccagtgatgatgagcattttttcatgtgtctgttggctgcataaatgtcttcttttgagaagtgtctgttcatatccttcgcccactttttgatggggttgtttgattttttcttgtaaatttgtttaagttctttgtagattctggatattagccctttgtcagatgggtagatggtgaaaattttctcccattctgtaggttgcctgttcactctgatggttgtttcttttgctatgcagaagctctttagtttaattagatcccatttgtcaattctggcttttgttgccattgcttttggtgttttagtcatgaagtccttgcccatgcctatggcctgaatggtattgcctgcrttttcttctagggtttttatggttttaggtctaacatttcagtctttaatccatcttgaattaattttgtgtaaggatagggatccagtttcagctttctacatatggctagctagttttcccagcattgtttattaaatagggaatcctttccccatttctttttttgtcaggtttgtcaagatcagatggttgtagatgtgtggtattatttctgagggctctgttctgttccattggtctatatctctgttttggkaccagtaccatgctgttttggttactgtagccttgtagtatagtttgaagtcaggtagcatgatgcctccagctttgttcttttggcttaggattgtcttggcagtgcaggctcttttttgaactttaaaccrtatgaactttaaagtagttttttccaattctgtgagaaaagtcattggtagcttgatagggatggcattgaatctataagttaccttgggcagtatggccattttcacgatattgattcttcctatccatgagcatggaatgttcytccatttgtttgtgtcctcttatatttcattgagcagtggtttgtagttctccttgaagaggtccttcacatcccttgtaagttggattcctaggtattttattctctttgaagcaattgtgaatgggagttcactcatgatttggctccctgtctgttattggtgtacaggaatgcttgtgatttttgcacattgattttgtatcctgagactttgctgaagttgcttatcagcttaaggagattttgggctgagatgatggggttttctaaatatacaatcatgtcatctgcaaacagggacaatttgacttcytcttttcctaattgaataccctttatttctttctcctgcctgattgccctggccagaacttccaacactatgttaaataggagtggtgagagagggcatccctgtcttgtgccagttttcaaagggaatgcttccagtttttgcccattcagtatgatattggctgtgggtttgtcataaatagctcttattattttgmgatacgccccatcaatacctagtttattgagactttttagcatgaagggctgttgaattttgtcaaaaggccttttctgcatctattgagataatcatgtggtttttgtctttggttctgtttatgtgatggattacgtttattgatttgtgtatgttgaaccagccttgcatcccagggatgaagcccacttgatcgtggtggataagctttttgatgtgctgctggattcggtttgccagtattttattgaggatttttgcatcgatgttcatcagggctattggtctaaaattctccttttttgttgtgtctctgccaggttttggtatcaggatgatgctggcctcttaaaatgagggaggattcccttgttttctattgattgtaatagtttcmgaaggaatggtaccagctcctccttgtacctctggtagaatttggctgtgaatccttctggtcctggactttttctrgttggtaggctattaattattgccttaatttcagagcctgttattggtctattcagggactcaacttcttcctggtttagtcttgggagggtgtatgtgtccaggaatttatccatttcttctagattttctagtttatttgcatagaggtgtttatagtattctctgatggtagtttgtatttctgtgggatcggtggtgatatcccctttatcattttttgttgtgtctatttgattcttctcccttgtcttctttattagtcttgctagcggtctatcaattttgttgatcttttcaaaaaaccagctcctggattcattgattttttgaagggttttttgtgtctctatctccttcagttctgctctgatcttagttatttcttgccttctgctagcttttgaatgtgtttgctcttgcttctctagttcttttaattgtgatgttagggtgttagttttagatctttcctgctttctcttgtgggcatttagtgctataaatttccctctacacactgctttaaatgtgtcccagagattctggtatgttgtgtctttgttcttattggtttcaaagaacgtctttactgctgccttcatttcattatgtacccagtagtcattcaggagcaggttgttcagtttycatgtagttgagaggttttgagtgagtttcttaatcctgagttctagtttgattgcactgtggtctgagagacagtttgttacaatttctgttcttttacatttgctgaggagtgctttacttccaaatatgtggtccattttggaataagtgcgatgtggtgctgagaagaatgtatattctgttgatttggggtggagagttctgtagatgtctattaggtccgcttggtgcagatctgagttcaattcctggatatcctcgttaactttctgtctcattgatctgtctaatgttgacagtggggtgttaaagtctcccattattattgtgtgggagtctaagtctctttgtaggtctctaaggacttgctttatgaatctgggtgctcctgtattaggtgcatatatatttaggatagttagttcttcttgttgaattgatccctttaccattatgtaatggccttctttgtctcttttgatttttgttggtttaaagtctgttttatcagacactacgtttgcaacccctgcttttttttgttttccttttgtttggtagatctcccttcatccctttattttgagcctgtgtgtgtctctgcacgtgagatgggtctcctgaatacagcacactgatgggtcttgactcttcatccaatttgccagtctgtatcttttaagtggagcatttagcccatttacatttaaggttaatattgttatgcgtgaatttgatcctgtcattatgatgttagctggttattttgctcgttagttgatgcagtttcttcctagccttgacggtctttacaattcggcatgtttttgcagtggctggtactggttgttcctttccatgtttagtgcttccttcaggagctcttgtaaggcaggcctggtggtgacaacatctctcagcatttgcttgtctgtaaaggattttatttctccttcacctatgaatcttagtttggctggatatgaaattctgggttaaaaattcttttctttaagaacgttgaatattggcccccactctcttctggcttatagaggttctgccaggagatctgctgttagtctgatgggcttccctttgtgggtaacccggcctttctctctggctgcccttaacattttttccttcatttcaactttggtgaatctgacaattatgtgtcatggagttgctcttctcgaggagtatctctgtggcgttctctgtattttctgaatgtgaatgttggcctgccttgtcaggttggggaagttctcctggataatatcctgaagagtgttttccaacttggttccattctccctgtcactttcaggtacaccaatcagacgcagatttggtcttttcacatagtcccatatttctcggaggctttgttcatttctttttactcttttttctctaaacttctcttcctgcttcatttcattcatttgatcttcaatcactgataccctttcttccacttgatcaaatcggctactgaagcttgtgcatgcatcacatagttgttgtgccatggttttcagctccatcaggtcatttaaggtcttgtctatgctgtttattctggttagccattcgtctaatcttttttgaaggtttttagcttctttatgatgggttcaaacatcctcctttagctcggagaagtttgttattaccgatcgtctgaagccttcttctctcaactcatcaaagtcattctctgtccagctttgttccattgctggtgaggagctgcgtttctttggaggagaagaggcgctctgatttttagaattttcagcttttctgctctggtttctccccatctttgtggtttttgtctacctttggtctttgatggtggtgacatacagatggggttttggtgtggatgtcctttctgtttgttagttttccttctaacagtcaggaccctcagctgcaggtctgttgagtttgctggaggtccactccagaccctgtttgcctgggtatcaccagcagaggctgcagaacagcaaatattgcagaacggcaaatgttgctgcatgatccttcctctggaagcttcgtctcagagggcacctggctgtatgaggtgtcagtcagcccctactgggaggtgtctcccagttggtctactcggggatcagggacccacttgaggaggcagtctgtccgttctcagatctcaaactccgtgctgggagaaccactactcttcaaagctgtcagtcaggaacgtttaagtctgcagaagtttctgctgccttttgttcagctatgccctgtccccagaggtggagtctacagaggtgggcaggcctccttgagctgtagtgggctccacccagttcgagcttcctggacactttgtttacctactcaagcctcagcaatggcagatgcccctcccccagcctcgctgccgccttgcagttcatctcagactgctgtgctagcagtgagcgaggctccgtgggcgtgggaccctccgagccaggcgcaggatataatctcctggtgtgccgtttgctaagaccattggaaaagcacagtattagggtgggagtgtcctgattttccaggtaccgtctgtcacagcttcccttggctaggaaagggaattccccgacccctcacacttcacaggtgaggcgatgccccaccctgcttcggctcacactccgtgagctgcacccactgtctgacgagccccagtgagatgaagccagtacctcagttggaaatgcagaaatcacccgtcttctgcgtcgctcatgctgggagctgtagactrgagctgttcctattcggccatcttggaaacggcaccagaaatgggttttaaaaaaatcactgttaactcatggattttagtatacttgatagcaaatatttattttaataaacagttttaaaaaattagaaacacaggaaaggatgattaaggtaaacattttaagctagtagctacatcagagattttcagatggataaatccagtcacctcraaacctgtgggctttgtatccaggatgtgtttcctggctgggtgtagagggggtttgggtggagataattatctcccacacgaggactctgctccattcatggactcccagacagcttgagtattcagcgccgagtagggtcgccccattccaccaggagggaaggccttgtcccccacgacctgcctatctaaattttggtggagcttcttcaagacccagaaagagattcccttttctgctaagcccccaccacttgcactgtggttatgcggctcatctggaaacgcttccgtcattcctcagacctcaaaccctgttgttagtaggaagcatgggcctgacttttgatgaaaaaaaagtaaaaatgtccagtcaccagtcacactttacttctatgtgtttatcaatacttaatagcagactatggcatataaactgggttgtagattcattttttagattcaaataatttctctaaagcaggtagaaaacatttagtgagtttcaaatgtaatgttatgtgaaattcttatttttgttgaaagattaaataatgaagagaccattattgttgttccttctgagccttctctgattttaaaataggtgtaacgtagagatcaggagcgaaactaacatagtgaaggttgtggccccatagttcagcttgtgaaactttcacgtcgttgtgttggcttcagatcttcggaagggagaattgcccatccaaatacaaatgaggcccctcccatcccctccccactcctggtcccacagtctccttcacagcatttgaactgcagggaatgttagagttaccctaagacgacccgtcactaagatgtaaaaatcttttttttttttttgagacggagtctcgctctgttgcccaggctggagtgcagtggcgcgatctcggctcactgcaagctccgcctcccgggttcatgccattctcttgcctcagcctcccaagcagctgggactacaggcacccgccaccacgcccggctgattttttgtattttagtggagacggggtttcaccatgttagccaggatggtctcgatctcctgaccttgtgatccgcctgcctcagcctcccaaagtgctgtgtttacaggcgtgagccaccgcgcccggctaagatgtaaaagtcttagaacgtcacactacagcgtgtgtttctgtgatgcctgtttccccaggctcgagacctccgtgtgcagtgcttccccgagcacagggaaccagaccagtgggagcaggaaggacctctgcgaggtgttggcaccttagaaatttctctatctatcattttaagaaaatccaccggcctgctgcgtcgccatgcttctgcagctggtccagggacagagcttcgagtgggctggcccagcctcatttcccccatcaaccccattaatttttttgtatgggtttgcagaaacgcggtttttatggaggcatggcacagcactgtaggagaaatggcaacctgtgttgctttgaactctcttaccttgttattcgtaggtgactgttagttacacttgcaaaagccaaatgaaacactgtcatgattttatagttccatctcttgttaaaattggaaaaccactaaactctacctattgaaagtaagtaaaggtaattttttgagttgaaaaagaaasaaagaaaaagagaaaaaaagaacctggagcaaaaagaattaagtgcctttactaggatgaaaagtcatgaattacgggcttgtgatgacaggatttcagttttcatttgaatcagttaaattatcatgcaaattgatgcaaaactgagatccatttattcattgaattaaaaaggctggaaggaataaatagacgaggttagaagaaaatatgttgcttgattgaatgaattcactactttgcactgtgtcttgcagtatggtatttggaagtcaactggatatccattcaggtgggatagatttagcttttccacatcatgaraacgaaattgcacagtgcgaagtctttcatcagtgcgagcagtggggaaattattttctgcattctggtaagtaataacttcagattaatttgttctgtttcaattctagcagttctgtctttgtcggcggaacagctacatttggaaatacatagtagatcagctaataggtcaagaaatggatttgcctcttaaattatttttgagtttcaatcatttgaacatgagcttccttggattgcagcaatgattatacctttttggaactgactagaatatggaaaatgtttggcaatgctgttctatataaggtttctttcaagtaaaactattaagaaggaacttgaagtagtacaatgtaacgataattatgaacatcctttctgaagctataatrttgtcactagacatctctgccatcttctaataacattgccctttcttccactgttcaaacacctaactgatgaaccccagctgtctgctctcagaagtggatgcaacaccatgagttaagcaacacctcgaacccagcagttttggaattcacttggatgcactggaagagtcgtatttccaagtttacagggtcacgattaactagtcttattaccttttggggatggacagctaaggtatttgagatgaagaaagataaagagtgtttggtagtgataggatttggagatgcaaacttcgacatctaaaatacagaaaattaacaaatactatcttttgaagtccttgaattgggaaattaggatgtcacagtaaagtgacattaagtgcagaagtgctctggttttctggtccgcagcagagttcacttgggtttcttcgtgaaagtacatgaggctgattgccccgaagtcacttcctgcagcatgtccttcaccccgggcttaccctgttgagtyggggracccagcaggcggctctgcccctaccattacctactrtgtctgcctctcacagtgccccagtttttgtctaaaaatgaagcagaaacaaagctggctgcgtggctgtttgaggacttaggagctgttgtccggcaccccataccatttccctggggagggctcagcactagctgaaatccactttattccggtgtcggtggagtttctaatcagaacaaacgcctgccgccctcacttccgtttcagctggcgctcacatgggaagggggtgcacgctgcccagtggtggaatatttaaggcatcgcccctcagggagccgagcactgatttccacagccgggggcctgcactccacttttgaccatggggaaggaggtctctcttccgtggcccaaggacttctgaattgtgttcttggagaggaagcgtgctgggagcccagatagtggggctgagacactgtgtctcaggcacagaggtagtcgtgtcccttgtcccagatgaagaaagataaagagtgtttggtagtgatagatttggagatgcaaactttgacatctgaaatacaggaaattaacaaatactagtttttgaaacccttgaattgggaaattaagatgtcacagtaaggtgacattaaatgcagaagtgctccggttttctggtccgcagcagggttcacttgggtttcttcatgaaagtaaatagatgaggctgattgccccgaagtcacttcctcgttgacttcgttcagggctcagttcagcgctccctgaactgtctgaggagctggagttgctccctccgcaggcacgtttctgtctgcaggtttatcctgttcagtaggtcagggtttgttactgacaaccatgacctgctgtgagcccttctgcgagtgtggagctggggggcaagaagggcagccttagctgtgccaacgcttcgtcctgtcaggtaatgaggaggggccgggtctagaaacggaggtcgtgttcaccttccgatgtgggaatgggaaagcatttgctgttgttgttgaaacaatttcgctccgtctcccagcctgggagtgcagtggcactatctgagctcaccgcaacctctgcctcctgggttcaagcaattctcctgcctcagctgttctagtagctgcgactacaggtgcataccaccatacccggctaatttttgtatttttagtagaagcagggtttcaccatgttggccaggctgggctcaaacccctgacctcaagtgatctgccacctctgcctcccaaagtgctgggattacaggcgtgagccactgcacgtggtgggaaagttttgtggctatttttcagtgattttttactacctgttaagataccagcgatctttttcatactagtttggccccaaacaaaacatcagtgtctcctgacgcaggagaagtgacacctgttctcctgtacccagtggatggaagagctaagtgggcagacactatcccagcctgttagggctgctatagccaaactgaaagcgggcgtgttatgaacaacagcaatgaattcctyacagttctgctggctgggagtcctgcgtcagcgcactggcagactcggtgtctcgggagggcctgcttcccatttgtagacggccgtcagctctcgaggggcctctgttatgagagcactgattccattcacactggctctgcccctgtgacctcatcacctcccacaggccctgccttcagttaccgtcacctgagggctgaggattttgacaggaatttgggaggacataaacattcaggccttagcaaatgtgttttattttccaactatcatcaattttaaaaaatcagaatcgtgcttggtgtaatcacattatatagaattacatgttcaaagttatatatgttttttggaaatcacattctaattggttggttggttggtttatttatttatttatttttgaggcagagtctcgctctgtggcccaggctggagtgcagtgacatgaacatagctcactctaggcccaacctcctgggctcaagcgatcctcccacctcagtctcctgagttgttgggatgttgggactgcaggtgtgccccaccacgcccagctaatttttaattttttttgtagagaccgggtgttgccatgttgcccagactggtctccaaactcctgggctcaagcggtccttccaccttagcctcccaaagggctggtattacgggtgcgagccactgcgtccggcctggaggactcctgtttgaagttgtgtcagaaaaagaggaagagtcttctgttagaaacagaaagcccttctcttggagataagccttgtaaaaagctacaggccagggagaatttcagggtcagattcaggagttccttaaatgagtttggttttcctcctgtctttcacatacataggggatgaaataatacccaggtcatcaaagtctgtgaaaccaactgcaacaggacctctgattcttcccactcagagacccacaagtgccactctgtttttggacaacggtcaacaagcttcaccgccaagtgcctgatttgtcaaatgagagctttgtcgtttcttcagatgctgaccagtatctgaattcagtatctctgaattacaggagaggagaaaatagatgaaatactgctgtcagtaccacggttgctggctcttgtttagcttctgagtcagctggggcacccctgccatctgctctcagtgtggggctgggtgtccctgcaccrtggaacaagggcaggtcstgtcttcccggaaggcccagcacgggtgaagatttgggggcagatttataccaacatacactggtctatacattggatatgtgcaggttcccattcgtttcctggggagccatgtgtccctgaggccagagagtctcctcacccagctcagactgaatgcttttgtttttgtttcagggcatttgcacgccaaaggcaaagaagaaaaaatgtccaaatcattaaagaactacattactattaaggtaacgtgctttttgtattgtatctctgaggtgccgatagcttgtggaacccatcttaaaggcttctgtgtcatttgagaaccacggaatcccattcccagtgccctctggcccctttcttatgacgagacctgcctcacctccctcccactttaagtggctctccgcctaatcgcgccctcagctgtgcgcctcccgcaggyttccgcagtccctttcttggtggagcttccctttctctttccgygtttcaaggccggcgccctcttccttgccttttccttttataatkgttgtctccctcttggygcatctgctgacttccttcccgccctcacccaccacctcttactggtgtggctttgggatttgtttaggttttgctgtttgcctttaataggctcagagctggctggatccttaaccaacctgaaaaatggcatcatgctatgctgctgacacatggaatgtgaattttcgtgtgaatggaaaacaggcrcacccacggagggctctggctgacatagtttgaactcctcctttgtcttttggcctgtctttaaagccagatttaatttaattgcaaaataaatggagaagaatagtatccagatctcaccgcctaaatagcaaaccagtgaaagctgtacccatcagatttaggatacaccaacagggactgctcctcacaaaataatttgtatatagtttccttaagtagaatttttccgttttatcctaggcaaaatttcaaaccgatagaaaagttgaaagaaacatcactrtggctccacccagattcartagttgtgatgattttgctgtatttgctgtgtaggatctttttcgcctacccagcttagattctcccaccggggagcctcaattaaattrgtaaattagactctggccaaagacagattagcaagagaaaaacaaagagaaatgtgttagagcgtgcacggcacacgtggaggtggagcacagggttgcatgacacagaggaaggttggagcccggggccacggggttgcatgacgcagagggggtccaaacccagccacggggttgcatggtatgcagtggggtcggagcctggccrtggggttgcatgaygcagartggggccagagccggccayggggttgcatgacgcagagkggggtcggagcccggccacggggttgcatgacgcagagagaggtccgaacccggccgtggggttgcatgacgcagagggggtccgaacccgaccatggggttgcatggtgcagagtgggtcggagcccggccactgcagggaccttgctttattgagcttcacttgaccgcacttcgcagatgctgtgtctttacagattgaaggtttgtggcagccctgcaccaagcaaatctgttggcacaattttgccaacagcatgttctcacttcctttctgtgtgtcatgtttgggtaattcttgcaatatttcaaagtttctcattattaaatctgttatggtgatctgtggtcagtgatctctgatgttactgttgtaattgttttsgggctccatgaaccacatccatggaagacagaacttagtatgtgttgtgcatgttctgactgctccaccaactgtccattcctttaaatctgcccctccttggactcccctattccctgagacacaacattattgaaattaggccagttactagccctacagtggcctctaagtgttcaagtgaaaggaagagtcacacatctctcactttccatcaaaagctagaaatgcttaagcttaatgaggagggtatgtcaaaagctgagacaggctgaaagctaagcctcttgcaccaaatatttagctaagttgtgaatgcaaaggaaaagttcttgaaggaaatcaaaagtgctattccagcgaacacacgaatgattagcaagcaaaacaaccttattgctgataatggagaaagtttgagtggtctggatagagaagatcaaaccagccacaacattcctgtaagccacagcctaatctggaacaaggccctaactttcttcagttctatgaaggctgagagagatgagaaagctgcaaagaaaagttggaagctagcaggggttggtttgtgaggttgaaggaaagaagacctagctaaaataagtgatgaaggtggccacactaaacagcagatctttcgaatgtagatgaaattgccttctattggaagaagatgctgtctaggacttttgtagctagaaagaagtcaatggctggcttcagagcttcaaaggacaggctgactattgttaggggctaatgtagctggtgactttaagttgaaaccagcgctcattgacaattcaaaaaatcctagggcccttgmgaattaccctaaatcggctgggtgcagtggctcacgtttgtaatcccagcactttgggaggcccaggtgggcagatcatgaggtcaggagttcgagaccagcctggtcaacacagtgaaaccctrtctctactaaaaatacaaaaattagctgggcgtggtggtggacacctgtaatctcagctacttgggaggctgaggcaggagaatcrcttgaacctgggaggcggaggttgcagtgagctgagattgtgccactgcactccagcctgggcgacagctagactccatctcaaaaaaaaaaaaaaaaaaaagaattatgctaagtgtactctccctgtgctgtatacgtggaatatcaaagcstgtatgacagcacatccatttacagcatggtttactgaatattttaagcccactgttgagacctactgctcagaaaaaaggattcctttccaaatattgacagtgcacctggtcatccaggagctttgatggagacatacaatgagagtaatattgtttttatgctgctaacagaacattctgcagcccattgatcaaggaataatttcaacttttaagtcttattatttaagaaaaatatttcataaggctatagctgccatagatagtgattcctctgatggagctgggcaaagtaaattggaaaccttctggaaaggattcaccattctagatgccagtaagaacatgtatgattgatgggaataggtcaaaatattaacattaacaggagtttgaaagaagttaagtccaactctcatggttgactttgaggggttcaggacatcattggaggaagtcactgcatatatggtgggaatagcaagagaactattggaattggaaatggatcctggagatgtgactgaactgctgcaacctcatgataaaagttgaacaaacgaggagttgcttcttatggatgagcaaagaaagtggtttcttgagatggaatctactcctggtgaagatgctgtggacattgttgaaatgacaacaraggatttagactattgcataaatttagttgataaagcartggcagggtttgagaggaytggctccaattttgaaagacattctgccgtgggtaaaatgctatcaaacrttggatgctacagagaaatctttcatgaaaggaagagtcaattgatggcacagacttcattattgtcttgttttaagaaattgccacagtaactcagccttcatcaaccactaccttgatcagtcagcagccataatattgaatcaaaaccttccaccagcaaaaagatgactcactgaaggctcatatgattatcatttttgttagcaataaaatattttttcattaaggtaygtacattgttctttcagacataatgctattatatacttaatagactgcagtataatagtgtaaacataacttttatatgcactgggaaaccagaaaatatgtgtgccttgctttattgtgatattcgctttattgtggtggtctggaaccaacccttcagtatgtctgaggtctgcctgtgaaccatgctaggccaaacaaaaaaaaaaaaggagatctgggcttgaggaggggcaggcaagttttgggagggtgactaggaaaagtgataaacaaggattgttgagtaaaatttgttttgcagattgagcctctctattgagagttgttagggagtcctcaccctgctacagcaggatacatcttttacaactgggagctttgtttacaaggaaaacttgcaccctgtttttagagcatttcctgcatctgcttgttctcagtggtctttagctcaaaataatctgtatgccagggaggcatattcagggctggcaggctgtggtacccttcaggggctttatctgtgtttatgggagtggtgagcgtgtgtgtgcatgtgcacatttgtgtgagcatgtatgcacatggacacctgtatataatgcttgttattgaccattaggaaatacattgaagacatcatcacacttctctattctgtaaccaactcctaaaaataaggatgctttcctacataatccaaacacctaaaaagttagcagtaatttcttaatattatctagtctgtagtctgtttttctttttttgtttgtttgtttttttgttagtctcactatcacccaggctggagtacagtggcgtgatctcagctcactgcaacctccacctcccaggttcaaatgattctcctgcctcagcctaccgagtagctgggattataggtgcacaccaccatgcctggctaatttttgttttgttttgtttagtagagacagggtttcaccatgttggccaggctggtctggaactcctgacctcaggtgatccacctgcctcagcctcccaaagtgctgggatcacaggcatgagtcactgcgcctggcctgttttctccagttatccccaaaatgtgttttatacttttatttttaaacgaggagttgatcaaggttcatrtgttgcatttgtatgttgtgtctttttagggttttttttaatgtggttaaaaaaaccacrtaacataaaagttatcatcttaaccatacagttcagtagtgttaatatgttcacattgttatgcaacagatctctagaattttttcatcttgtaaaaccaaaactgtggactcactgaacaacttcccatttcccctttccccaggccttggcaacaacccttctactttctgtttctatgattttggctgctctagatctcgtgtaagtggactcacatagtaattgtccttttgtgactggcttatttcacttagcatggtgttctcaagattcacctgtgctcctttattccatgtcaaaatttccttcctttaggctgaattatatttcattgttctttctaggtttctaatctaatctacagcagtctttctacttttatttttcctgtggtgttgactttttgaagagattgagccacttgtcttgttgaacatcccacattttggatttgtctgtttcattgtgttgtcatttagcttgttcttctatctcctgtagttcrtttcacgggaagtgagggttaaagggtcagtttgatccaggtagaagctttttggcaggaataccttgtagttgatgctgtgaactcacagtgcattccctgggggctgcaaggtcaggttgtcctacgattcatgatggtgagttttaccatttgttaaggaatgactaccagatccctctactgcagagtttattttcttcttatgaatattaagcatctgagaggtggcatgctgcatggtaatttgtttcctaataascttccaccctatggttttagaggcttcactttgatcaggtatttcattggttattgcaaagtcatggttgtctaattgttccctcttttacatttattagttggcattcttcttaaagaaaagtgtttttgtctttctttttttagtagacagagtcagtgatttatatttatttagtgtattgtcaattcagtcattatcttttgggtgttgaaatcatcccggatttagccagggagggctcttctgactggctccggtcccccagggacagrcccctcggcctctgttgtgccctcctgcacctgcctgccttttgctttcctacccagacctgccgtttctccaagcagccaccctgcctttgaggggaaatgggattttgaaggcaagatttgggcactgcgatgttgattgctaccagagtgacactgcgtctacgctttttcaggggtcagagctaggggaragggagataaacctgcacatacaaaatagattccttatttgggttaattttgatatatccaaataaaattataaaatttaatatcacagggctttttagttttagctctttattttcctctcttactaaacatcttataagagcatatcaactttttgttttatcttaaaatacacacaaaataaatttaaaaacttaataccaatattaccattaacagtaaaactattgagtaaaacttaaggcttctcttatttctttttaaactaatagctttattgaaatgtaatgcacatactatataagtatactatttaaatggtactgcttagtggtttgtaagatattcgcagttgtgaaacsaccactatctaagaacgtttttttttttttctttttgagacagagtctcactctgtcgcccaggctggagtgcagtggcacaatcttggctcactgcaagctccrccttccgggttcacgccattctcctgcctcagcctcctgagtagctgggactacaggcgcccaccaccacgcctggctaattttttgtatttttagtagagacggggtttcaccatgttagccaggatggtcttgatctcctgaccttgtgatccacctgcctcggcctcccaaagtgctgggcttacaggcgtgasccaccacgcccggcctctaagaacgtttttatcaccccaaaaagaaacrccacatccatgggccatcacttctcactcccacctcctcccagccccgacagccgctcatctactttctgtttctgtgattcacctattctggactgaaatttctttttctcgtggactgcaccccactaaagctctgtggtctgaacatacactcgcggcatgtaatgatctcctttcattaacacaagaggttcatttgttctgtttgtttccagtgtggtggtctctctcttccccttttcaatttactttttgttttgtcttttttgagagtcttgctctgtcacccaggctgtagtgcattagtgtgatctcaactcactgcaacctctgcctcccaggttcaagtgattctcatgcctcagcctcccaggtagctgggattacaggcctacaccaccacacccagctaatttttgtatttttagtggagatggggtttcaycatgttggccaggctggtcttgaactcctaacctcaggtccacctgcctcggcctcccaaagtgctgggattacaggcgtgagccactgcatccagtcccaatttacttttatttgtcatatctgtgaaacatttgcagggttcagcattaacactaaagagagcatggagaaggctggcctggagcccgcctgcacccattccttccccagcagccacagttgtgttctctgttttggattcrtcttcctgtgttccrttacacacgataggccaatacacataaacctttctcctctgtctcattcatgaggcagtgtcgtatgcatgccgcctcttccctaacaatttaagtgaggttttaatttgattatagacatgatgggtttaatttcagaaagtttgaaaactgcagacaagacrgagaascacacggtagaaaaattcaaaggtactaagtctggaaagcaggcctcctgcccgaccacgttcactgttgcccggcttctctcctgaagcagcggttagttttctcggagcaggtgtgtgtgtgcacacatctccctatagctgtgcttctcactttcccttcacacacagtcgtgtagttttgcgyttgcttgattaatctcttggcctcagtmggttttctaccatatggagttggttcattctctcgaatggctgygtagtccagtgtgtgggtgcagcttaattaaagaatcccctattgatggtcatttaaatcctactgtattttccactagggtatgtgcattttcaattttcacagacattgccatgtctgcattatttttagcagcctcttagtggctcatggcagkgaggcaccgtgattttatttccctgttgttgggcttgtttgtgagacctgtactctgcaggctgcagtgctgtgatgaatatcctttagctaaatatctgtgcacatctaatgattagtgacttgagaaaagtgccttgaggtagaatcgcacatcagaagatacgggcacattcggaatgttttggayagagcccctggtgactttatcaaygagtgtgatttacattcctactggcagtagattaaaatgtctgtttcccaggtctctccagcatcaaattagaattttaatcaggttaccttttttcctttttttctttttctttttttttctttttcttttttttttttttgagagagggttttgctgtcacctgggtacctggtgcagtggcacctggtgyagtcctagctcactgcagcctggaacttgtgggctccggcaaacctcccatttcagcctcctgaggagctgggaccacaggcatgcactaccacacctgctgattttgtattttttctagagacgaagtctcactatgttgcccaggctggtctcaaactcctgggctcaagcaatcctcctgccttagcctcacaaagcgctgggattacaggtgtgacccacggcacctggcccatttttcttgttaatttgtgaagaatggcaactagattttaaatttccatgcstttgtctatttgctgtgttgatttgtctatatgtattwactggtgatttttcatttatatttttggtagctcgcacctaccctagcccatagttccttggagatgttaagttattgccctacatcttaaaaatacttgccacattcctggtttctagcataagaccctttcccgccagtcctctttgtcttggagaccactgatagacctttatgatagcctgggtgaaaacccaatgctttctgcgtaatggaggccacagtccacgtagaaagagctcaaccctggagctcagataatggtttaaaacctgctttctagttactgtacgtctcaaagcaagctagggcctggcccagtagagaggctctggtgcctgcttctgcccaggggctccaggggtgtgtgcagcgctggcatcataggaagtccctcggcaactggcatgtgtacccagcgggctccctgtgagtgtgcaccctgttacctcgtgagctcactggggctcacatggcttgttaccatccccacctgaaggccaatccggtcctccggcctgggctctgggagattgcttacctcctggagagttccagcacgagcttacactgccgtcgccacattttgcctctcagggagccgtggcaggttgcacggtggaaccggagtagtatagaaacttgctgatatcagccggcacagagcaggaacacgctaaaaaattaatgtccgtgtgcacccacagtattcaagagttttcacatcattgtcagaatactgtgtaatgaagaagttataatatgtttctcctttagtccgtakaaactcaatgctctagaaagattagattccagatttctattagaactactactatagctcgctgcagtagcgcccgcccccgcaagagcagggaagataagcctttaatgttgttggggtttcagagaactatgagatgcgtgaaaacacattgaggctaattctgcatgcgtttacattctgagaggaaaacccctttgagagaaagccaggtgaaatcgtttttggaatgaagtggggagcgtggaggctgcttgtggagtggtgtttccacaccgaaacccggagacctaaatagggcgcaacctgaactgaaaccrgcaggacatggctgtgtgcgttaattggaaccacagcacctcgggtgagggagggtgtcaagtaagcctgcgagttgcgaattagaggacccaggagtaatattccttttttcacaatttgggaaggagcacccgggagatggacagacggaaatggaattccagtgtgattactgatgaactactgttggattggacaggggctcttcacacacacacacacaaacacacacacacacataccccagcccccctccccaccccaggcccctgtggcagcctggtgaagtctgtggacccagccttacaatttgctttaaatacgtaaaataaaatacataggatcccaaaggccgttgatgatactgaagtagaggagcrggggctctgcttgactcagcggttagctcagcgtgggtggggtctgatggctgccatcctctcgtgtgagttgtggtgtgtgatgtcatccctgtggggtcacctgtggcagctgtggccaccatgccaggctctgtgcttccagatgcgtttgctgcctacactgaccatcgaaggaaatacccatttcggtgcaaggctggcagaaataaacacataactgttgaaccatcccagttcacagatctccccgccctcccaccttctctctgtgggcccctaggaggtctgtggaccccaggttgagcacccctgtgttagggcattggcccagcagctttctgattaacgccaccccacatgagaatgcccctcactgcctcaggcacaggcagacaggagttgggctgtggggtgggggctgagctccttcctggtagaagacagaccagacctgctccrtcctctgaagggactgagccctggaggcaggtggagcagtgtcctcctccttccagctcagcagtccagggagccccctcctttctactgggtgggcgaggccgctgmagcctgaagcagggacagccccttctaccccaagacgctcttcagttgtgtgtgttttgctctcagtagggttgttgagcagcacggccttagactggtcttttatgcctcataaaataccatgtgttgtgatgcagtattttgagctggactccgccgtttccggctcactctccctggcagctctgtgctcccacgaccaccctgcagaggaagtgggtatctgagctctgatgagcgggtgcagactgtgggttggtgtcagcccctgtgctctgggcttgtgttgctgcccatcagcctagagaagagggtatcgggtttacccgagggagacggaaacgcaattctcactccagcaaggtcagcgacagcttcctgcgcagtggacaggcatggggtgagccagttctgtcttctgaggtggtggcaggaaagggggctttggtcagagccggcaccatgtgctgcagatccaggcaaggagccactcgggctcccgtcggagcgcgtccctggccaggggtgcagtcggagctcggctttctttcttggggccacagtggaagcccaagctgggcagagccctcttccttctctcccccactcatctcatctcttaaaagtagctgccagagctgaaccctgagcgccccacaggaggttttgctgagggctgagctgcttttgcagtgcctctaatgacctcttctaagcttcctcatgtagaaagctccacttctttctggacagacgttttctaattgatctataggaggataccggttgggttctgagttttacttaggtttaaccagaagctgggtggtttagtcttcaagagacagacttagcgcatgctttagcccagtgtttacaagaactgtgccaccaaataggatgagtgaggctgtcgccccttggctgggctgagctggaggtcagccgggtctgacgttcaccgcaagcttctcctgggggttgcaggcaggccagagctggtgtgcctcccgccacctacctggtctcttcctgagcacagcatcgctccatgctgtctgtcccacgtccctgtcgtgcagaaagagagcccaggctgagcacaggacacactcctcctggagcctgcgcaggtgcggattttcagtgcaaaccggctttctcttcttgctctttccacaaatactgagatcgaacgtggaaagttcagtgaggaaatcaccaggaaacaggtggtaattgtgagtttggagggctcattttcatcaaggttcctgatttcttgataggtagagataacttatgtaattgtagaaagtaacatattctctgaacagtgcgaagcgtaaaagcaaagcctcgtgactgcctgtctctcgctttaccaggactttctgaagaccttttcccccgatgtcttccggttcttctgcctgcggagcagctaccgctcaggtgagccragcacacgtggagtggactccccccccagctcggagacagtcattctgacaggactgaaaacagcaaaatgcaggccagagaataagcagaaccttgttgagtgaggctgctgtgtgccttacggttcgggttgagagtgaacccagaggacragggatcccagtgctggtcygggcccggcccacagtggatgtgggcttcctcgtcaagctcgagtcctctccactccttctctctgggtctggacaagtcgtgaacycgcagcacctcggcttcctgctgtgtgaactgggagattggaaggggccagcctggcacggcccctgaacatgggagccctcaaacgtgaccctgcctgtcctgcccaggggcagcacttccccgaacggtgtgtagcagagcaaggtctcctggatgggtgatgacggttcctcccatgctgcacagttrcctgctgccccgggctaggctcttggccaggagttgtctagcactggcctggcatggtggctcacgtgtatgatcccagcactttgggaggccgaggctggcagatgttttgagtccaggagtttgagacccgcctgggcaacatagtgagatcttatctctacaaaaaatacaaaaggcctggcacgatggctcacacctgtaatctcaacactttgggaggctgaggcaggtggatcacttgaggtcaggagttcgagaccagtttggccaacgtggtaaaaccccatctctcctaaaaatacaaaaattagccaggcatggcgatgtgtgcctgtaatcccagctactcaggagggtgaagcaggagaattgcttgaacctgggaggcagaggctgcagtgagccatgatcatgccactgctctctagcctgggtggctgagcaagactccatctgaaaaaaatacaaaaaaattggcttggtggcatgcacctgtaatctcagctactcaggaggctgaggcaggagaatcacttcaacccaggaggcggaggtgcagtgagctgagatcgcaccactgcactccagcctgggtaacagagcaagaccctgtctcaaaaaaaaaaaaaaaaaaaaaaaaaaaaaaaaaaaaagtcgttatccagagctgcatccctggtggcaagtgagggctggggacagtgatactgccctgcctggcttgaccacctaactggcaataaggtcccagtgtatggctagtgctgcaggagcagggccagtgtcctctggagatggtgacagttccttcctggtgagcgagggttgctgtccttctggcctctggtgtcccctctgctccattgacactgccgaggccctgggtcgctgctgttgtcatgccacctccctctcccccttcttgtccctcctacktagctctcttgctccaaattgatgatttcacctttttaatgaagacgatgggagtggggacatgcagccgaaacatagtttattctcattcccccatggggtgaatctatctggccagcacactttatgtcacacacaaagctttggtgggtttgggtgagcccctgggctggtcccctatccatctccctcccctgtgctgtgcctgcagaatttcacccggcctgcagctcctgtcagcgtgagaggggcacacagacacctgcacctttgaccaccgaaaggctaccttgggccatgtctttatcctggctctgacgccacgtcgttggctttctactgcaaactcaggttttctgagacgtggtctgaacctctcccctsggtggaactgcagtgcatcggcccaggggacctgcgctcacgggcgcacgagcttgagaaagaagtgtsgccagcctcgtgctcgcctggcctcgtgcagcatctgtgtgtggtgtgcacttacgcgtgatgaaagcagcccagccgtgccgtgagaggaagagtcggggaggcgaatgggctggagaaactgtttccgcctggctccgtgttgctggaaacgggcagaggcggcggagatgaatcccgtgtgcgagcgcagagctctctycccggctcgtgcttgctcccctcgtggctgggggctgtggtcctttcaaagctgttccctgcrgatcccttcccaggggcactttgccctcggaagccccgcctcccttctcgcagattgtggcaggattaggggcagcatcttgtatgactgtcctaattgtgtgcagttctttttgagctttgaatacgaagtttggtctgaaaagaggctttctcaagcctgggcagctctttcaggaacacattcccagtgggaattttgggtgggattcaggaggcaccgatctgccrgtgagggatttctaggaacacaaggttagtcaggacgtggatccccacagtggacacgactgccccacccygccgaggtcggaggtggccwtgaggagctgggccgtcgcttgctgtctgagcttccatccacgaatggtgtgggagttcrggatcttcccagacattstttcttcacctttgggaagatggagggggacggtggtggcatcccttgcagtctgtgctgcgctgacactttggagaagygtctcccatctgtagagcagaatcctctttggagaaatgcagctgtccttgaccttgaggcagaaggcgtctccatcctgggcatctgtctgcccctccccatctggatgcctcatcttgctgtgtcattaatggtaatcttattctaacagcctcccatgcatcaactctatcagtccccgaatattatctttaaattttgtcagatcgctttgtgggtttctggctttttctcttttctatcaagctattcaaagcaaaaactgaaagtgaatttagaaaaaaaggaaaaatgttaagtaagatattagacagccctgggggaggttttcactgtgttgcttccagcttgaagccatgtctgattttggaattctcgttttgaagtcaggacttggaggcatgttgagatgtaattttsagcatatgtgtccagataggctctttttattcttgtggttttcaaagagctgtttaaagcagcactcctcaaaagcatggactgtggactcagacagcctgggaaacagagtaggcacgagaaggttctagaaatatgtggctggctttgctgatatccaaggatatgtgatcattgcaaagcgattcactcctgttgtcttacccatcagaatgcagtagactagaaaccacaagaaatgaacagatgtaaacagaaacactggcccctcatccaggtggcctaagaaacacccacagactctaaagccaggtctggggactgctcctccctyccactttgggctcctcatccagatggcctaagaaacacccacagactctaaagccaggtctggggactgctcctccctcccyctttgggctgtcccatcacacacaggcactttccctcgggrgggccttccctagaggtgcctctgaccccagggcggggctccctctttccagagctagccattcatccgcacctccatccatccagggcggggctccttctttccagagccagccattcatccgcacctccatccatccgtcagtggaaatgcacctcttggctggaagcactgggagcatgtctccacygccaccttgttctcccacggcaggtgccactgagctgggacagaccctgtggtctgtgtccagtgggcctagggactcgcggtcactggagggcrtgagagccacatgtcccgctctccgtgtggtccctgggtggcagtgccctcagaaaacactgattctgctggaccagggcaggggcacagcatggtgggcaccgcctcagtgaccatctcttcctcctcagccatcgactacagtgacagcgccatgctccaagctcagcagctgctcctggggctgggctctttcctggaggacgcacgtgcctacatgaaggggcagctggcctgcggctccgtcagggaagcgatgctgtgggagaggtaagaggcccgcctagcacccggcgtggcacccctcctgtggcctgctgggtgctgctggtgggctcttgaaggggaagaggggcccccaggagacagggcgctggacaggaggtttggggtcagggactgcccagagaggccccaggagacagggtgctgggcaggaggtgcaggtgtggggtcaggggctccccagaggccacaggggactgggagctggacaggaggtgtggggtcaggggctccccagaggccacaggacactgggtgctggacaggaggtgtggggtcaggggctcccgagacatcccagggagacggcgctggcaggaagtgtgcctggggccctcrggctctgagccccctgctcagagtggctttggrctcgggttccctgtgcgaggagcggagctgctcatccctcccagtcctgactgtgaggagccaaaatctataaaacacacaggcctgggcccacagcatcgcctccactccccacccacgggtgtcctgggcagcgctgcacattcatcccggcrtgcagagtcttccggatggtcttggtgataacccacccctgccacttcagcagggtaggcagccagtggccacgggaggctgagatccgggagccccgggctgggcctccccagcctctctttgtgagtggtcagccgtgccgtctctcccccaccgagtcttccttgccactcccctcaatatctattgatttttaaaaccatcatgaaaatgcccacgtgtgtcttgtattttaagtgtcacaggtgacctctgctctgggactttttcttggggtaacatgacagtttgcagttgatgttacataattttctgctactcaggaactcaagtctttgggaatatgacctagagaaagtccccagattagagcccccagcgtctctccctggggaaggactggtgtgggggccgcctggggagagtggagctccctctgctgtgactgttctctcctcttccctcaggctctccagcaccaagagggccgtgaaggcggccttggcagatgaytttgacacacccagggtggttgatgccatcctgggccttgcacaccacgggaatggacagctcagggcgtccctgaaggtagctcaacgaacaggtggccttgcggtcctgctgccaggggcatgggtcgggtcctctggtgggtttttctcatgtcggctgggtggcatctctgctgatttcgcctcccgcagcttctgtggaggaactcatggagcccgagtctgccgctgacacacgggatggcacccagcctggggcttgaccctcccgggcctcagggccacctggggaacaagctctcaggagcccctgaggctgmgaaattctgtgtgcttgatcctcaggggacacatctcatgtccccactgcattcatggccctttcacagagagagcttttgtggggaactttttaaggaaagacccatttaccccaakgcactgttatgcaatctgcaccccagtgtgatgaccacaccaagcacccaggggtctgagcctggactcgtgggtcactgcaagtgtttggcaggtgggacaaagaccgtgaaggcggcggcaggctttggttcctgcacgtctgagggtcccctgccaggccctgggaggcgctgcgtcaggagccccgtkacctttgatgacccgggaagccgaggctgtttgtgcctctcccacctctggaaacacctgkgggttctggccacatgctctgttagttgagcatctctgtggaggtctccatccctggctgcgtgcagtgttgggtttcagagcaccagcaggtggggcagggtgccatgtgcccttgccgggtgccttcggtccaaatactgcagacgcgcagggctcgcctctgaggggggcgggcatttgagtcacagccggctgcaggaacaggctgccccgcactgaaggcagccaggccgggctggggcaggtccmgcagccaggctgctcctgcacgggagctcctcctcctcagcccatccgcggcctcctgccttcaccgcagctgctgccggcactaccaggctggcccagctctagggcaacaggggcctcttgtggcaaggggcgggacaagtaaagaggctggcttttgtcctgcgcttttccttcccaagctttgcaattctggggcacctgcaaactaaggctagtgtcacccaagggtctctgtgcttggtaactgatgtgagccacgtaccaggatttccccgttttctgagaaacccagcccagtgcccactcagcctccacctaccatgcgccacctgccatactccacggtcatgcttcacccgcgaagcctgatgagctagtcaccacccacatgactgatgggtaaactgaggcacaagagattcctcatgcacctatagttgtatggtctgcagtgaggtagccgatgccagagctgtgtcctccctccatagaagccaggagaaaggccagactgaagtgacctgctgaagcctttgtcttttgacattgaattccgtttgcccactgccatcaagactgcttttaaggagcttctgcgacatgatctcttacagraacctgaagggccgagaagtcctgctgtgtttggtgccatcatctcttactttgaacagttttttgaaactgttggaatttctctggcaaatcaacaggtaggtcctattattttaaatgcttaattctggaattttctccatgttgggacaataacctttacccttttaacttggaatagagcattatgatgccacactaatgtatttacctgtttaaaaacatgttactttcctggaaaaataaacacactcagagccaatacttattaattggaattgcacaattctacttctgcagttggcaaactctcgtgcgcagaaccagagatgagtccatctcagcaacagaatgtcgccagctctgcacacacgtttatgttcaaagactctcagaatgtgcagaagtcacaggcacagtaagagaacattttttcctgacccatttgagggcaagttggcgacctgagcccccttgcctggcacatgttttgtmcggacaggacgggctccccgacaggcacgagtcacctgcaccttcccagcgaggctcaccctggctgtgcagtgaaggtggacgctgccaggcttctccacattccttctcttccgttgtaactcaagagcatttttgcaaagagacttggatcctatgaaaatrtcctcttccttatcaggctcacctgaaactcgtttattctatcaayacagatttgaggtttcctgccttattcttaaagtccccaccatcactttgtatgtggctgacagaggccccttggggctggcgctgtgtccctgaacatycctgtcattctttggacacccttgtagaattctcagcacaaggcgctctggctcttttggggtgtggctcggctgctgctgcctggacgggggctgccactctagaccagctgcccagcaccccgagggtcccgccgcttgggactggggcccaagcaggtgtgctgaaggcctggctctgggccaaacatgtctcgctggctctcaacagagaactatagtgtcttttccaagtttggctcatttgtatacctgttgatcacctggtagacttagttcccctttccagcagtccggcgtctgttgccaatcacataaaagtcgactggtgtgagatgacccaagtttttgcaatgtacatgttcatttttaggggtggctttccggagtctgttttgagtaagaaaagtgggatctggccaagctctgcctagcccttgtcaaagatatctcattcaccttcctctggccgcaaggcccaatgtctgggcccactctgggctcatatttctgtaataacaaaaactgtcttttatcatggaagcaataactgaggggtgtgtgaggtttaagtagtttgacaccaaggtcaaatgttgtgtctgtttcttattttacacacatggatttaacaaataggtacagctgccccttccacaccgccccaggatctgttctcagtgggaggacagcgcgaggccttctgcgcaaatcccgtcctcagcacctgaggctgtgaatctcagaccatttgccgaaacacacgtgtgcaagcgctcagtcgctgccccccagcctcatcctcaggttgctcctgatacctcggccacaattgcgtgaggtctggaagccagggagcgtttgtgttcagggcggggcggcatgcagcccccagccctttcttccaactcccgagtgaggatcactcagccttgcttggacgacagatgctcagagttgagtggagccttgcccagagcccagcgctcgcgggctgtacccatccctgccagacccagaaagaggcccagctgcagggaatcagggaagcccagggctgggtgggtgtcggcccagagcccaaccacggggtggggaggggggcatccacaatccacagtctccgggggacgtaaccgcgccctgctggcttcagtacgtttcaggagacggcagcgaggctaccttgcatggtgtggtggacgagctggtgcggttccggcagaaggtccggcagtttgcgctggccatgcccgaggccacgggggacgcccggcggcagcagctcctagaaaggcagcccctgctggaagcatgcgacaccctgcgccggggcctgactgcccacggcatcaacatcaaggtgagtgccgcaccaaggtcagggacatcaccccaggagccgggtaggtcaacaggacgtggggccatcagaggcccagacatcccccgtgaccatgctttttttttgagacggagtttcactcttgtcacccaggctggagtgcaatggcgtgatctcggctcaccacaacctctgcctctgcctcccaggttcaagcgattctcctgcctcagcctcctgagtagctaggattacaggcatgcactcccatgctcggctgattttttatttttagtagagacaggttttctccacgtgggtcaggctggtctcaaactcccgacctcaggtgatcctcccacctcagcctcccaaagtgccaggattacaggcgtgagccactgcgccctgcccatgcttctgagtagagaaacccacccccataaaaaatgaggtgggagggccgtgagggaggggccaagttggctgcaggggacgctgagcacggggacgtgggtcctgctcagcccccgccacctcctgcaggtgccttgaagctcctggccttctgctggaggtagtggggccctttctaagcgcctggcaagctttttaggacaggccggtgagggaacaggcaccctgaacctgattacgcctgtcagccccctgtgccacatgacgtggtgtctgctcagagttggacctcactcttcttctccaggacagaagcagtacaacatccacgtgggaactgctggatcmaaggacaaaagaccaaaaatcagcgggctgaggatggagcacagccatgaacctgctcacgacaagaygcacccatgcttctcasggtcaaggctttatgttaaagcttcctgtcggggctgctaggtcagcattaaagtaaggcaaccaacagtgtcccactggcgtctgtttgttagtaactgagcctaaacactcactgcgttctgtggctacagactcaccgtcgattgagtgaagtagtgtcagacattcagtagcatccagcagcacaygtgcctgtgcgtgagacctgctggccctgtgcccagggaacagacaacacagcaacagaagagcagggaccccgggaggcggcagaatgcagcctgtttcctcctgagggaggggctggggatgggtgaggtgggtgggccacgcagcatagtctgaagcagaggtgggacgccagcaatgctaaccccgggacacctcccccagcaagaacacaatcttacgttttctctctggttacaaaagtaacgtattcagcataggaaaaatgcagctgagaacccgtctgcagtcccgctgcagttaacatcctggcagctgcaggccatcttggtggtcatggtctgtgcagagcagtgatggggtcgagctgggcctgggaaaggttggttccggaggagtcagggcagccaggctgaaagccagctggcgagctgtgacagacaggattcctgagcgggaggtggcggccagcacacggcaggctgcctgggctacaggaccggtggcctcctgaagcacccaccttgctcctgatctcacccttctgtggtaagcccagcgccacagctgtcagtgactcagcagggtgacccctctccactcttcctgctcgcagaccctgggccaggcctctccctgtcacactggcatctctgaatcccaagggcacaggcagcagcgggacccgtgactggggatacgggcttgctcatcatttaaccgtgaccctgaggtacaggtctcctgtctacagttcagaagtcactcacctagaaaatcaccctagtaaagctacccacatagaaaaagtccccagagggctccttacaatgaggcatctcgacagggctgctcagtactggggcattacgggccgcccacccccccacactttcccgttgctctcctggtccagggaagctcctgggagcgtgtccggctggagcgagtgcgtgaaatacgtgggtttgagaaagaacatggaagcaatgagctgcttgtaaaaaaacccattctctcctttaagcaaagggatgttttacttagaacaaaaaccagacgaatagttcctgtgactgctgaattctatttcctaaggaaagaaggggctgccttgggcttatccttcaaggtgctttattgcagccaccacgggagaggcgctggcgaggaggccaatctcacacagacaggcttagatattcttatctccctggcatctcacacaatgtcctcacctaagaaagttgaaaggtgagctttagctgtttaaggaaaaaaatacaatactcaatttaaattaaccagatctgtcttttaatagttaccagaatttagatgttaattccccagaggaaaaatgtccatggcacagtttttctggaaaagttcacatgtagacagtgaagcttctgaagttaggcgtcaaattagtagtgacaatcttttttttaatcttgaaagtccctagttttaaagaaagtagaatccatctggggcatgtctgcatcacagggtatcactcaagagtcatcatcaggccaaaaagactctgaagggaaccaggagggtttggcccttgctgtggaaagatgctactgaaagtataagagaacaccctaatgcacgcgtcaggcacgaaaccgtaccatgccccgctaagacatgggaccagagaacacgtcaacgtcaggccgctccaggaaaaccatccacaaagacaacagaagctaacccgaggtcgacactgccatgaagagtgttggctgaaaccgcagttaccagtgtctttactggacgcgaacatccctaaggacacggctgtgctgcttcctaagcatacgtgaccacgatactgtctttccccgggtctccttagcgccatcactgcaccaggcccagcatgcctcaagtcctccagagccttctcctgagacagcactaggggccacgtcagaccccaggctgcagcccttcaccgtgcccgtccccggtccggtctgccctgctggggccggtgggtatcatggggacccctgtgtagacacggacaccggagagcgtgggacaggaggcgtctcagagctccccacccacacactcaagggtcagcgtcactcatgtttccttctgttcccatggtgcctccaaaagggtttccaaacaaagtcatcattgattaccctggagtatgtcaataagccaaacaccagcagccagataccaccaagctagtcaccactttaaaagaagatgagctggagaacgaagcagccctctgatggacccagtcagtgcagtcgggactcagggagacacccggggacccctgcccagctccctgccggaggaaagactagggaagggaagcagaggaggaacgaagggcgccggcagagagagtaacaagtagaaacttcgccgatctgggagcaggccgagaaactctgttgagctgctaaagaattcttcattctcatgtgattttcttcatttctgtcttcccagttactaccaaggagctaaggaaagttcaggaatactttgtttagtgtcgccataacatctccaaccatgcattaagtttaaccaaaagctgcaatattccagattcttaaattctcaatggcaaccaatttatgctcaagttgaaaatctggcaagcaccgtacgccttcagcacacgcgtgggtccggattttcccatcacacacacgctctcccccgtccaaggtgcctgtttacttctggtctgcgygggctcaggkttcaaagagcttgctgaaggcggcccccacctcggcgatcatgtcggaggtggtggtggagcgaccgtgcttctggaaggcttggtggttgcactgcctggtgagagagcaggcgccaaacgcggccaccaggagagggctggacctgcggagagggggacagcaggaggtgtggggaagtgggcgtcgtggtccgggggccgcagctaccctgggctctggttttgactcctgtttcaatctcaggaccccaaattgtcaatttcaagtctgatatgcccctgaggagaaagcaggtttatcacagcgaaaaccaccattaaccctccactactccctggcaggaggcacacaggaaacgtctatgtactcggagacaggtccagggctagggcacacagtgggccaggtgttcccggggaaagccaggcggcacaagctgcttagccctgtttgactgtgctctcagtgcccaggtgcagagggcatctgaggtctgagaatggggattcctgctaccagggctccatctcctgggggaggggtggaggcaactcgagtgaacacagcagaatgaacagtaagactcctgcccacacccctacctcctcggctctcaaattcatgtggacacacctagtttgggggatggtcccagactctgccatcccggcaatgaggacacatgaggccactggatgacagccctgcccaccctccagaagcccgggtctgccacacctagcacctgcagccaccaccttgatgggctcacagaagagaaatggagatgcttagaggtatgggaactgcttgcattcataaagttctctgactacagaactgggccaagggccctggtcctagaattctgctgtctcttaaagaaaattcacatctttaagaacaagtgtctaagtaagccttgaccctgtctgttttctatcttagtattctgtgttacacagaataaaccactcaacttcccagaacagcgtgctgctgggccttggttgcacctcggaactctctggagagctctgaagaccacccctgccccaggccccatccacagtgaatgatggacaggcccaggcccaagtgtggggtggaagcttctgccaagagggttcgtctgtgccgagatctctccagtgaagcctagagttcattgtcagtgtttccagggctacttattcaacgcatgagctactgaaacagcttagaaaaatcagacggtttcaaagtagaataaatgaagacgtggccttacccatttgttttctgtggtccagcaaggagcgcccagtgtaccaggacgcccagggagcccgacaggaggtccccttgccctccacacctgyggctgctgccttcctggctgcacacaagcactgcacagggcagaagtgagagcaggtgtcagcatggccatgtgtgtgaatgtgacagtagccacgggtgtggaaggccgcacggcaggcagagccacaccctccaggagcagcctgaggctccactcacatcctgcctgctacggctcttccctgtttgttccaagggttggaggcagcctctgttttacagaagaggaaaccaagacacgcagtggtgaggctgccccagaccccgctgtgtagcacagcaggttggtggagacacctgcagctcggaaccgcctcagacgagcccaagcaggcagctctgagcagggcggcgccagcctccagctcctcccaccagctcccagggacggagccctcacctgcagcccacactccagagttcaccttaaaccacagctcaaccatacagggcaacaccgagcgaggcctccaccggcctcataacgtcacgtatgcctgtgtatgggaattctctatttctttgaaaaatgttttgaaaaccaggtgttacattctctgaacctgttagacccaagagagccttccagtgattaaaaaaccctcatctcaaaggtgtcagagtccctctgagaacatctgctctgtgttccttgtgcacagctgtgtgtggatgagtgtgcgagggcgtgtgcgaggctgtgagcatgaccatgcatgtgtataagtgcgagtgtgcaagggcgtgcgaggctgtgagcacaactgtgcatgtgtatgaattgcatgcgtgtgcacatatgtgcatgtgaatgtgagtgtacaagtgtggatgtgcacacacccgcccacagacgcctcagtgttctaccctgattttggtacctagtccagccccacagctcagcaggtgagcacattcgctgcccatcatctgtccaggcctgaatggaggggcttccattttcagcgctaacaagggcacggctccccagatgcctcgctggcgctgggcccggcctctgccctgctctcacttggctcttgctgaagcctccccaggctccgtgggagtggccagttgagactcgccacactcagtgcctgagattccactaccagcatcagcttcggggctttctgcactttccagtcattttgataaaagagaatgaaatgcaataaaatacccaaataactgcatggatggtggatgccacaggtgagatgaaggtggcagctggagacgcgggaccctgcactgtgccctgctgttgcaggcaccctcccgccagactgcttctcataactgaggcaagggaattcaaccaacgggtaaggcccacggctcgaaagcctgccctcaccactgtcacctcccctggcaaaacagtgaaaagtcaaaacatggactctgaagaaagtgtggttgacgagctcatcaggaatccctgtgtgaatgtgtgtgaacacgggtgtgcacgggagaggtcttccagggctcatgctcggtgtggccatgctgactgacctggcactggcccatgcacagagggcagccgccactcaccctgctggccrttggagaggatgtcgcgctctcctttctggaccaccgtcacgttgcccagggcttggctgagtcttagcacagatccatggctgtcatcgctgtccatagggcctctgagctatgacaacacaggaagacagagaaaaagcaaagtcttcctcagacacacgacgacagata
